United States Patent Application Publication US 2011/0183924 A1 - sequence listing, part 111

SEQ ID NO: 326253 - DNA, 9693 bp, Homo sapiens
accgctaaatcgtaagtgagggctgcatcctattgtcagtgaatgatggcggagctgagtggcttgtcatcattctcgaaaattctgagactagtgagctctctccctctctcccactcgccttattttcctgttcgccactgcggggacttctaatttgcagcttccctttccccggcacacacagacacgagctggtggcttgcagactgcgtctgtctggagctagagagccagagagccagcctgtggggataatgctcccgagaaggattctggcagcagttctcaaaggctagacttgagtggtattgctgcatatgcgctgattcttcagcttgtctctaaccgaggaagcattgattgggagctactcattcagaaaattaaaagaaagaagccagaaaatattatcaaccctttgagaacacgacacaacgaactttatattttaccacttccttgaatagttgcaggagaaataacaaggcattgaagaatggcagatgaacggaaagacgaagcaaaggcacctcactggacctcagcaccgctaacagaggcatctgcacactcacatccacctgagattaaggatcaaggcggagcaggggaaggacttgtccgaagcgccaatggattcccatacagggaggatgaagagggtgcctttggagagcatgggtcacagggcacctattcaaataccaaagagaatgggatcaacggagagctgacctcagctgacagagaaacagcagaggaggtgtctgcaaggatagttcaagtagtcactgctgaggctgtagcagtcctgaaaggtgaacaagagaaagaagctcaacataaagaccagactgcagctctgcctttagcagctgaagaaacagctaatctgcctccttctccacccccatcacctgcctcagaacagactgtcacagtggaggaagatttacttacagcctcgaagatggagttccacgatcaacaggaattgactccctctacagctgagccttcagaccagaaggaaaaggagtcagagaagcaaagtaagcctggtgaagaccttaaacatgctgccttagtttctcagccagagacaactaaaacttaccctgataaaaaggacatgcaaggcacagaagaagaaaaagcacccctagctttgtttgggcacactcttgttgccagcctggaagacatgaaacagaagacagaaccaagccttgtagtacctggcattgacctccctaaagagcctccaactccaaaagaacaaaaggactggttcatcgaaatgccaacggaagcaaaaaaggatgagtggggtttagttgcccccatatctcctggccctctgactcccatgagggaaaaagatgtatttgatgatatcccaaaatgggaagggaaacagtttgattctcccatgccaagtccctttcaagggggaagcttcactcttcctttagatgtcatgaagaatgaaatagttacagaaacatcgccctttgcccctgcctttttacagccagatgacaaaaaatctctgcaacaaaccagtggcccagctactgccaaagatagttttaaaattgaagagccccatgaggctaaacctgacaaaatggcagaagcaccaccctcagaggcaatgaccttacccaaagatgctcacattccagttgtagaagaacatgttatggggaaagttttagaggaagaaaaggaggccataaatcaagagactgtgcagcaaagggatactttcacccccagtggacaggaacctatacttactgaaaaggaaactgagctgaagcttgaagaaaaaaccaccatttctgacaaagaagctgtgccaaaagagagtaaacccccaaaacctgcagatgaagaaataggcataattcagacctccacagagcacactttctcagaacagaaagaccaagagcctaccacagatatgttgaaacaggactcgttccctgtaagtttggagcaagcagttacagattcagccatgacctctaaaacactggagaaagccatgaccgaaccatctgcattaattgaaaagagctcaattcaggaactttttgaaatgagagttgatgacaaagataagattgaaggagttggagctgcaacatcagctgagcttgatatgccattttatgaagataaatcaggaatgtccaagtactttgaaacatctgccttgaaagaagaagcaacaaaaagcattgagccaggcagtgattactatgaactgagtgacactagagaaagtgtccatgagtctattgataccatgtctcccatgcataaaaatggtgacaaggagtttcaaacaggaaaagaatcccagcccagtcctccagcacaagaagcagggtacagcactctcgcacagagttatccatcagatttacctgaagaacccagttctcctcaagaaagaatgttcactattgatccaaaagtgtatggagagaaaagggacctccacagtaagaataaggatgatttgacccttagcaggagtttaggacttggtggtaggtctgcaatagaacaaagaagcatgtcaatcaatttgccgatgtcttgcctagattccatagcccttggatttaactttggtcggggacatgatctttctcctctggcttccgatattctaaccaacactagtggaagtatggatgaaggggatgattaccttccagccaccacacctgcactggagaaagccccttgcttccctgtagaaagcaaagaggaagaacagatagagaaagtaaaagctactggagaagaaagtactcaagcggagatatcatgtgagtctcctttcctagccaaagatttttacaaaaatggtactgtcatggcacctgaccttcctgaaatgctagatctggcaggcacaaggtcaagattggcttctgtgagtgcagatgctgaggttgccaggaggaaatcagtcccatcagagactgtggttgaggatagtcgtactggcttgcccccggtaactgatgaaaaccatgtcattgtaaaaacggacagtcagctcgaagacctgggctactgtgtgttcaataagtacacagtcccattgccatcacctgttcaagacagtgagaatttatcaggggagagtggtaccttttacgaaggcactgatgataaagttcgaagagatttggccacagacctttcactgattgaagtgaaactggcagcagccggaagagtcaaagatgagttcagtgttgacaaagaagcatccgcgcatatctctggtgacaaatcaggactgagtaaggagtttgaccaagagaagaaagctaatgataggttggatactgtactagaaaagagtgaagaacatgctgattcaaaagaacatgccaagaaaactgaagaggctggtgatgaaatagaaacattcggattaggagtaacctatgagcaagctttggccaaagatttgtcaataccaacagatgcatcctctgagaaagcagagaagggtcttagttcagttccagagatagctgaggtagaaccatccaaaaaggtggaacaaggtctggattttgctgtccagggtcaactagatgttaaaattagtgactttggacagatggcttcagggctaaacatagatgatagaagggcaacagagctaaaacttgaggctacacaggacatgaccccctcatccaaagcaccgcaggaggcagatgcatttatgggtgttgagtctggccacatgaaagaaggcactaaagttagtgagacagaagtcaaacagaaggtggccaagcctgacttggtgcaccaggaggctgtagacaaggaggagtcctatgaatctagtggtgagcatgaaagtctcaccatggagtccttgaaagctgatgagggcaagaaggaaacatctccagaatcatctctaattcaagatgagattgccgtcaaattgtcagtggaaataccttgcccacctgctgtttcagaggctgatttagccacagatgagagagctgatgtccagatggaatttattcaggggccaaaagaagaaagcaaagagaccccagatatatccatcacgccttctgatgttgcagagccattgcatgaaacgatcgtatctgaaccagcagagattcagagtgaggaagaagagatagaagcccagggagaatatgataaactgctcttccgctcagacacccttcagataactgacctgggtgtctcaggtgccagggaggaatttgtggagacctgcccaagtgaacacaaaggagtgattgagtctgttgtgaccatcgaggatgatttcatcactgtagtgcaaaccacaactgatgaaggggagtcagggtcccacagcgtgcgttttgcagccctagagcagcctgaggtggaaaggagaccatctcctcatgatgaagaagagtttgaagtagaagaggcagctgaagcccaggcagaacccaaagatggttccccagaggctccagcttcccctgagagagaagaggttgcactttctgaatataagacagaaacctatgacgattacaaagatgagaccaccattgacgactccatcatggacgctgacagcctctgggtggacactcaagatgatgataggagcatcatgacagaacagttagaaactattcctaaagaggagaaagctgaaaaggaagctcggagatcatctcttgagaaacatagaaaagaaaagccttttaaaaccgggagaggcagaatttccactcctgaaagaaaagtagctaaaaaggaacctagcacagtctccagagatgaagtgagaaggaaaaaagcagtttataagaaggctgaacttgctaaaaaaacagaagttcaggcccactctccctccaggaaattcattttaaaacctgctatcaaatatactagaccaactcatctctcctgtgttaagcggaaaaccacagcagcaggtggggaatcagctctggctcccagtgtatttaaacaggcaaaggacaaagtctctgacggagtaaccaagagcccagaaaagcgctcttctctcccaagaccttcctccattctccctcctcggcgaggtgtgtcaggagacagagatgagaattccttctctctcaacagttctatctcttcttcagcacggcggaccaccaggtcagagccaattcgcagagcagggaagagtggtacctcaacacccactacccctgggtctactgccatcactcctggcaccccaccaagttattcttcacgcacaccaggcactcctggaacccctagctatcccaggacccctcacacaccaggaacccccaagtctgccatcttggtgccgagtgagaagaaggtcgccatcatacgtactcctccaaaatctcctgcgactcccaagcagcttcggcttattaaccaaccactgccagacctgaagaatgtcaaatccaaaatcggatcaacagacaacatcaaataccagcctaaaggggggcaggtacaaattgttaccaagaaaatagacctaagccatgtgacatccaaatgtggctctctgaagaacatccgccacaggccaggtggcggacgtgtgaaaattgagagtgtaaaactagatttcaaagaaaaggcccaagctaaagttggttctcttgataatgctcatcatgtacctggaggtggtaatgtcaagattgacagccaaaagttgaacttcagagagcatgctaaagcccgtgtggaccatggggctgagatcattacacagtccccaggcagatccagcgtggcatcaccccgacgactcagcaatgtctcctcgtctggaagcatcaacctgctcgaatctcctcagcttgccactttggctgaggatgtcactgctgcactcgctaagcagggcttgtgaatatttctcatttagcattgaaataataatatttaggcatgagctcttggcaggagtgggctctgagcagttgttatattcattctttataaaccataaaataaataatctcatccccaaactgtagtaattgttacaattttctatttaaaaaatgaatagtacatgcagaaattgacctgatttccatttgcaacaggaagacactggctttacatgggttcaattggacaattatttttgctctgctctgttttgcatggagtattattattttaaaaattgcatttttacctttcatgtgcctgaaggctatccactacattctgaaggccttgttaaaatccaagctgctcatttcactattctgtttctgagtgagaagataaaaactgcccattgtaacttatttcaggttaaattaaaccaaggagtctgattgcaggaagggaagagcatgtaagaaataagtttttttaaagtgttattttgtataaatgggaagaaagattcaattaagttattaacatttgggacctggataattatatcagagtatgtcagtccaataaattatttaactaattaaaaaatagttgcaaagcatttgagctgtggttgaggaagtggtgtaaaagtgcatccattaggaatgatgcactttcattaggatggactcgtgtctgattagaatgtcagttgatcagctagatttgtgtccacactaccagtttcacaccccctttccatctgtttgatacagtattatagatataaatatatatatatttctctgtggccatttgtgatacttcctcatatacttgaatattatacttctttattcacagtatctgtgtctcctgcaccctttggtgttgcaattttagatatgtgaaagtagatgttagcagggttctctccctatttaaaaaaaatacattaaaaaagacaaaaaattttagcatgaagttgctttctgtaacaactcaaagccgtaaccctgttttagtgccagatacaagtctctcccgtgatgctagacaaaaaattatttttctttgctttcaccaacatggagtttgtgggggtgggtccagttatacatgaaagggtttacagattgttggtttaagattatggatttatctcatttttaatcacaggatagtttggggtttattcctattattattcatgaaaccgacttaagattttttctttatttttctttttttttccatttgctaaagttgaaagttgaaactaactataatagtttgaaacatgttttctcatttttccaaatagtatctgtttattaaattctctaatagaagatgtttgtctttcttacccaaagtaaagatcccctgatcagaaagaaaaaatacaatactttgggaagctatagctataaaacacttgagacacagatatctaaatcagtttttttccaagactccaacattgcactctgtaaagtaacacactgtgatctagtattatttatcagtagataatactgttctgactgtatatacagtctagaactcacaaatcaattagttcctctcacaaatcattcatcttagacttacaaataaggaatgaaatagtcaatggcctgattaaggcaaagagctaccaggctagatggacactttttaaaaattttatctgttctttttcttgctcagggctggtaggttggatctgaaccattaaaatcaaatggtccactaggcgtatgatctctttgagccaaatcagttcctgaatataaaggaggaaatgatgaggatgtactgaggcaacggggaagtatagaaacatccaagacaaaagccaagggatgcaaaggcagagacacaggtgctttttggtgacccagtggatatggcaaccagtgtaactgccatacaagaaaccctaggagcaaacccacaccactcattctcagctaagagattttacacaggcaaacgtgtcttaaaccatctataaatcagttattttatatgacagtcaaaaccttagaaaccttaggatcattatatctattttctgcctattaattgctgtgaggtttgatttgaccaatctgggcaatttattcatcagcttcccttgaagtgcaccagaaaatagaagaaaggtgtgtggagacttagggtattttattacatgttttcatagtcttaaatagtgattaaatttctctagaaagaagttaacagctcattagaaaagttttaacctgtgaaataagtatttttctcaacattctttaaagtttttatataagttaacactaggtaaacattctgcatactagaagtcagtttattacaaatacatgtcaaaaataaagattatacaaggcaccaaactactagatttggcattaaaacaaatgtttatttctaatcacaacaaaattataatgaataaatgttcttgctttgtatggaaatacaattctttattaaagttaacagaaaggaactgatcgtttgtaccagtaaaagagagaaacacacaggttaaatatcttcttgtggggttaaggggtagaacctatcttgccttcactctcaagataacgactcaaattaagctttttgagcaccactcttgtggggacacacatacgctgatctaggaatgaaatcttcgtggtctcaattctagatctactatgccagtttctctctggctttagcctttgagaacctgtataagaatacgtaagtaatccagagctgtgaagagtttaaaggccaacttctccagtgaactcaacctctgggtcacttgcaaccagaaattggatacctcataatgatgcaggaaagacccgagttcatgatgagtttcaaaggccacgttcatttaggaaccaactctctctggatttacctgctgagttccagcagcgtgatgggctgacatcccacctacaagtatgacacctgtgtaacaccagctaggtacggctggagaaggctgaagagagaatgccattaaatggaagaatgtactgattgtagtgaccttctccacacacacacacacacacacacacacacacctacagtaatacagcaagcgtggaataatcagccaatatataacattccatcagtattttattaaggaaataacctgaatgtggttgattttgacatagctgcaattacagttttcttctatttttcaagccacaataaggaaaataaactactcatggtctaaatactagagataaagtagattcatggcttggtaaggaaattttaagcattccttcaaagattgacgtgctaaaataagcattgatgttttgagtttttttacacctaggatttttagcttgggtgtgtaggtgaaggccaagactctctgcaggaaaaagcttattttcaaactcagaaaataaaatgtcaatcataaaaatctacttcaactttagcaaaaagaaaaaaaaatcaacaaaaagtatactctgtatgctgggattccgaggttccaacacactgttacaaatctgtggggggtttctttcttctgataattctagagcctgttaccatagaaaggcatttcttcaatggctggttgtagttagttcatgtttttcaatcaaatttgcaaatgtatttgttgctgtatagtgattgttttgcaaaataaaattgcttgtcacc

SEQ ID NO: 326254 - DNA, 7811 bp, Homo sapiens
accgctaaatcgtaagtgagggctgcatcctattgtcagtgaatgatggcggagctgagtggcttgtcatcattctcgaaaattctgagactagtgagctctctccctctctcccactcgccttattttcctgttcgccactgcggggacttctaatttgcagcttccctttccccggcacacacagacacgagctggtggcttgcagactgcgtctgtctggagctagagagccagagagccagcctgtggggataatgctcccgagaaggattctggcagcagttctcaaaggctagacttgagtggtattgctgcatatgcgctgattcttcagcttgtctctaaccgaggaagcattgattgggagctactcattcagaaaattaaaagaaagaagccagaaaatattatcaaccctttgagaacacgacacaacgaactttatattttaccacttccttgaatagttgcaggagaaataacaaggcattgaagaatggcagatgaacggaaagacgaagcaaaggcacctcactggacctcagcaccgctaacagaggcatctgcacactcacatccacctgagattaaggatcaaggcggagcaggggaaggacttgtccgaagcgccaatggattcccatacagggaggatgaagagggtgcctttggagagcatgggtcacagggcacctattcaaataccaaagagaatgggatcaacggagagctgacctcagctgacagagaaacagcagaggaggtgtctgcaaggatagttcaagtagtcactgctgaggctgtagcagtcctgaaaggtgaacaagagaaagaagctcaacataaagaccagactgcagctctgcctttagcagctgaagaaacagctaatctgcctccttctccacccccatcacctgcctcagaacagactgtcacagtggaggaagatttacttacagcctcgaagatggagttccacgatcaacaggaattgactccctctacagctgagccttcagaccagaaggaaaaggagtcagagaagcaaagtaagcctggtgaagaccttaaacatgctgccttagtttctcagccagagacaactaaaacttaccctgataaaaaggacatgcaaggcacagaagaagaaaaagcacccctagctttgtttgggcacactcttgttgccagcctggaagacatgaaacagaagacagaaccaagccttgtagtacctggcattgacctccctaaagagcctccaactccaaaagaacaaaaggactggttcatcgaaatgccaacggaagcaaaaaaggatgagtggggtttagttgcccccatatctcctggccctctgactcccatgagggaaaaagatgtatttgatgatatcccaaaatgggaagggaaacagtttgattctcccatgccaagtccctttcaagggggaagcttcactcttcctttagatgtcatgaagaatgaaatagttacagaaacatcgccctttgcccctgcctttttacagccagatgacaaaaaatctctgcaacaaaccagtggcccagctactgccaaagatagttttaaaattgaagagccccatgaggctaaacctgacaaaatggcagaagcaccaccctcagaggcaatgaccttacccaaagatgctcacattccagttgtagaagaacatgttatggggaaagttttagaggaagaaaaggaggccataaatcaagagactgtgcagcaaagggatactttcacccccagtggacaggaacctatacttactgaaaaggaaactgagctgaagcttgaagaaaaaaccaccatttctgacaaagaagctgtgccaaaagagagtaaacccccaaaacctgcagatgaagaaataggcataattcagacctccacagagcacactttctcagaacagaaagaccaagagcctaccacagatatgttgaaacaggactcgttccctgtaagtttggagcaagcagttacagattcagccatgacctctaaaacactggagaaagccatgaccgaaccatctgcattaattgaaaagagctcaattcaggaactttttgaaatgagagttgatgacaaagataagattgaaggagttggagctgcaacatcagctgagcttgatatgccattttatgaagataaatcaggaatgtccaagtactttgaaacatctgccttgaaagaagaagcaacaaaaagcattgagccaggcagtgattactatgaactgagtgacactagagaaagtgtccatgagtctattgataccatgtctcccatgcataaaaatggtgacaaggagtttcaaacaggaaaagaatcccagcccagtcctccagcacaagaagcagggtacagcactctcgcacagagttatccatcagatttacctgaagaacccagttctcctcaagaaagaatgttcactattgatccaaaagtgtatggagagaaaagggacctccacagtaagaataaggatgatttgacccttagcaggagtttaggacttggtggtaggtctgcaatagaacaaagaagcatgtcaatcaatttgccgatgtcttgcctagattccatagcccttggatttaactttggtcggggacatgatctttctcctctggcttccgatattctaaccaacactagtggaagtatggatgaaggggatgattaccttccagccaccacacctgcactggagaaagccccttgcttccctgtagaaagcaaagaggaagaacagatagagaaagtaaaagctactggagaagaaagtactcaagcggagatatcatgtgagtctcctttcctagccaaagatttttacaaaaatggtactgtcatggcacctgaccttcctgaaatgctagatctggcaggcacaaggtcaagattggcttctgtgagtgcagatgctgaggttgccaggaggaaatcagtcccatcagagactgtggttgaggatagtcgtactggcttgcccccggtaactgatgaaaaccatgtcattgtaaaaacggacagtcagctcgaagacctgggctactgtgtgttcaataagtacacagtcccattgccatcacctgttcaagacagtgagaatttatcaggggagagtggtaccttttacgaaggcactgatgataaagttcgaagagatttggccacagacctttcactgattgaagtgaaactggcagcagccggaagagtcaaagatgagttcagtgttgacaaagaagcatccgcgcatatctctggtgacaaatcaggactgagtaaggagtttgaccaagagaagaaagctaatgataggttggatactgtactagaaaagagtgaagaacatgctgattcaaaagaacatgccaagaaaactgaagaggctggtgatgaaatagaaacattcggattaggagtaacctatgagcaagctttggccaaagatttgtcaataccaacagatgcatcctctgagaaagcagagaagggtcttagttcagttccagagatagctgaggtagaaccatccaaaaaggtggaacaaggtctggattttgctgtccagggtcaactagatgttaaaattagtgactttggacagatggcttcagggctaaacatagatgatagaagggcaacagagctaaaacttgaggctacacaggacatgaccccctcatccaaagcaccgcaggaggcagatgcatttatgggtgttgagtctggccacatgaaagaaggcactaaagttagtgagacagaagtcaaacagaaggtggccaagcctgacttggtgcaccaggaggctgtagacaaggaggagtcctatgaatctagtggtgagcatgaaagtctcaccatggagtccttgaaagctgatgagggcaagaaggaaacatctccagaatcatctctaattcaagatgagattgccgtcaaattgtcagtggaaataccttgcccacctgctgtttcagaggctgatttagccacagatgagagagctgatgtccagatggaatttattcaggggccaaaagaagaaagcaaagagaccccagatatatccatcacgccttctgatgttgcagagccattgcatgaaacgatcgtatctgaaccagcagagattcagagtgaggaagaagagatagaagcccagggagaatatgataaactgctcttccgctcagacacccttcagataactgacctgggtgtctcaggtgccagggaggaatttgtggagacctgcccaagtgaacacaaaggagtgattgagtctgttgtgaccatcgaggatgatttcatcactgtagtgcaaaccacaactgatgaaggggagtcagggtcccacagcgtgcgttttgcagccctagagcagcctgaggtggaaaggagaccatctcctcatgatgaagaagagtttgaagtagaagaggcagctgaagcccaggcagaacccaaagatggttccccagaggctccagcttcccctgagagagaagaggttgcactttctgaatataagacagaaacctatgacgattacaaagatgagaccaccattgacgactccatcatggacgctgacagcctctgggtggacactcaagatgatgataggagcatcatgacagaacagttagaaactattcctaaagaggagaaagctgaaaaggaagctcggagatcatctcttgagaaacatagaaaagaaaagccttttaaaaccgggagaggcagaatttccactcctgaaagaaaagtagctaaaaaggaacctagcacagtctccagagatgaagtgagaaggaaaaaagcagtttataagaaggctgaacttgctaaaaaaacagaagttcaggcccactctccctccaggaaattcattttaaaacctgctatcaaatatactagaccaactcatctctcctgtgttaagcggaaaaccacagcagcaggtggggaatcagctctggctcccagtgtatttaaacaggcaaaggacaaagtctctgacggagtaaccaagagcccagaaaagcgctcttctctcccaagaccttcctccattctccctcctcggcgaggtgtgtcaggagacagagatgagaattccttctctctcaacagttctatctcttcttcagcacggcggaccaccaggtcagagccaattcgcagagcagggaagagtggtacctcaacacccactacccctgggtctactgccatcactcctggcaccccaccaagttattcttcacgcacaccaggcactcctggaacccctagctatcccaggacccctcacacaccaggaacccccaagtctgccatcttggtgccgagtgagaagaaggtcgccatcatacgtactcctccaaaatctcctgcgactcccaagcagcttcggcttattaaccaaccactgccagacctgaagaatgtcaaatccaaaatcggatcaacagacaacatcaaataccagcctaaaggggggcaggtacaaattgttaccaagaaaatagacctaagccatgtgacatccaaatgtggctctctgaagaacatccgccacaggccaggtggcggacgtgtgaaaattgagagtgtaaaactagatttcaaagaaaaggcccaagctaaagttggttctcttgataatgctcatcatgtacctggaggtggtaatgtcaagattgacagccaaaagttgaacttcagagagcatgctaaagcccgtgtggaccatggggctgagatcattacacagtccccaggcagatccagcgtggcatcaccccgacgactcagcaatgtctcctcgtctggaagcatcaacctgctcgaatctcctcagcttgccactttggctgaggatgtcactgctgcactcgctaagcagggcttgtgaatatttctcatttagcattgaaataataatatttaggcatgagctcttggcaggagtgggctctgagcagttgttatattcattctttataaaccataaaataaataatctcatccccaaactgtagtaattgttacaattttctatttaaaaaatgaatagtacatgcagaaattgacctgatttccatttgcaacaggaagacactggctttacatgggttcaattggacaattatttttgctctgctctgttttgcatggagtattattattttaaaaattgcatttttacctttcatgtgcctgaaggctatccactacattctgaaggccttgttaaaatccaagctgctcatttcactattctgtttctgagtgagaagataaaaactgcccattgtaacttatttcaggttaaattaaaccaaggagtctgattgcaggaagggaagagcatgtaagaaataagtttttttaaagtgttattttgtataaatgggaagaaagattcaattaagttattaacatttgggacctggataattatatcagagtatgtcagtccaataaattatttaactaattaaaaaatagttgcaaagcatttgagctgtggttgaggaagtggtgattagaatgtcagttgatcagctagatttgtgtccacactaccagtttcacaccccctttccatctgtttgatacagtattatagatataaatatatatatatttctctgtggccatttgtgatacttcctcatatacttgaatattatacttctttattcacagtatctgtgtctcctgcaccctttggtgttgcaattttagatatgtgaaagtagatgttagcagggttctctccctatttaaaaaaaatacattaaaaaagacaaaaaattttagcatgaagttgctttctgtaacaactcaaagccgtaaccctgttttagtgccagatacaagtctctcccgtgatgctagacaaaaaattatttttctttgctttcaccaacatggagtttgtgggggtgggtccagttatacatgaaagggtttacagattgttggtttaagattatggatttatctcatttttaatcacaggatagtttggggtttattcctattattattcatgaaaccgacttaagattttttctttatttttctttttttttccatttgctaaagttgaaagttgaaactaactataatagtttgaaacatgttttctcatttttccaaatagtatctgtttattaaattctctaatagaagatgtttgtctttcttacccaaagtaaagatcccctgatcagaaagaaaaaatacaatactttgggaagctatagctataaaacacttgagacacagatatctaaatcagtttttttccaagactccaacattgcactctgtaaagtaacacactgtgatctagtattatttatcagtagataatactgttctgactgtatatacagtctagaactcacaaatcaattagttcctctcacaaatcattcatcttagacttacaaataaggaatgaaatagtcaatggcctgattaaggcaaagagctaccaggctagatggacactttttaaaaattttatctgttctttttcttgctcagggctggtaggttggatctgaaccattaaaatcaaatggtccactaggcgtatgatctctttgagccaaatcagttcctgaatataaaggaggaaatgatgaggatgtactgaggcaacggggaagtataggttgatgttcaaatacgccactttcattcacttaaaagtttttttaaaggct

SEQ ID NO: 326255 - DNA, 9645 bp, Homo sapiens
agtctggggcgggcgctcgggctgcgcgggctctgggcagcagcagcagcagcagcagcatcctctcttcctttacttcccttccgcttctttctcttccttctccttctttttcccccccctccccttcttcccctaacccttctacccctctcctttttctccggagggcgctaagtccgtgagcggtggcagtcgcgaccgcgggtgcatccagtttctgcgcccagattttattgatctaatccaaagtatcttataacttctggctggaattaagattcttcagcttgtctctaaccgaggaagcattgattgggagctactcattcagaaaattaaaagaaagaagccagaaaatattatcaaccctttgagaacacgacacaacgaactttatattttaccacttccttgaatagttgcaggagaaataacaaggcattgaagaatggcagatgaacggaaagacgaagcaaaggcacctcactggacctcagcaccgctaacagaggcatctgcacactcacatccacctgagattaaggatcaaggcggagcaggggaaggacttgtccgaagcgccaatggattcccatacagggaggatgaagagggtgcctttggagagcatgggtcacagggcacctattcaaataccaaagagaatgggatcaacggagagctgacctcagctgacagagaaacagcagaggaggtgtctgcaaggatagttcaagtagtcactgctgaggctgtagcagtcctgaaaggtgaacaagagaaagaagctcaacataaagaccagactgcagctctgcctttagcagctgaagaaacagctaatctgcctccttctccacccccatcacctgcctcagaacagactgtcacagtggaggaagatttacttacagcctcgaagatggagttccacgatcaacaggaattgactccctctacagctgagccttcagaccagaaggaaaaggagtcagagaagcaaagtaagcctggtgaagaccttaaacatgctgccttagtttctcagccagagacaactaaaacttaccctgataaaaaggacatgcaaggcacagaagaagaaaaagcacccctagctttgtttgggcacactcttgttgccagcctggaagacatgaaacagaagacagaaccaagccttgtagtacctggcattgacctccctaaagagcctccaactccaaaagaacaaaaggactggttcatcgaaatgccaacggaagcaaaaaaggatgagtggggtttagttgcccccatatctcctggccctctgactcccatgagggaaaaagatgtatttgatgatatcccaaaatgggaagggaaacagtttgattctcccatgccaagtccctttcaagggggaagcttcactcttcctttagatgtcatgaagaatgaaatagttacagaaacatcgccctttgcccctgcctttttacagccagatgacaaaaaatctctgcaacaaaccagtggcccagctactgccaaagatagttttaaaattgaagagccccatgaggctaaacctgacaaaatggcagaagcaccaccctcagaggcaatgaccttacccaaagatgctcacattccagttgtagaagaacatgttatggggaaagttttagaggaagaaaaggaggccataaatcaagagactgtgcagcaaagggatactttcacccccagtggacaggaacctatacttactgaaaaggaaactgagctgaagcttgaagaaaaaaccaccatttctgacaaagaagctgtgccaaaagagagtaaacccccaaaacctgcagatgaagaaataggcataattcagacctccacagagcacactttctcagaacagaaagaccaagagcctaccacagatatgttgaaacaggactcgttccctgtaagtttggagcaagcagttacagattcagccatgacctctaaaacactggagaaagccatgaccgaaccatctgcattaattgaaaagagctcaattcaggaactttttgaaatgagagttgatgacaaagataagattgaaggagttggagctgcaacatcagctgagcttgatatgccattttatgaagataaatcaggaatgtccaagtactttgaaacatctgccttgaaagaagaagcaacaaaaagcattgagccaggcagtgattactatgaactgagtgacactagagaaagtgtccatgagtctattgataccatgtctcccatgcataaaaatggtgacaaggagtttcaaacaggaaaagaatcccagcccagtcctccagcacaagaagcagggtacagcactctcgcacagagttatccatcagatttacctgaagaacccagttctcctcaagaaagaatgttcactattgatccaaaagtgtatggagagaaaagggacctccacagtaagaataaggatgatttgacccttagcaggagtttaggacttggtggtaggtctgcaatagaacaaagaagcatgtcaatcaatttgccgatgtcttgcctagattccatagcccttggatttaactttggtcggggacatgatctttctcctctggcttccgatattctaaccaacactagtggaagtatggatgaaggggatgattaccttccagccaccacacctgcactggagaaagccccttgcttccctgtagaaagcaaagaggaagaacagatagagaaagtaaaagctactggagaagaaagtactcaagcggagatatcatgtgagtctcctttcctagccaaagatttttacaaaaatggtactgtcatggcacctgaccttcctgaaatgctagatctggcaggcacaaggtcaagattggcttctgtgagtgcagatgctgaggttgccaggaggaaatcagtcccatcagagactgtggttgaggatagtcgtactggcttgcccccggtaactgatgaaaaccatgtcattgtaaaaacggacagtcagctcgaagacctgggctactgtgtgttcaataagtacacagtcccattgccatcacctgttcaagacagtgagaatttatcaggggagagtggtaccttttacgaaggcactgatgataaagttcgaagagatttggccacagacctttcactgattgaagtgaaactggcagcagccggaagagtcaaagatgagttcagtgttgacaaagaagcatccgcgcatatctctggtgacaaatcaggactgagtaaggagtttgaccaagagaagaaagctaatgataggttggatactgtactagaaaagagtgaagaacatgctgattcaaaagaacatgccaagaaaactgaagaggctggtgatgaaatagaaacattcggattaggagtaacctatgagcaagctttggccaaagatttgtcaataccaacagatgcatcctctgagaaagcagagaagggtcttagttcagttccagagatagctgaggtagaaccatccaaaaaggtggaacaaggtctggattttgctgtccagggtcaactagatgttaaaattagtgactttggacagatggcttcagggctaaacatagatgatagaagggcaacagagctaaaacttgaggctacacaggacatgaccccctcatccaaagcaccgcaggaggcagatgcatttatgggtgttgagtctggccacatgaaagaaggcactaaagttagtgagacagaagtcaaacagaaggtggccaagcctgacttggtgcaccaggaggctgtagacaaggaggagtcctatgaatctagtggtgagcatgaaagtctcaccatggagtccttgaaagctgatgagggcaagaaggaaacatctccagaatcatctctaattcaagatgagattgccgtcaaattgtcagtggaaataccttgcccacctgctgtttcagaggctgatttagccacagatgagagagctgatgtccagatggaatttattcaggggccaaaagaagaaagcaaagagaccccagatatatccatcacgccttctgatgttgcagagccattgcatgaaacgatcgtatctgaaccagcagagattcagagtgaggaagaagagatagaagcccagggagaatatgataaactgctcttccgctcagacacccttcagataactgacctgggtgtctcaggtgccagggaggaatttgtggagacctgcccaagtgaacacaaaggagtgattgagtctgttgtgaccatcgaggatgatttcatcactgtagtgcaaaccacaactgatgaaggggagtcagggtcccacagcgtgcgttttgcagccctagagcagcctgaggtggaaaggagaccatctcctcatgatgaagaagagtttgaagtagaagaggcagctgaagcccaggcagaacccaaagatggttccccagaggctccagcttcccctgagagagaagaggttgcactttctgaatataagacagaaacctatgacgattacaaagatgagaccaccattgacgactccatcatggacgctgacagcctctgggtggacactcaagatgatgataggagcatcatgacagaacagttagaaactattcctaaagaggagaaagctgaaaaggaagctcggagatcatctcttgagaaacatagaaaagaaaagccttttaaaaccgggagaggcagaatttccactcctgaaagaaaagtagctaaaaaggaacctagcacagtctccagagatgaagtgagaaggaaaaaagcagtttataagaaggctgaacttgctaaaaaaacagaagttcaggcccactctccctccaggaaattcattttaaaacctgctatcaaatatactagaccaactcatctctcctgtgttaagcggaaaaccacagcagcaggtggggaatcagctctggctcccagtgtatttaaacaggcaaaggacaaagtctctgacggagtaaccaagagcccagaaaagcgctcttctctcccaagaccttcctccattctccctcctcggcgaggtgtgtcaggagacagagatgagaattccttctctctcaacagttctatctcttcttcagcacggcggaccaccaggtcagagccaattcgcagagcagggaagagtggtacctcaacacccactacccctgggtctactgccatcactcctggcaccccaccaagttattcttcacgcacaccaggcactcctggaacccctagctatcccaggacccctcacacaccaggaacccccaagtctgccatcttggtgccgagtgagaagaaggtcgccatcatacgtactcctccaaaatctcctgcgactcccaagcagcttcggcttattaaccaaccactgccagacctgaagaatgtcaaatccaaaatcggatcaacagacaacatcaaataccagcctaaaggggggcaggtacaaattgttaccaagaaaatagacctaagccatgtgacatccaaatgtggctctctgaagaacatccgccacaggccaggtggcggacgtgtgaaaattgagagtgtaaaactagatttcaaagaaaaggcccaagctaaagttggttctcttgataatgctcatcatgtacctggaggtggtaatgtcaagattgacagccaaaagttgaacttcagagagcatgctaaagcccgtgtggaccatggggctgagatcattacacagtccccaggcagatccagcgtggcatcaccccgacgactcagcaatgtctcctcgtctggaagcatcaacctgctcgaatctcctcagcttgccactttggctgaggatgtcactgctgcactcgctaagcagggcttgtgaatatttctcatttagcattgaaataataatatttaggcatgagctcttggcaggagtgggctctgagcagttgttatattcattctttataaaccataaaataaataatctcatccccaaactgtagtaattgttacaattttctatttaaaaaatgaatagtacatgcagaaattgacctgatttccatttgcaacaggaagacactggctttacatgggttcaattggacaattatttttgctctgctctgttttgcatggagtattattattttaaaaattgcatttttacctttcatgtgcctgaaggctatccactacattctgaaggccttgttaaaatccaagctgctcatttcactattctgtttctgagtgagaagataaaaactgcccattgtaacttatttcaggttaaattaaaccaaggagtctgattgcaggaagggaagagcatgtaagaaataagtttttttaaagtgttattttgtataaatgggaagaaagattcaattaagttattaacatttgggacctggataattatatcagagtatgtcagtccaataaattatttaactaattaaaaaatagttgcaaagcatttgagctgtggttgaggaagtggtgtaaaagtgcatccattaggaatgatgcactttcattaggatggactcgtgtctgattagaatgtcagttgatcagctagatttgtgtccacactaccagtttcacaccccctttccatctgtttgatacagtattatagatataaatatatatatatttctctgtggccatttgtgatacttcctcatatacttgaatattatacttctttattcacagtatctgtgtctcctgcaccctttggtgttgcaattttagatatgtgaaagtagatgttagcagggttctctccctatttaaaaaaaatacattaaaaaagacaaaaaattttagcatgaagttgctttctgtaacaactcaaagccgtaaccctgttttagtgccagatacaagtctctcccgtgatgctagacaaaaaattatttttctttgctttcaccaacatggagtttgtgggggtgggtccagttatacatgaaagggtttacagattgttggtttaagattatggatttatctcatttttaatcacaggatagtttggggtttattcctattattattcatgaaaccgacttaagattttttctttatttttctttttttttccatttgctaaagttgaaagttgaaactaactataatagtttgaaacatgttttctcatttttccaaatagtatctgtttattaaattctctaatagaagatgtttgtctttcttacccaaagtaaagatcccctgatcagaaagaaaaaatacaatactttgggaagctatagctataaaacacttgagacacagatatctaaatcagtttttttccaagactccaacattgcactctgtaaagtaacacactgtgatctagtattatttatcagtagataatactgttctgactgtatatacagtctagaactcacaaatcaattagttcctctcacaaatcattcatcttagacttacaaataaggaatgaaatagtcaatggcctgattaaggcaaagagctaccaggctagatggacactttttaaaaattttatctgttctttttcttgctcagggctggtaggttggatctgaaccattaaaatcaaatggtccactaggcgtatgatctctttgagccaaatcagttcctgaatataaaggaggaaatgatgaggatgtactgaggcaacggggaagtatagaaacatccaagacaaaagccaagggatgcaaaggcagagacacaggtgctttttggtgacccagtggatatggcaaccagtgtaactgccatacaagaaaccctaggagcaaacccacaccactcattctcagctaagagattttacacaggcaaacgtgtcttaaaccatctataaatcagttattttatatgacagtcaaaaccttagaaaccttaggatcattatatctattttctgcctattaattgctgtgaggtttgatttgaccaatctgggcaatttattcatcagcttcccttgaagtgcaccagaaaatagaagaaaggtgtgtggagacttagggtattttattacatgttttcatagtcttaaatagtgattaaatttctctagaaagaagttaacagctcattagaaaagttttaacctgtgaaataagtatttttctcaacattctttaaagtttttatataagttaacactaggtaaacattctgcatactagaagtcagtttattacaaatacatgtcaaaaataaagattatacaaggcaccaaactactagatttggcattaaaacaaatgtttatttctaatcacaacaaaattataatgaataaatgttcttgctttgtatggaaatacaattctttattaaagttaacagaaaggaactgatcgtttgtaccagtaaaagagagaaacacacaggttaaatatcttcttgtggggttaaggggtagaacctatcttgccttcactctcaagataacgactcaaattaagctttttgagcaccactcttgtggggacacacatacgctgatctaggaatgaaatcttcgtggtctcaattctagatctactatgccagtttctctctggctttagcctttgagaacctgtataagaatacgtaagtaatccagagctgtgaagagtttaaaggccaacttctccagtgaactcaacctctgggtcacttgcaaccagaaattggatacctcataatgatgcaggaaagacccgagttcatgatgagtttcaaaggccacgttcatttaggaaccaactctctctggatttacctgctgagttccagcagcgtgatgggctgacatcccacctacaagtatgacacctgtgtaacaccagctaggtacggctggagaaggctgaagagagaatgccattaaatggaagaatgtactgattgtagtgaccttctccacacacacacacacacacacacacacacacctacagtaatacagcaagcgtggaataatcagccaatatataacattccatcagtattttattaaggaaataacctgaatgtggttgattttgacatagctgcaattacagttttcttctatttttcaagccacaataaggaaaataaactactcatggtctaaatactagagataaagtagattcatggcttggtaaggaaattttaagcattccttcaaagattgacgtgctaaaataagcattgatgttttgagtttttttacacctaggatttttagcttgggtgtgtaggtgaaggccaagactctctgcaggaaaaagcttattttcaaactcagaaaataaaatgtcaatcataaaaatctacttcaactttagcaaaaagaaaaaaaaatcaacaaaaagtatactctgtatgctgggattccgaggttccaacacactgttacaaatctgtggggggtttctttcttctgataattctagagcctgttaccatagaaaggcatttcttcaatggctggttgtagttagttcatgtttttcaatcaaatttgcaaatgtatttgttgctgtatagtgattgttttgcaaaataaaattgcttgtcacc

SEQ ID NO: 326256 - DNA, 5171 bp, Homo sapiens
agagagaggagtgtgcagagcagagttatttagcattcaagggtggatctgcagaaaatcacacagcctcactgcgaagcatctgggcctggtggcaccgatggatgaggacagaaaatggggatcttttcagtgttttccttctaaaggttaggcatccggggctagaaagagtgagaaagacaaggattgatagaaaaggcagttccacgagaggaggtgtctgcaaggatagttcaagtagtcactgctgaggctgtagcagtcctgaaaggtgaacaagagaaagaagctcaacataaagaccagactgcagctctgcctttagcagctgaagaaacagctaatctgcctccttctccacccccatcacctgcctcagaacagactgtcacagtggaggaagcagcaggtggggaatcagctctggctcccagtgtatttaaacaggcaaaggacaaagtctctgacggagtaaccaagagcccagaaaagcgctcttctctcccaagaccttcctccattctccctcctcggcgaggtgtgtcaggagacagagatgagaattccttctctctcaacagttctatctcttcttcagcacggcggaccaccaggtcagagccaattcgcagagcagggaagagtggtacctcaacacccactacccctgggtctactgccatcactcctggcaccccaccaagttattcttcacgcacaccaggcactcctggaacccctagctatcccaggacccctcacacaccaggaacccccaagtctgccatcttggtgccgagtgagaagaaggtcgccatcatacgtactcctccaaaatctcctgcgactcccaagcagcttcggcttattaaccaaccactgccagacctgaagaatgtcaaatccaaaatcggatcaacagacaacatcaaataccagcctaaaggggggcaggttaggattttaaacaagaagatcgattttagcaaagttcagtccagatgtggttccaaggataacatcaaacattcggctgggggcggaaatgtacaaattgttaccaagaaaatagacctaagccatgtgacatccaaatgtggctctctgaagaacatccgccacaggccaggtggcggacgtgtgaaaattgagagtgtaaaactagatttcaaagaaaaggcccaagctaaagttggttctcttgataatgctcatcatgtacctggaggtggtaatgtcaagattgacagccaaaagttgaacttcagagagcatgctaaagcccgtgtggaccatggggctgagatcattacacagtccccaggcagatccagcgtggcatcaccccgacgactcagcaatgtctcctcgtctggaagcatcaacctgctcgaatctcctcagcttgccactttggctgaggatgtcactgctgcactcgctaagcagggcttgtgaatatttctcatttagcattgaaataataatatttaggcatgagctcttggcaggagtgggctctgagcagttgttatattcattctttataaaccataaaataaataatctcatccccaaactgtagtaattgttacaattttctatttaaaaaatgaatagtacatgcagaaattgacctgatttccatttgcaacaggaagacactggctttacatgggttcaattggacaattatttttgctctgctctgttttgcatggagtattattattttaaaaattgcatttttacctttcatgtgcctgaaggctatccactacattctgaaggccttgttaaaatccaagctgctcatttcactattctgtttctgagtgagaagataaaaactgcccattgtaacttatttcaggttaaattaaaccaaggagtctgattgcaggaagggaagagcatgtaagaaataagtttttttaaagtgttattttgtataaatgggaagaaagattcaattaagttattaacatttgggacctggataattatatcagagtatgtcagtccaataaattatttaactaattaaaaaatagttgcaaagcatttgagctgtggttgaggaagtggtgtaaaagtgcatccattaggaatgatgcactttcattaggatggactcgtgtctgattagaatgtcagttgatcagctagatttgtgtccacactaccagtttcacaccccctttccatctgtttgatacagtattatagatataaatatatatatatttctctgtggccatttgtgatacttcctcatatacttgaatattatacttctttattcacagtatctgtgtctcctgcaccctttggtgttgcaattttagatatgtgaaagtagatgttagcagggttctctccctatttaaaaaaaatacattaaaaaagacaaaaaattttagcatgaagttgctttctgtaacaactcaaagccgtaaccctgttttagtgccagatacaagtctctcccgtgatgctagacaaaaaattatttttctttgctttcaccaacatggagtttgtgggggtgggtccagttatacatgaaagggtttacagattgttggtttaagattatggatttatctcatttttaatcacaggatagtttggggtttattcctattattattcatgaaaccgacttaagattttttctttatttttctttttttttccatttgctaaagttgaaagttgaaactaactataatagtttgaaacatgttttctcatttttccaaatagtatctgtttattaaattctctaatagaagatgtttgtctttcttacccaaagtaaagatcccctgatcagaaagaaaaaatacaatactttgggaagctatagctataaaacacttgagacacagatatctaaatcagtttttttccaagactccaacattgcactctgtaaagtaacacactgtgatctagtattatttatcagtagataatactgttctgactgtatatacagtctagaactcacaaatcaattagttcctctcacaaatcattcatcttagacttacaaataaggaatgaaatagtcaatggcctgattaaggcaaagagctaccaggctagatggacactttttaaaaattttatctgttctttttcttgctcagggctggtaggttggatctgaaccattaaaatcaaatggtccactaggcgtatgatctctttgagccaaatcagttcctgaatataaaggaggaaatgatgaggatgtactgaggcaacggggaagtatagaaacatccaagacaaaagccaagggatgcaaaggcagagacacaggtgctttttggtgacccagtggatatggcaaccagtgtaactgccatacaagaaaccctaggagcaaacccacaccactcattctcagctaagagattttacacaggcaaacgtgtcttaaaccatctataaatcagttattttatatgacagtcaaaaccttagaaaccttaggatcattatatctattttctgcctattaattgctgtgaggtttgatttgaccaatctgggcaatttattcatcagcttcccttgaagtgcaccagaaaatagaagaaaggtgtgtggagacttagggtattttattacatgttttcatagtcttaaatagtgattaaatttctctagaaagaagttaacagctcattagaaaagttttaacctgtgaaataagtatttttctcaacattctttaaagtttttatataagttaacactaggtaaacattctgcatactagaagtcagtttattacaaatacatgtcaaaaataaagattatacaaggcaccaaactactagatttggcattaaaacaaatgtttatttctaatcacaacaaaattataatgaataaatgttcttgctttgtatggaaatacaattctttattaaagttaacagaaaggaactgatcgtttgtaccagtaaaagagagaaacacacaggttaaatatcttcttgtggggttaaggggtagaacctatcttgccttcactctcaagataacgactcaaattaagctttttgagcaccactcttgtggggacacacatacgctgatctaggaatgaaatcttcgtggtctcaattctagatctactatgccagtttctctctggctttagcctttgagaacctgtataagaatacgtaagtaatccagagctgtgaagagtttaaaggccaacttctccagtgaactcaacctctgggtcacttgcaaccagaaattggatacctcataatgatgcaggaaagacccgagttcatgatgagtttcaaaggccacgttcatttaggaaccaactctctctggatttacctgctgagttccagcagcgtgatgggctgacatcccacctacaagtatgacacctgtgtaacaccagctaggtacggctggagaaggctgaagagagaatgccattaaatggaagaatgtactgattgtagtgaccttctccacacacacacacacacacacacacacacacctacagtaatacagcaagcgtggaataatcagccaatatataacattccatcagtattttattaaggaaataacctgaatgtggttgattttgacatagctgcaattacagttttcttctatttttcaagccacaataaggaaaataaactactcatggtctaaatactagagataaagtagattcatggcttggtaaggaaattttaagcattccttcaaagattgacgtgctaaaataagcattgatgttttgagtttttttacacctaggatttttagcttgggtgtgtaggtgaaggccaagactctctgcaggaaaaagcttattttcaaactcagaaaataaaatgtcaatcataaaaatctacttcaactttagcaaaaagaaaaaaaaatcaacaaaaagtatactctgtatgctgggattccgaggttccaacacactgttacaaatctgtggggggtttctttcttctgataattctagagcctgttaccatagaaaggcatttcttcaatggctggttgtagttagttcatgtttttcaatcaaatttgcaaatgtatttgttgctgtatagtgattgttttgcaaaataaaattgcttgtcacc

SEQ ID NO: 326257 - DNA, 5925 bp, Homo sapiens
agtctggggcgggcgctcgggctgcgcgggctctgggcagcagcagcagcagcagcagcatcctctcttcctttacttcccttccgcttctttctcttccttctccttctttttcccccccctccccttcttcccctaacccttctacccctctcctttttctccggagggcgctaagtccgtgagcggtggcagtcgcgaccgcgggtgcatccagtttctgcgcccagattttattgatctaatccaaagtatcttataacttctggctggaattaagattcttcagcttgtctctaaccgaggaagcattgattgggagctactcattcagaaaattaaaagaaagaagccagaaaatattatcaaccctttgagaacacgacacaacgaactttatattttaccacttccttgaatagttgcaggagaaataacaaggcattgaagaatggcagatgaacggaaagacgaagcaaaggcacctcactggacctcagcaccgctaacagaggcatctgcacactcacatccacctgagattaaggatcaaggcggagcaggggaaggacttgtccgaagcgccaatggattcccatacagggaggatgaagagggtgcctttggagagcatgggtcacagggcacctattcaaataccaaagagaatgggatcaacggagagctgacctcagctgacagagaaacagcagaggaggtgtctgcaaggatagttcaagtagtcactgctgaggctgtagcagtcctgaaaggtgaacaagagaaagaagctcaacataaagaccagactgcagctctgcctttagcagctgaagaaacagctaatctgcctccttctccacccccatcacctgcctcagaacagactgtcacagtggaggaagatttacttacagcctcgaagatggagttccacgatcaacaggaattgactccctctacagctgagccttcagaccagaaggaaaaggagtcagagaagcaaagtaagcctggtgaagaccttaaacatgctgccttagtttctcagccagagacaactaaaacttaccctgataaaaaggacatgcaaggcacagaagaagaaaaagcacccctagctttgtttgggcacactcttgttgccagcctggaagacatgaaacagaagacagaaccaagccttgtagtacctggcattgacctccctaaagagcctccaactccaaaagaacaaaaggactggttcatcgaaatgccaacggaagcaaaaaaggatgagtggggtttagttgcccccatatctcctggccctctgactcccatgagggaaaaagatgtatttgatgatatcccaaaatgggaagggaaacagtttgattctcccatgccaagtccctttcaagggggaagcttcactcttcctttagatgtcatgaagaatgaaatagttacagaaacatcgccctttgcccctgcctttttacagccagatgacaaaaaatctctgcaacaaaccagtggcccagctactgccaaagatagttttaaaattgaagagccccatgaggctaaacctgacaaaatggcagaagcaccaccctcagaggcaatgaccttacccaaagatgctcacattccagttgtagaagaacatgttatggggaaagttttagaggaagaaaaggaggccataaatcaagagactgtgcagcaaagggatactttcacccccagtggacaggaacctatacttactgaaaaggaaactgagctgaagcttgaagaaaaaaccaccatttctgacaaagaagctgtgccaaaagagagtaaacccccaaaacctgcagatgaagaaataggcataattcagacctccacagagcacactttctcagaacagaaagaccaagagcctaccacagatatgttgaaacaggactcgttccctgtaagtttggagcaagcagttacagattcagccatgacctctaaaacactggagaaagccatgaccgaaccatctgcattaattgaaaagagctcaattcaggaactttttgaaatgagagttgatgacaaagataagattgaaggagttggagctgcaacatcagctgagcttgatatgccattttatgaagataaatcaggaatgtccaagtactttgaaacatctgccttgaaagaagaagcaacaaaaagcattgagccaggcagtgattactatgaactgagtgacactagagaaagtgtccatgagtctattgataccatgtctcccatgcataaaaatggtgacaaggagtttcaaacaggaaaagaatcccagcccagtcctccagcacaagaagcagggtacagcactctcgcacagagttatccatcagatttacctgaagaacccagttctcctcaagaaagaatgttcactattgatccaaaagtgtatggagagaaaagggacctccacagtaagaataaggatgatttgacccttagcaggagtttaggacttggtggtaggtctgcaatagaacaaagaagcatgtcaatcaatttgccgatgtcttgcctagattccatagcccttggatttaactttggtcggggacatgatctttctcctctggcttccgatattctaaccaacactagtggaagtatggatgaaggggatgattaccttccagccaccacacctgcactggagaaagccccttgcttccctgtagaaagcaaagaggaagaacagatagagaaagtaaaagctactggagaagaaagtactcaagcggagatatcatgtgagtctcctttcctagccaaagatttttacaaaaatggtactgtcatggcacctgaccttcctgaaatgctagatctggcaggcacaaggtcaagattggcttctgtgagtgcagatgctgaggttgccaggaggaaatcagtcccatcagagactgtggttgaggatagtcgtactggcttgcccccggtaactgatgaaaaccatgtcattgtaaaaacggacagtcagctcgaagacctgggctactgtgtgttcaataagtacacagtcccattgccatcacctgttcaagacagtgagaatttatcaggggagagtggtaccttttacgaaggcactgatgataaagttcgaagagatttggccacagacctttcactgattgaagtgaaactggcagcagccggaagagtcaaagatgagttcagtgttgacaaagaagcatccgcgcatatctctggtgacaaatcaggactgagtaaggagtttgaccaagagaagaaagctaatgataggttggatactgtactagaaaagagtgaagaacatgctgattcaaaagaacatgccaagaaaactgaagaggctggtgatgaaatagaaacattcggattaggagtaacctatgagcaagctttggccaaagatttgtcaataccaacagatgcatcctctgagaaagcagagaagggtcttagttcagttccagagatagctgaggtagaaccatccaaaaaggtggaacaaggtctggattttgctgtccagggtcaactagatgttaaaattagtgactttggacagatggcttcagggctaaacatagatgatagaagggcaacagagctaaaacttgaggctacacaggacatgaccccctcatccaaagcaccgcaggaggcagatgcatttatgggtgttgagtctggccacatgaaagaaggcactaaagttagtgagacagaagtcaaacagaaggtggccaagcctgacttggtgcaccaggaggctgtagacaaggaggagtcctatgaatctagtggtgagcatgaaagtctcaccatggagtccttgaaagctgatgagggcaagaaggaaacatctccagaatcatctctaattcaagatgagattgccgtcaaattgtcagtggaaataccttgcccacctgctgtttcagaggctgatttagccacagatgagagagctgatgtccagatggaatttattcaggggccaaaagaagaaagcaaagagaccccagatatatccatcacgccttctgatgttgcagagccattgcatgaaacgatcgtatctgaaccagcagagattcagagtgaggaagaagagatagaagcccagggagaatatgataaactgctcttccgctcagacacccttcagataactgacctgggtgtctcaggtgccagggaggaatttgtggagacctgcccaagtgaacacaaaggagtgattgagtctgttgtgaccatcgaggatgatttcatcactgtagtgcaaaccacaactgatgaaggggagtcagggtcccacagcgtgcgttttgcagccctagagcagcctgaggtggaaaggagaccatctcctcatgatgaagaagagtttgaagtagaagaggcagctgaagcccaggcagaacccaaagatggttccccagaggctccagcttcccctgagagagaagaggttgcactttctgaatataagacagaaacctatgacgattacaaagatgagaccaccattgacgactccatcatggacgctgacagcctctgggtggacactcaagatgatgataggagcatcatgacagaacagttagaaactattcctaaagaggagaaagctgaaaaggaagctcggagatcatctcttgagaaacatagaaaagaaaagccttttaaaaccgggagaggcagaatttccactcctgaaagaaaagtagctaaaaaggaacctagcacagtctccagagatgaagtgagaaggaaaaaagcagtttataagaaggctgaacttgctaaaaaaacagaagttcaggcccactctccctccaggaaattcattttaaaacctgctatcaaatatactagaccaactcatctctcctgtgttaagcggaaaaccacagcagcaggtggggaatcagctctggctcccagtgtatttaaacaggcaaaggacaaagtctctgacggagtaaccaagagcccagaaaagcgctcttctctcccaagaccttcctccattctccctcctcggcgaggtgtgtcaggagacagagatgagaattccttctctctcaacagttctatctcttcttcagcacggcggaccaccaggtcagagccaattcgcagagcagggaagagtggtacctcaacacccactacccctgggtctactgccatcactcctggcaccccaccaagttattcttcacacacacacacacacacacacacacctacagtaatacagcaagcgtggaataatcagccaatatataacattccatcagtattttattaaggaaataacctgaatgtggttgattttgacatagctgcaattacagttttcttctatttttcaagccacaataaggaaaataaactactcatggtctaaatactagagataaagtagattcatggcttggtaaggaaattttaagcattccttcaaagattgacgtgctaaaataagcattgatgttttgagtttttttacacctaggatttttagcttgggtgtgtaggtgaaggccaagactctctgcaggaaaaagcttattttcaaactcagaaaataaaatgtcaatcataaaaatctacttcaactttagcaaaaagaaaaaaaaatcaacaaaaagtatactctgtatgctgggattccgaggttccaacacactgttacaaatctgtggggggtttctttcttctgataattctagagcctgttaccatagaaaggcatttcttcaatggctggttgtagttagttcatgtttttcaatcaaatttgcaaatgtatttgttgctgtatagtgattgttttgcaaaataaaattgcttgtcacc

SEQ ID NO: 326258 - DNA, 5677 bp, Homo sapiens
agtctggggcgggcgctcgggctgcgcgggctctgggcagcagcagcagcagcagcagcatcctctcttcctttacttcccttccgcttctttctcttccttctccttctttttcccccccctccccttcttcccctaacccttctacccctctcctttttctccggagggcgctaagtccgtgagcggtggcagtcgcgaccgcgggtgcatccagtttctgcgcccagattttattgatctaatccaaagtatcttataacttctggctggaattaagattcttcagcttgtctctaaccgaggaagcattgattgggagctactcattcagaaaattaaaagaaagaagccagaaaatattatcaaccctttgagaacacgacacaacgaactttatattttaccacttccttgaatagttgcaggagaaataacaaggcattgaagaatggcagatgaacggaaagacgaagcaaaggcacctcactggacctcagcaccgctaacagaggcatctgcacactcacatccacctgagattaaggatcaaggcggagcaggggaaggacttgtccgaagcgccaatggattcccatacagggaggatgaagagggtgcctttggagagcatgggtcacagggcacctattcaaataccaaagagaatgggatcaacggagagctgacctcagctgacagagaaacagcagaggaggtgtctgcaaggatagttcaagtagtcactgctgaggctgtagcagtcctgaaaggtgaacaagagaaagaagctcaacataaagaccagactgcagctctgcctttagcagctgaagaaacagctaatctgcctccttctccacccccatcacctgcctcagaacagactgtcacagtggaggaagatttacttacagcctcgaagatggagttccacgatcaacaggaattgactccctctacagctgagccttcagaccagaaggaaaaggagtcagagaagcaaagtaagcctggtgaagaccttaaacatgctgccttagtttctcagccagagacaactaaaacttaccctgataaaaaggacatgcaaggcacagaagaagaaaaagcacccctagctttgtttgggcacactcttgttgccagcctggaagacatgaaacagaagacagaaccaagccttgtagtacctggcattgacctccctaaagagcctccaactccaaaagaacaaaaggactggttcatcgaaatgccaacggaagcaaaaaaggatgagtggggtttagttgcccccatatctcctggccctctgactcccatgagggaaaaagatgtatttgatgatatcccaaaatgggaagggaaacagtttgattctcccatgccaagtccctttcaagggggaagcttcactcttcctttagatgtcatgaagaatgaaatagttacagaaacatcgccctttgcccctgcctttttacagccagatgacaaaaaatctctgcaacaaaccagtggcccagctactgccaaagatagttttaaaattgaagagccccatgaggctaaacctgacaaaatggcagaagcaccaccctcagaggcaatgaccttacccaaagatgctcacattccagttgtagaagaacatgttatggggaaagttttagaggaagaaaaggaggccataaatcaagagactgtgcagcaaagggatactttcacccccagtggacaggaacctatacttactgaaaaggaaactgagctgaagcttgaagaaaaaaccaccatttctgacaaagaagctgtgccaaaagagagtaaacccccaaaacctgcagatgaagaaataggcataattcagacctccacagagcacactttctcagaacagaaagaccaagagcctaccacagatatgttgaaacaggactcgttccctgtaagtttggagcaagcagttacagattcagccatgacctctaaaacactggagaaagccatgaccgaaccatctgcattaattgaaaagagctcaattcaggaactttttgaaatgagagttgatgacaaagataagattgaaggagttggagctgcaacatcagctgagcttgatatgccattttatgaagataaatcaggaatgtccaagtactttgaaacatctgccttgaaagaagaagcaacaaaaagcattgagccaggcagtgattactatgaactgagtgacactagagaaagtgtccatgagtctattgataccatgtctcccatgcataaaaatggtgacaaggagtttcaaacaggaaaagaatcccagcccagtcctccagcacaagaagcagggtacagcactctcgcacagagttatccatcagatttacctgaagaacccagttctcctcaagaaagaatgttcactattgatccaaaagtgtatggagagaaaagggacctccacagtaagaataaggatgatttgacccttagcaggagtttaggacttggtggtaggtctgcaatagaacaaagaagcatgtcaatcaatttgccgatgtcttgcctagattccatagcccttggatttaactttggtcggggacatgatctttctcctctggcttccgatattctaaccaacactagtggaagtatggatgaaggggatgattaccttccagccaccacacctgcactggagaaagccccttgcttccctgtagaaagcaaagaggaagaacagatagagaaagtaaaagctactggagaagaaagtactcaagcggagatatcatgtgagtctcctttcctagccaaagatttttacaaaaatggtactgtcatggcacctgaccttcctgaaatgctagatctggcaggcacaaggtcaagattggcttctgtgagtgcagatgctgaggttgccaggaggaaatcagtcccatcagagactgtggttgaggatagtcgtactggcttgcccccggtaactgatgaaaaccatgtcattgtaaaaacggacagtcagctcgaagacctgggctactgtgtgttcaataagtacacagtcccattgccatcacctgttcaagacagtgagaatttatcaggggagagtggtaccttttacgaaggcactgatgataaagttcgaagagatttggccacagacctttcactgattgaagtgaaactggcagcagccggaagagtcaaagatgagttcagtgttgacaaagaagcatccgcgcatatctctggtgacaaatcaggactgagtaaggagtttgaccaagagaagaaagctaatgataggttggatactgtactagaaaagagtgaagaacatgctgattcaaaagaacatgccaagaaaactgaagaggctggtgatgaaatagaaacattcggattaggagtaacctatgagcaagctttggccaaagatttgtcaataccaacagatgcatcctctgagaaagcagagaagggtcttagttcagttccagagatagctgaggtagaaccatccaaaaaggtggaacaaggtctggattttgctgtccagggtcaactagatgttaaaattagtgactttggacagatggcttcagggctaaacatagatgatagaagggcaacagagctaaaacttgaggctacacaggacatgaccccctcatccaaagcaccgcaggaggcagatgcatttatgggtgttgagtctggccacatgaaagaaggcactaaagttagtgagacagaagtcaaacagaaggtggccaagcctgacttggtgcaccaggaggctgtagacaaggaggagtcctatgaatctagtggtgagcatgaaagtctcaccatggagtccttgaaagctgatgagggcaagaaggaaacatctccagaatcatctctaattcaagatgagattgccgtcaaattgtcagtggaaataccttgcccacctgctgtttcagaggctgatttagccacagatgagagagctgatgtccagatggaatttattcaggggccaaaagaagaaagcaaagagaccccagatatatccatcacgccttctgatgttgcagagccattgcatgaaacgatcgtatctgaaccagcagagattcagagtgaggaagaagagatagaagcccagggagaatatgataaactgctcttccgctcagacacccttcagataactgacctgggtgtctcaggtgccagggaggaatttgtggagacctgcccaagtgaacacaaaggagtgattgagtctgttgtgaccatcgaggatgatttcatcactgtagtgcaaaccacaactgatgaaggggagtcagggtcccacagcgtgcgttttgcagccctagagcagcctgaggtggaaaggagaccatctcctcatgatgaagaagagtttgaagtagaagaggcagctgaagcccaggcagaacccaaagatggttccccagaggctccagcttcccctgagagagaagaggttgcactttctgaatataagacagaaacctatgacgattacaaagatgagaccaccattgacgactccatcatggacgctgacagcctctgggtggacactcaagatgatgataggagcatcatgacagaacagttagaaactattcctaaagaggagaaagctgaaaaggaagctcggagatcatctcttgagaaacatagaaaagaaaagccttttaaaaccgggagaggcagaatttccactcctgaaagaaaagtagctaaaaaggaacctagcacagtctccagagatgaagtgagaaggaaaaaagcagtttataagaaggctgaacttgctaaaaaaacagaagttcaggcccactctccctccaggaaattcattttaaaacctgctatcaaatatactagaccaactcatctctcctgtgttaagcggaaaaccacagcagcaggtggggaatcagctctggctcccagtgtatttaaacaggcaaaggacaaagtctctgacggagtaaccaagagcccagaaaagcgctcttctctcccaagaccttcctccattctccctcctcggcgaggtgtgtcaggagacagagatgagaattccttctctctcaacagttctatctcttcttcagcacggcggaccaccaggtcagagccaattcgcagagcagggaagagtggtacctcaacacccactacccctgggtctactgccatcactcctggcaccccaccaagttattcttcacgcacaccaggcactcctggaacccctagctatcccaggacccctcacacaccaggaacccccaagtctgccatcttggtgccgagtgagaagaaggtcgccatcatacgtactcctccaaaatctcctgcgactcccaagcagcttcggcttattaaccaaccactgccagacctgaagaatgtcaaatccaaaatcggatcaacagacaacatcaaataccagcctaaaggggggcaggatttcctatgacattttctaccatttcctcatgtttactccaaaataaggatgtttcaccgagtttcaattctggctactattgcctaaatgttgcaaaggggaggtattcgtgttgataataaaagacacatggttctgatgaataaaatt

SEQ ID NO: 326259 - DNA, 1447 bp, Homo sapiens
gtgtatggatcacctgaggtcaggagttcgagaccagcctggccaacatggttaaaccccgtctctactaaaaatacaaaaattagctgggtatggtgatgggcacctgtaatcccagctactcgggagcctgagggtggagaatcgcttgaacccagaagacggaggttgcagtgagctcagatcatgccactgcactccagcctgggcgacagagcgagactttgtttcaaacaaacaaacaaaactatgttcacaatttatttgttttgtaatccttattcttttctgctttcactaaagactcagcccaggcagtagaggaaccatccatatgctgaagcttctactaggatcccagttttgccgcagataattaatggacaactgtagtgcagtgatcctttacaggtttatttctttgtaaaaaaaaataataataatttgaatcatgtaatatttaaggttatactatgcctatttgaaaatgatattagttatcaactttgcagtttgaaaaacatgtattgtgtgtaaaggttaaataacaaaactatgcagatgctcttaaaagcattgataacctttgtgacgaacataaagagatccttaaattatgagttgttggcttatcttcataaataatttgtctgtaaaatggatgaaatgaaaagaggttcaattaaaacctacttttttctagtgctaaagaaaagatttaagcaccttgtcaagctgggtaaataggaaaaatacataatcatgctcagatatgtatctaggataattataattaataataatcatagtaacaatggctaatgataatttagctttattatatgtgctaagcactctggttttacatgcattatcttcttttgttcttgctacaaccctgtgagatagtagtattatctcattttactgatgaagactgaagcctaggtatattaaatagcttgcccaaggccacacagcaaaagtcaccaactcaaacctacttcttatttactccaaagcctgttgttcttaactgcaacatattatttcgtctcattaatgttgattctataggttgttacttctaaaaattagtattgagtttaatggtgaacacatttttctattttctcttgaatctgcttctataatgtcatggtgatttatgtggcttttttttttttataagttatacatgtatgcatgtatacttatgagacctcccttggaatgagggaggtctcaagagatataatttagattctcattgatgttctgtattcattatcctaacaccatctgtagtgttaaatcaactaaattatttcagcaataggagacaaaacaaccagctttcataatttttaattgtcaaaaccaaaaggaatcagaataaggatcactgagaatttaaaaaaataaaaaaggaagtaaaaattttaca

SEQ ID NO: 326260 - DNA, 958 bp, Homo sapiens
tatatttatttatttatttatttttttgagacaagagtcttgctctgtcgcccaggctagattgcagtggtgtgatctcggctcactgcaagctccgcctcctaggttcacacgattctcctgcctcagactcccgagtagctgggactacaggcatatgccacaacacctggctaattttttgtatttttagtagagatggggtttcactgtgttagccaggatggtctcaatctcctgacctcgtgatccacctgcctcggcctcccaaagtgctgggattacaggtgtgagccaccgcgcctggcctttcctatgtttttaatacttttctataattttttaatggctgcatactggtgcactgtctagctgctctatagttatttgattgtttccagggatagttattgaaagcatgtggccagtaaggggtttatcgttggaatctgttggttacatataattatatatacttgcatagggccttataatcttttttcctcctgaatatgtgcaccattaaagttttagtatgtgctttttaaaaagttgtattatcaaaatgacattttcttaatatctttcagattcaattagcagagcctcacagacaatggccaaatgtgtcaaagctgtcacagagggtgcccaggcagtagaggaaccatccatatgctgaagcttctactaggatcccagttttgccgcagataattaatggacaactgtagtgcagtgatcctttacaggtttatttctttgtaaaaaaaaataataataatttgaatcatgtaatatttaaggttatactatgcctatttgaaaatgatattagttatcaactttgcagtttgaaaaacatgtattgtgtgtaaaggttaaataacaaaactatgcagatgctcttaaaagcattgataacctttgtgacgaacataaagagatccttaaatta

SEQ ID NO: 326261 - DNA, 710 bp, Homo sapiens
cggaaattgccgacaaacttgtcgaatgcaaggattctagtccctccgggctttccgttctccaggcccggctgacagagttagccgaggccgccatattgaataagcgacccggcctcctagggggtcgtcgtggtccagacagtttagcagaacagcctccgcggctccggggagaaggtgaggtcttgtatggatgggaagggtgaggtgcgtcggccagaggcttatttattgacgggactgtttcctttggcccacgcgacgtagtcttctgttgtccttgactgggcgccgcctcccgccccgccgcctcggaagcccctgagagccggcagatggggggcttttagccacggtctctggtctgatgaagcagaaaagaagatgaggatcagggggtcctcgggaacgctgtcacgaatgtaggcttgcaggtgaccttccctctgcagggaaaattcaggacatttccctctcagaggaggaggccgttttattccccgggagaggaccagtgtccgatgacttaggccttaagactaagcctttccccccagatttttacacgcctgatacagtgcatgattgtttggtcgctgttgtgttagcaatggctcacgcttctgtttgttgtccttgtttgtttggtccattgaccacgttggacagcatttttttattcctttaactaacgggaaattgagaaa

SEQ ID NO: 326262 - DNA, 3084 bp, Homo sapiens
cggaaattgccgacaaacttgtcgaatgcaaggattctagtccctccgggctttccgttctccaggcccggctgacagagttagccgaggccgccatattgaataagcgacccggcctcctagggggtcgtcgtggtccagacagtttagcagaacagcctccgcggctccggggagaagcaatatgttaaggatacctgtaagaaaggccttagtaggcctttctaagtctcctaaaggatgtgttcgaacaactgccacagcagcaagcaacttgattgaagtatttgttgatggtcagtctgtcatggtggaaccgggaacgaccgtcctccaagcttgtgagaaggttggcatgcagatccctcgattctgttatcatgaaaggttgtctgttgctggaaactgcaggatgtgccttgttgaaattgagaaagcccctaaggttgtagctgcttgtgccatgccagtaatgaagggttggaatatcctaacaaactcagaaaaatccaaaaaagccagggaaggtgtgatggagttcttattagcaaatcacccattggactgtcctatttgtgaccagggaggtgaatgtgatctgcaggaccagtccatgatgtttggaaatgataggagccgatttttagaggggaagcgtgctgtggaagacaagaacattgggccattggtaaagaccatcatgacaagatgtatacagtgtactcgctgcatcaggtttgcaagtgagattgcaggagtagatgatttgggaacaacaggcagaggaaatgatatgcaagttggcacatacattgaaaagatgttcatgtctgaactgtctgggaatatcattgatatctgccctgtaggtgccctaacctctaagccctatgcctttactgcccggccttgggaaacaagaaagacagaatccattgatgtaatggatgcggttggaagtaatattgtggttagcacaagaactggagaagtgatgaggattttgccacgtatgcatgaggacatcaatgaagagtggatctctgataaaaccagatttgcctatgatgggctaaaacgtcaaagacttaccgagccaatggtcagaaatgaaaaagggcttttaacctatacttcttgggaggatgcgctctctcgcgtagctggaatgttgcagagttttcaaggcaaagatgtggcagcaattgcaggtggcttggtggatgctgaagccctggtagctctcaaagatttgcttaatagagtggactctgacaccttatgcactgaagaggtcttccccactgcaggagctggcacagatttgcgttccaattatcttcttaatactacaattgctggtgtggaagaggcagatgttgttcttctggttggtacaaacccacgttttgaggcaccactgtttaatgctagaattcgaaagagctggctgcataatgacttaaaagtggcccttataggcagtccagtggacctcacttacacatatgaccacctgggagactcccccaaaattcttcaagacattgcttcgggaagccatccatttagccaggtcctaaaggaagctaaaaaaccaatggtggttttaggcagttctgcactccaaagaaatgatggagcagcaattcttgcagctgtttctagcattgcacaaaagattcggatgactagtggtgttactggtgattggaaagttatgaatatccttcataggattgcaagtcaagtagctgctttggaccttggctataagcctggggtggaagcaattcggaagaaccctcccaaggtgctgtttctcctgggagcagatggaggttgtatcacacgacaggatttgccaaaggattgtttcattatttatcaaggacatcatggtgatgttggggctcccatagctgatgttattctcccaggagctgcttacacagagaagtctgctacatatgtcaacactgagggtagagctcagcagactaaggtagcagtgacacctcctggcttggcaagagaagactggaaaattataagagcactctctgagattgctggaatgactcttccatatgatactctggatcaagtaaggaacagattggaagaagtctctcctaatcttgttcgatatgatgatattgaaggggctaattacttccagcaagcaaatgagctctcaaagctagtgaaccagcagcttcttgctgacccacttgttccacctcagctaactataaaagacttctacatgacagattcaattagcagagcctcacagacaatggccaaatgtgtcaaagctgtcacagagggtgcccaggcagtagaggaaccatccatatgctgaagcttctactaggatcccagttttgccgcagataattaatggacaactgtagtgcagtgatcctttacaggtttatttctttgtaaaaaaaaataataataatttgaatcatgtaatatttaaggttatactatgcctatttgaaaatgatattagttatcaactttgcagtttgaaaaacatgtattgtgtgtaaaggttaaataacaaaactatgcagatgctcttaaaagcattgataacctttgtgacgaacataaagagatccttaaattatgagttgttggcttatcttcataaataatttgtctgtaaaatggatgaaatgaaaagaggttcaattaaaacctacttttttctagtgctaaagaaaagatttaagcaccttgtcaagctgggtaaataggaaaaatacataatcatgctcagatatgtatctaggataattataattaataataatcatagtaacaaaaaaaaaaaaaaaaaactcgactgaggcgggtggatcacgaggtcaggagatcaagaccatcctggctaacatggtgaaaccccatctctactaaaaatacaaaaaaaattagccaggcgtgatagtgggcacctgtaatcccagctactggggaggctgaggcaggagaatggtgtgaacctgggaggcggagcttgcgccactgcactccagcctgggctacacaagcagactctgtctt

SEQ ID NO: 326263 - DNA, 2551 bp, Homo sapiens
  misc_feature (40)..(40): n is a, c, g, or t
  misc_feature (42)..(42): n is a, c, g, or t
  misc_feature (44)..(45): n is a, c, g, or t
cgtgacgcgtgggcggacgcgtgggtcgacccacgcgtcngngnncagacagtttagcagaacagcctccgcggctccggggagaagcaatatgttaaggatacctgtaagaaaggccttagtaggcctttctaagtctcctaaaggatgtgttcgaacaactgccacagcagcaagcaacttgattgaagtatttgttgatggtcagtctgtcatggtggaaccgggaacgaccgtcctccaagcttgtgagaaggttggcatgcagatccctcgattctgttatcatgaaaggttgtctgttgctggaaactgcaggatgtgccttgttgaaattgagaaagcccctaaggttgtagctgcttgtgccatgccagtaatgaagggttggaatatcctaacaaactcagaaaaatccaaaaaagccagggaaggtgtgatggagttcttattagcaaatcacccattggactgtcctatttgtgaccagggaggtgaatgtgatctgcaggaccagtccatgatgtttggaaatgataggagccgatttttagaggggaagcgtgctgtggaagacaagaacattgggccattggtaaagaccatcatgacaagatgtatacagtgtactcgctgcatcaggtttgcaagtgagattgcaggagtagatgatttgggaacaacaggcagaggaaatgatatgcaagttggcacatacattgaaaagatgttcatgtctgaactgtctgggaatatcattgatatctgccctgtaggtgccctaacctctaagccctatgcctttactgcccggccttgggaaacaagaaagacagaatccattgatgtaatggatgcggttggaagtaatattgtggttagcacaagaactggagaagtgatgaggattttgccacgtatgcatgaggacatcaatgaagagtggatctctgataaaaccagatttgcctatgatgggctaaaacgtcaaagacttaccgagccaatggtcagaaatgaaaaagggcttttaacctatacttcttgggaggatgcgctctctcgcgtagctggaatgttgcagagttttcaaggcaaagatgtggcagcaattgcaggtggcttggtggatgctgaagccctggtagctctcaaagatttgcttaatagagtggactctgacaccttatgcactgaagaggtcttccccactgcaggagctggcacagatttgcgttccaattatcttcttaatactacaattgctggtgtggaagaggcagatgttgttcttctggttggtacaaacccacgttttgaggcaccactgtttaatgctagaattcgaaagagctggctgcataatgacttaaaagtggcccttataggcagtccagtggacctcacttacacatatgaccacctgggagactcccccaaaattcttcaagacattgcttcgggaagccatccatttagccaggtcctaaaggaagctaaaaaaccaatggtggttttaggcagttctgcactccaaagaaatgatggagcagcaattcttgcagctgtttctagcattgcacaaaagattcggatgactagtggtgttactggtgattggaaagttatgaatatccttcataggattgcaagtcaagtagctgctttggaccttggctataagcctggggtggaagcaattcggaagaaccctcccaaggtgctgtttctcctgggagcagatggaggttgtatcacacgacaggatttgccaaaggattgtttcattatttatcaaggacatcatggtgatgttggggctcccatagctgatgttattctcccaggagctgcttacacagagaagtctgctacatatgtcaacactgagggtagagctcagcagactaaggtagcagtgacacctcctggcttggcaagagaagactggaaaattataagagcactctctgagattgctggaatgactcttccatatgatactctggatcaagtaaggaacagattggaagaagtctctcctaatcttgttcgatatgatgatattgaaggggctaattacttccagcaagcaaatgagctctcaaagctagtgaaccagcagcttcttgctgacccacttgttccacctcagctaactataaaagacttctacatgacagattcaattagcagagcctcacagacaatggccaaatgtgtcaaagctgtcacagagggtgcccaggcagtagaggaaccatccatatgctgaagcttctactaggatcccagttttgccgcagataattaatggacaactgtagtgcagtgatcctttacaggtttatttctttgtaaaaaaaaataataataatttgaatcatgtaatatttaaggttatactatgcctatttgaaaatgatattagttatcaactttgcagtttgaaaaacatgtattgtgtgtaaaggttaaataacaaaactatgcagatgctcttaaaagcattgataacctttgtgacgaacataaagagatccttaaatta

SEQ ID NO: 326264 - DNA, 2558 bp, Homo sapiens
ctatcaaaagtagacaaccataagtttgcatccagagcaatacagaggaataataaggaatgaaaaattttaggtttgtagttagagtcaattcatccattatcatctgctataataaactgttaatctgtttttcgcttcaatatctttgatggtcagttcgaacaactgccacagcagcaagcaacttgattgaagtatttgttgatggtcagtctgtcatggtggaaccgggaacgaccgtcctccaagcttgtgagaaggttggcatgcagatccctcgattctgttatcatgaaaggttgtctgttgctggaaactgcaggatgtgccttgttgaaattgagaaagcccctaaggttgtagctgcttgtgccatgccagtaatgaagggttggaatatcctaacaaactcagaaaaatccaaaaaagccagggaaggtgtgatggagttcttattagcaaatcacccattggactgtcctatttgtgaccagggaggtgaatgtgatctgcaggaccagtccatgatgtttggaaatgataggagccgatttttagaggggaagcgtgctgtggaagacaagaacattgggccattggtaaagaccatcatgacaagatgtatacagtgtactcgctgcatcaggtttgcaagtgagattgcaggagtagatgatttgggaacaacaggcagaggaaatgatatgcaagttggcacatacattgaaaagatgttcatgtctgaactgtctgggaatatcattgatatctgccctgtaggtgccctaacctctaagccctatgcctttactgcccggccttgggaaacaagaaagacagaatccattgatgtaatggatgcggttggaagtaatattgtggttagcacaagaactggagaagtgatgaggattttgccacgtatgcatgaggacatcaatgaagagtggatctctgataaaaccagatttgcctatgatgggctaaaacgtcaaagacttaccgagccaatggtcagaaatgaaaaagggcttttaacctatacttcttgggaggatgcgctctctcgcgtagctggaatgttgcagagttttcaaggcaaagatgtggcagcaattgcaggtggcttggtggatgctgaagccctggtagctctcaaagatttgcttaatagagtggactctgacaccttatgcactgaagaggtcttccccactgcaggagctggcacagatttgcgttccaattatcttcttaatactacaattgctggtgtggaagaggcagatgttgttcttctggttggtacaaacccacgttttgaggcaccactgtttaatgctagaattcgaaagagctggctgcataatgacttaaaagtggcccttataggcagtccagtggacctcacttacacatatgaccacctgggagactcccccaaaattcttcaagacattgcttcgggaagccatccatttagccaggtcctaaaggaagctaaaaaaccaatggtggttttaggcagttctgcactccaaagaaatgatggagcagcaattcttgcagctgtttctagcattgcacaaaagattcggatgactagtggtgttactggtgattggaaagttatgaatatccttcataggattgcaagtcaagtagctgctttggaccttggctataagcctggggtggaagcaattcggaagaaccctcccaaggtgctgtttctcctgggagcagatggaggttgtatcacacgacaggatttgccaaaggattgtttcattatttatcaaggacatcatggtgatgttggggctcccatagctgatgttattctcccaggagctgcttacacagagaagtctgctacatatgtcaacactgagggtagagctcagcagactaaggtagcagtgacacctcctggcttggcaagagaagactggaaaattataagagcactctctgagattgctggaatgactcttccatatgatactctggatcaagtaaggaacagattggaagaagtctctcctaatcttgttcgatatgatgatattgaaggggctaattacttccagcaagcaaatgagctctcaaagctagtgaaccagcagcttcttgctgacccacttgttccacctcagctaactataaaagacttctacatgacagattcaattagcagagcctcacagacaatggccaaatgtgtcaaagctgtcacagagggtgcccaggcagtagaggaaccatccatatgctgaagcttctactaggatcccagttttgccgcagataattaatggacaactgtagtgcagtgatcctttacaggtttatttctttgtaaaaaaaaataataataatttgaatcatgtaatatttaaggttatactatgcctatttgaaaatgatattagttatcaactttgcagtttgaaaaacatgtattgtgtgtaaaggttaaataacaaaactatgcagatgctcttaaaagcattgataacctttgtgacgaacataaagagatccttaaatta

SEQ ID NO: 326265 - DNA, 3747 bp, Homo sapiens
gactacaaacgggatgcacagggggacatttagggtgcaggatctgcgctgtacattagggtggtgaatacatgacccgttgcatttgtctgaacccacagaatggcacagtacaaagagtgaacttcaacaaatgttaaccaaacaacaaccactaacatcaaccaaaacgtcagaggatcccaagatgaaatgtggattgcgacaaatgaaactaactgcattacaaatgtatgacataacttcactgaaggggcggtgaaaaaggagcttacctaacaaactttggaacacggtgttttgacttgaaattgtaaggctaatgacaaaagaaactgtacataaatactgtactcatggggtatggggtaataattctaaatttgcttttcatgtgtacataggttgaaaaaataagtggatggataatggggtggctggagccaggtttcttatggtcagacaaggaagtcacagattaaaaaggaggactagagtgaaccttgtggtaatggattataatcagagacatcaatatcaactcatgtttaacttaacatatatgccaactgatacatatagaaacaattagagatgtatgtgtatacatgggttagtattcacacagatattacctagctctgtcccctgagagggcctaaaagcaacgatactccaatagcaatgagcacacctagtaactacattttggttcctaaataaaaggaatgctagttccttcaaatggctgattctacagctgatgcaaagaaaatacaagatgagcctggagcatcttctagtaccacgtcaggagatgttcaaaaaacaaaaggataggggcatatgaaagggacataaacagtaaccggaaaaccttcccaatagccaaagttggaacaatttaagcaaaagaaaagaaacctagcattagaactcaaagtataaaataaacatacatgagtccatactgatataaatgactgaataaacagataaatgtggggaaagatccaaatcttccttacagaagaatttcaaaccatgtatgtagatatctcccccttcctaaagtgtgggttggacttagtaatgtgttcccaaaaaacagagtatagtgaagaaacctagcaaacactatcttaaccaagtggtcatggttaacatcaccagtgatgccacgtggacatcatgcacccctgatgagaggaaaagaggattctttccaaaaacgcataacccagtctaataccgagcaacagcagcaaacgcagactggggggcattctacaaagtcctcggggatggcaaggtcgtgacaaacaaggaaaaactgagaaactgtcacaaaccaagagactggggaaacatgaaaactacaggcaatgtggtatcctaaatttgatcctagaacagaaagaggccattaatgaaaaagctggaaaaatccaaatgaagtatgaagtttagttaacagtatgtactaaggttggtttcttagttttcacagatataccacaataatgtaagatgtcagcaatcaggaaaactaggtgtagggtatatgggaactctacgtgaattttctgtgttatttatgcaacttttctctaaataaaaaattaatccaaaaaaagtttaaggattagtctatggtactagaagtcagaatagtgggtactctcaggcaccactgtttaatgctagaattcgaaagagctggctgcataatgacttaaaagtggcccttataggcagtccagtggacctcacttacacatatgaccacctgggagactcccccaaaattcttcaagacattgcttcgggaagccatccatttagccaggtcctaaaggaagctaaaaaaccaatggtggttttaggcagttctgcactccaaagaaatgatggagcagcaattcttgcagctgtttctagcattgcacaaaagattcggatgactagtggtgttactggtgattggaaagttatgaatatccttcataggattgcaagtcaagtagctgctttggaccttggctataagcctggggtggaagcaattcggaagaaccctcccaaggtgctgtttctcctgggagcagatggaggttgtatcacacgacaggatttgccaaaggattgtttcattatttatcaaggacatcatggtgatgttggggctcccatagctgatgttattctcccaggagctgcttacacagagaagtctgctacatatgtcaacactgagggtagagctcagcagactaaggtagcagtgacacctcctggcttggcaagagaagactggaaaattataagagcactctctgagattgctggaatgactcttccatatgatactctggatcaagtaaggaacagattggaagaagtctctcctaatcttgttcgatatgatgatattgaaggggctaattacttccagcaagcaaatgagctctcaaagctagtgaaccagcagcttcttgctgacccacttgttccacctcagctaactataaaagacttctacatgacagattcaattagcagagcctcacagacaatggccaaatgtgtcaaagctgtcacagagggtgcccaggcagtagaggaaccatccatatgctgaagcttctactaggatcccagttttgccgcagataattaatggacaactgtagtgcagtgatcctttacaggtttatttctttgtaaaaaaaaataataataatttgaatcatgtaatatttaaggttatactatgcctatttgaaaatgatattagttatcaactttgcagtttgaaaaacatgtattgtgtgtaaaggttaaataacaaaactatgcagatgctcttaaaagcattgataacctttgtgacgaacataaagagatccttaaattatgagttgttggcttatcttcataaataatttgtctgtaaaatggatgaaatgaaaagaggttcaattaaaacctacttttttctagtgctaaagaaaagatttaagcaccttgtcaagctgggtaaataggaaaaatacataatcatgctcagatatgtatctaggataattataattaataataatcatagtaacaatggctaatgataatttagctttattatatgtgctaagcactctggttttacatgcattatcttcttttgttcttgctacaaccctgtgagatagtagtattatctcattttactgatgaagactgaagcctaggtatattaaatagcttgcccaaggccacacagcaaaagtcaccaactcaaacctacttcttatttactccaaagcctgttgttcttaactgcaacatattatttcgtctcattaatgttgattctataggttgttacttctaaaaattagtattgagtttaatggtgaacacatttttctattttctcttgaatctgcttctataatgtcatggtgatttatgtggcttttttttttttataagttatacatgtatgcatgtatacttatgagacctcccttggaatgagggaggtctcaagagatataatttagattctcattgatgttctgtattcattatcctaacaccatctgtagtgttaaatcaactaaattatttcagcaataggagacaaaacaaccagctttcataatttttaattgtcaaaaccaaaaggaatcagaataaggatcactgagaatttaaaaaaataaaaaaggaagtaaaaattttaca

SEQ ID NO: 326266 - DNA, 1577 bp, Homo sapiens
tcatttagaggtactatggtttaaaacacagccttaaaattgtaggtatttaacattgtgatctggtgatcattgctttccctgcctcctcctccctatctgtggcatggtaagtagatggaagatagtaggcatgatacttaagcatagtttttcctattctttaattaacatctgaatctctggagagaagttccccaatttttctgggacctgcccatagttattctgaccacaggataatttgctaggctttttattctgaataattacttttagaaaacgtgtcttagctgatactcaggcatatttcacagtagcattggcaagatgctttggattaaactaaatctggttgtatatgtgtgtctgtatgttgggctaacaaattgaagacattcatgttacacctaagacttgggacaacctatattatagaggcaaatatggtttggtgttcagcttacttgtaatattttaaaatcaaagttgtttttttttttaaataggtcctaaaggaagctaaaaaaccaatggtggttttaggcagttctgcactccaaagaaatgatggagcagcaattcttgcagctgtttctagcattgcacaaaagattcggatgactagtggtgttactggtgattggaaagttatgaatatccttcataggattgcaagtcaagtagctgctttggaccttggctataagcctggggtggaagcaattcggaagaaccctcccaaggtgctgtttctcctgggagcagatggaggttgtatcacacgacaggatttgccaaaggattgtttcattatttatcaaggacatcatggtgatgttggggctcccatagctgatgttattctcccaggagctgcttacacagagaagtctgctacatatgtcaacactgagggtagagctcagcagactaaggtagcagtgacacctcctggcttggcaagagaagactggaaaattataagagcactctctgagattgctggaatgactcttccatatgatactctggatcaagtaaggaacagattggaagaagtctctcctaatcttgttcgatatgatgatattgaaggggctaattacttccagcaagcaaatgagctctcaaagctagtgaaccagcagcttcttgctgacccacttgttccacctcagctaactataaaagacttctacatgacagattcaattagcagagcctcacagacaatggccaaatgtgtcaaagctgtcacagagggtgcccaggcagtagaggaaccatccatatgctgaagcttctactaggatcccagttttgccgcagataattaatggacaactgtagtgcagtgatcctttacaggtttatttctttgtaaaaaaaaataataataatttgaatcatgtaatatttaaggttatactatgcctatttgaaaatgatattagttatcaactttgcagtttgaaaaacatgtattgtgtgtaaaggttaaataacaaaactatgcagatgctcttaaaagcattgataacctttgtgacgaacataaagagatccttaaatta

SEQ ID NO: 326267 - DNA, 1457 bp, Homo sapiens
  misc_feature (1390)..(1390): n is a, c, g, or t
  misc_feature (1417)..(1419): n is a, c, g, or t
  misc_feature (1457)..(1457): n is a, c, g, or t
cggaaattgccgacaaacttgtcgaatgcaaggattctagtccctccgggctttccgttctccaggcccggctgacagagttagccgaggccgccatattgaataagcgacccggcctcctagggggtcgtcgtggtccagacagtttagcagaacagcctccgcggctccggggagaagcaatatgttaaggatacctgtaagaaaggccttagtaggcctttctaagtctcctaaaggatgtgttcgaacaactgccacagcagcaagcaacttgattgaagtatttgttgatggtcagtctgtcatggtggaaccgggaacgaccgtcctccaagcttgtgagaaggttggcatgcagatccctcgattctgttatcatgaaaggttgtctgttgctggaaactgcaggatgtgccttgttgaaattgagaaagcccctaaggttgtagctgcttgtgccatgccagtaatgaagggttggaatatcctaacaaactcagaaaaatccaaaaaagccagggaaggtgtgatggagttcttattagcaaatcacccattggactgtcctatttgtgaccagggaggtgaatgtgatctgcaggaccagtccatgatgtttggaaatgataggagccgatttttagaggggaagcgtgctgtggaagacaagaacattgggccattggtaaagaccatcatgacaagatgtatacagtgtactcgctgcatcaggtttgcaagtgagattgcaggagtagatgatttgggaacaacaggcagaggaaatgatatgcaagttggcacatacattgaaaagatgttcatgtctgaactgtctgggaatatcattgatatctgccctgtaggtgccctaacctctaagccctatgcctttactgcccggccttgggaaacaagaaagacagaatccattgatgtaatggatgcggttggaagtaatattgtggttagcacaagaactggagaagtgatgaggattttgccacgtatgcatgaggacatcaatgaagagtggatctctgataaaaccagatttgcctatgatgggctaaaacgtcaaagacttaccgagccaatggtcagaaatgaaaaagggcttttaacctatacttcttgggaggatgcgctctctcgcgtagctggaatgttgcagagttttcaaggcaaagatgtggcagcaattgcaggtggcttggtggatgctgaagccctggtagctctcaaagatttgcttaatagagtggactctgacaccttatgcactgaagaggtcttccccactgcaggagctggcacagatttgcgttcgaattctagcattaaacagtggtgcctcaaaacgtgggtttgtaccaaccagaagaanaacatctgcctcttccacaccagcaannntagtattaagaagataattggaacgtcgacgcggccgn

SEQ ID NO: 326268 - DNA, 1859 bp, Homo sapiens
cggaaattgccgacaaacttgtcgaatgcaaggattctagtccctccgggctttccgttctccaggcccggctgacagagttagccgaggccgccatattgaataagcgacccggcctcctagggggtcgtcgtggtccagacagtttagcagaacagcctccgcggctccggggagaagcaatatgttaaggatacctgtaagaaaggccttagtaggcctttctaagtctcctaaaggatgtgttcgaacaactgccacagcagcaagcaacttgattgaagtatttgttgatggtcagtctgtcatggtggaaccgggaacgaccgtcctccaagcttgtgagaaggttggcatgcagatccctcgattctgttatcatgaaaggttgtctgttgctggaaactgcaggatgtgccttgttgaaattgagaaagcccctaaggttgtagctgcttgtgccatgccagtaatgaagggttggaatatcctaacaaactcagaaaaatccaaaaaagccagggaaggtgtgatggagttcttattagcaaatcacccattggactgtcctatttgtgaccagggaggtgaatgtgatctgcaggaccagtccatgatgtttggaaatgataggagccgatttttagaggggaagcgtgctgtggaagacaagaacattgggccattggtaaagaccatcatgacaagatgtatacagtgtactcgctgcatcaggtttgcaagtgagattgcaggagtagatgatttgggaacaacaggcagaggaaatgatatgcaagttggcacatacattgaaaagatgttcatgtctgaactgtctgggaatatcattgatatctgccctgtaggtgccctaacctctaagccctatgcctttactgcccggccttgggaaacaagaaagacagaatccattgatgtaatggatgcggttggaagtaatattgtggttagcacaagaactggagaagtgatgaggattttgccacgtatgcatgaggacatcaatgaagagtggatctctgataaaaccagatttgcctatgatgggctaaaacgtcaaagacttaccgagccaatggtcagaaatgaaaaagggcttttaacctatacttcttgggaggatgcgctctctcgcgtagctggaatgttgcagagttttcaaggcaaagatgtggcagcaattgcaggtggcttggtggatgctgaagccctggtagctctcaaagatttgcttaatagagtggactctgacaccttatgcactgaagaggtcttccccactgcaggagctggcacagcactcttgcgcttccaagcttatcgttcatctaatacatacaacttgcatggctgctgcgcacagaggccagatgcttggcttcgtatatggctcggtacaacaccctacgctactcagaggcaccacctgattctacactgcttacgaattcgacaacgagctggactgcactacactgcaccttacacacgtggcccttactagggcagatccagctggaccctcaccttatcacactatgacaccaacctgcggcacacctcccccgaagacattcttcaagcacatctgcgtcccgtgcgaagcccatccgaattaagccaacgtcctcaacagggacgcttacacaacaccacacggcagggaccaagagccagttcatggcacatcccagaacgaccaaacggactggacgccagccaacatacctcggcacactggacgcacacgccattgcacaaacaagatcacgcactgacctacgcgagcgaaacctggctcgcccggacacagtaatgaatactaccaacacagg

SEQ ID NO: 326269 - DNA, 1788 bp, Homo sapiens
tatatttatttatttatttatttttttgagacaagagtcttgctctgtcgcccaggctagattgcagtggtgtgatctcggctcactgcaagctccgcctcctaggttcacacgattctcctgcctcagactcccgagtagctgggactacaggcatatgccacaacacctggctaattttttgtatttttagtagagatggggtttcactgtgttagccaggatggtctcaatctcctgacctcgtgatccacctgcctcggcctcccaaagtgctgggattacaggtgtgagccaccgcgcctggcctttcctatgtttttaatacttttctataattttttaatggctgcatactggtgcactgtctagctgctctatagttatttgattgtttccagggatagttattgaaagcatgtggccagtaaggggtttatcgttggaatctgttggttacatataattatatatacttgcatagggccttataatcttttttcctcctgaatatgtgcaccattaaagttttagtatgtgctttttaaaaagttgtattatcaaaatgacattttcttaatatctttcagattcaattagcagagcctcacagacaatggccaaatgtgtcaaagctgtcacagagggtgcccaggcagtagaggaaccatccatatgctgaagcttctactaggatcccagttttgccgcagataattaatggacaactgtagtgcagtgatcctttacaggtttatttctttgtaaaaaaaaataataataatttgaatcatgtaatatttaaggttatactatgcctatttgaaaatgatattagttatcaactttgcagtttgaaaaacatgtattgtgtgtaaaggttaaataacaaaactatgcagatgctcttaaaagcattgataacctttgtgacgaacataaagagatccttaaattatgagttgttggcttatcttcataaataatttgtctgtaaaatggatgaaatgaaaagaggttcaattaaaacctacttttttctagtgctaaagaaaagatttaagcaccttgtcaagctgggtaaataggaaaaatacataatcatgctcagatatgtatctaggataattataattaataataatcatagtaacaatggctaatgataatttagctttattatatgtgctaagcactctggttttacatgcattatcttcttttgttcttgctacaaccctgtgagatagtagtattatctcattttactgatgaagactgaagcctaggtatattaaatagcttgcccaaggccacacagcaaaagtcaccaactcaaacctacttcttatttactccaaagcctgttgttcttaactgcaacatattatttcgtctcattaatgttgattctataggttgttacttctaaaaattagtattgagtttaatggtgaacacatttttctattttctcttgaatctgcttctataatgtcatggtgatttatgtggcttttttttttttataagttatacatgtatgcatgtatacttatgagacctcccttggaatgagggaggtctcaagagatataatttagattctcattgatgttctgtattcattatcctaacaccatctgtagtgttaaatcaactaaattatttcagcaataggagacaaaacaaccagctttcataatttttaattgtcaaaaccaaaaggaatcagaataaggatcactgagaatttaaaaaaataaaaaaggaagtaaaaattttaca

SEQ ID NO: 326270 - DNA, 982 bp, Homo sapiens
  misc_feature (40)..(40): n is a, c, g, or t
  misc_feature (42)..(42): n is a, c, g, or t
  misc_feature (44)..(45): n is a, c, g, or t
cgtgacgcgtgggcggacgcgtgggtcgacccacgcgtcngngnncaggcctccgcggctccggggagaagcaatatgttaaggatacctgtaagaaaggccttagtaggcctttctaagtctcctaaaggatgtggtgagtattttcttaaatttgcattcgtggatattagaccttatttttgtaaatttataagtctatggcatagtttatcaaagaccctaaacccatgattttttaaaataaaaatagaaaccggccgggtgtggtggctcatgcctgtaatcctagcactttgagaggctgaggcaggtggattgcttgaagccaggaattcaaaaccagcctggccatcatagtgaaaccccatcactactaaaaatataaaaatcagctgggcatggtggggcacacctgtaatcccagctacacaggaggctgaggcacaagaatagcttaaacccgggaggtggaggttgcatacagccaagattgtgccactgcactccagcctgggagatagatcgagactccatcttggaaaaaaaaaaaaaaagaagaaacaaatgatctaagttgaataattttcaaaatataattttactttaaacagtttataggaattatcatggaatagaaagtattaggaactacacacatcaatgccaaaatggaaaaatcacattctgtttttgaaaagtgatcttcccatgaacatattttcagtgacattaagagtttcagtttaaagttgggtatggtggctcactcctgtaatctcagcactttgggaggccgaggcagaaggattacttgaggtcaggagtttgagaccatcctggccaatatggcgaaaccctgtctctactaaaaatacaaaaattagcgggcgtggtggtgagttcctgtaatcccagctactcggaaggctgaggcaggagaatcgcttgaaccggggaggtggaggttgtagtgagccaa

SEQ ID NO: 326271 - DNA, 2644 bp, Homo sapiens
cggaaattgccgacaaacttgtcgaatgcaaggattctagtccctccgggctttccgttctccaggcccggctgacagagttagccgaggccgccatattgaataagcgacccggcctcctagggggtcgtcgtggtccagacagtttagcagaacagcctccgcggctccggggagaagcaatatgttaaggatacctgtaagaaaggccttagtaggcctttctaagtctcctaaaggatgtgttcgaacaactgccacagcagcaagcaacttgattgaagtatttgttgatggtcagtctgtcatggtggaaccgggaacgaccgtcctccaagcttgtgagaaggttggcatgcagatccctcgattctgttatcatgaaaggttgtctgttgctggaaactgcaggatgtgccttgttgaaattgagaaagcccctaaggttgtagctgcttgtgccatgccagtaatgaagggttggaatatcctaacaaactcagaaaaatccaaaaaagccagggaaggtgtgatggagttcttattagcaaatcacccattggactgtcctatttgtgaccagggaggtgaatgtgatctgcaggaccagtccatgatgtttggaaatgataggagccgatttttagaggggaagcgtgctgtggaagacaagaacattgggccattggtaaagaccatcatgacaagatgtatacagtgtactcgctgcatcaggtttgcaagtgagattgcaggagtagatgatttgggaacaacaggcagaggaaatgatatgcaagttggcacatacattgaaaagatgttcatgtctgaactgtctgggaatatcattgatatctgccctgtaggtgccctaacctctaagccctatgcctttactgcccggccttgggaaacaagaaagacagaatccattgatgtaatggatgcggttggaagtaatattgtggttagcacaagaactggagaagtgatgaggattttgccacgtatgcatgaggacatcaatgaagagtggatctctgataaaaccagatttgcctatgatgggctaaaacgtcaaagacttaccgagccaatggtcagaaatgaaaaagggcttttaacctatacttcttgggaggatgcgctctctcgcgtagctggaatgttgcagagttttcaaggcaaagatgtggcagcaattgcaggtggcttggtggatgctgaagccctggtagctctcaaagatttgcttaatagagtggactctgacaccttatgcactgaagaggtcttccccactgcaggagctggcacagatttgcgttccaattatcttcttaatactacaattgctggtgtggaagaggcagatgttgttcttctggttggtacaaacccacgttttgaggcaccactgtttaatgctagaattcgaaagagctggctgcataatgacttaaaagtggcccttataggcagtccagtggacctcacttacacatatgaccacctgggagactcccccaaaattcttcaagacattgcttcgggaagccatccatttagccaggtcctaaaggaagctaaaaaaccaatggtggttttaggcagttctgcactccaaagaaatgatggagcagcaattcttgcagctgtttctagcattgcacaaaagattcggatgactagtggtgttactggtgattggaaagttatgaatatccttcataggattgcaagtcaagtagctgctttggaccttggctataagcctggggtggaagcaattcggaagaaccctcccaaggtgctgtttctcctgggagcagatggaggttgtatcacacgacaggatttgccaaaggattgtttcattatttatcaaggacatcatggtgatgttggggctcccatagctgatgttattctcccaggagctgcttacacagagaagtctgctacatatgtcaacactgagggtagagctcagcagactaaggtagcagtgacacctcctggcttggcaagagaagactggaaaattataagagcactctctgagattgctggaatgactcttccatatgatactctggatcaagtaaggaacagattggaagaagtctctcctaatcttgttcgatatgatgatattgaaggggctaattacttccagcaagcaaatgagctctcaaagctagtgaaccagcagcttcttgctgacccacttgttccacctcagctaactataaaagacttctacatgacagattcaattagcagagcctcacagacaatggccaaatgtgtcaaagctgtcacagagggtgcccaggcagtagaggaaccatccatatgctgaagcttctactaggatcccagttttgccgcagataattaatggacaactgtagtgcagtgatcctttacaggtttatttctttgtaaaaaaaaataataataatttgaatcatgtaatatttaaggttatactatgcctatttgaaaatgatattagttatcaactttgcagtttgaaaaacatgtattgtgtgtaaaggttaaataacaaaactatgcagatgctcttaaaagcattgataacctttgtgacgaacataaagagatccttaaatta

SEQ ID NO: 326272 - DNA, 962 bp, Homo sapiens
  misc_feature (40)..(40): n is a, c, g, or t
  misc_feature (42)..(42): n is a, c, g, or t
  misc_feature (44)..(45): n is a, c, g, or t
cgtgacgcgtgggcggacgcgtgggtcgacccacgcgtcngngnncaggcctccgcggctccggggagaagcaatatgttaaggatacctgtaagaaaggccttagtaggcctttctaagtctcctaaaggatgtgttcgaacaactgccacagcagcaagcaacttgattgaagtatttgttgatggtcagtctgtcatggtggaaccgggaacgaccgtcctccaagcttgtgagaaggttggcatgcagatccctcgattctgttatcatgaaaggttgtctgttgctggaaactgcaggatgtgccttgttgaaattgagaaagcccctaaggttgtagctgcttgtgccatgccagtaatgaagggttggaatatcctaacaaactcagaaaaatccaaaaaagccagggaaggtgtgatggagttcttattagcaaatcacccattggactgtcctatttgtgaccagggaggtgaatgtgatctgcaggaccagtccatgatgtttggaaatgataggagccgatttttagaggggaagcgtgctgtggaagacaagaacattgggccattggtaaagaccatcatgacaagatgtatacagtgtactcgctgcatcaggtttgcaagtgagaatgcggagtcatgattggggaaccacagccgagaactgaactgcacgtgggccctcttgacgagggtccccgtctgaccgccgggaattcatgacatcgccgtagggcccaacctcagcctagcttaaaggccggctggaacaagagccacaccctgtgataggtggggccgcactactgggctcccacggcagtaggagatttctcgtcgcgtggccccacggctctacaccccttcggggaacccgccgcagaggacaccagggctcccagagaaacagcaggtcgccaagtaagaccgaatagtaacagaacacatgcg

SEQ ID NO: 326273 - DNA, 3474 bp, Homo sapiens
cggaaattgccgacaaacttgtcgaatgcaaggattctagtccctccgggctttccgttctccaggcccggctgacagagttagccgaggccgccatattgaataagcgacccggcctcctagggggtcgtcgtggtccagacagtttagcagaacagcctccgcggctccggggagaagcaatatgttaaggatacctgtaagaaaggccttagtaggcctttctaagtctcctaaaggatgtgttcgaacaactgccacagcagcaagcaacttgattgaagtatttgttgatggtcagtctgtcatggtggaaccgggaacgaccgtcctccaagcttgtgagaaggttggcatgcagatccctcgattctgttatcatgaaaggttgtctgttgctggaaactgcaggatgtgccttgttgaaattgagaaagcccctaaggttgtagctgcttgtgccatgccagtaatgaagggttggaatatcctaacaaactcagaaaaatccaaaaaagccagggaaggtgtgatggagttcttattagcaaatcacccattggactgtcctatttgtgaccagggaggtgaatgtgatctgcaggaccagtccatgatgtttggaaatgataggagccgatttttagaggggaagcgtgctgtggaagacaagaacattgggccattggtaaagaccatcatgacaagatgtatacagtgtactcgctgcatcaggtttgcaagtgagattgcaggagtagatgatttgggaacaacaggcagaggaaatgatatgcaagttggcacatacattgaaaagatgttcatgtctgaactgtctgggaatatcattgatatctgccctgtaggtgccctaacctctaagccctatgcctttactgcccggccttgggaaacaagaaagacagaatccattgatgtaatggatgcggttggaagtaatattgtggttagcacaagaactggagaagtgatgaggattttgccacgtatgcatgaggacatcaatgaagagtggatctctgataaaaccagatttgcctatgatgggctaaaacgtcaaagacttaccgagccaatggtcagaaatgaaaaagggcttttaacctatacttcttgggaggatgcgctctctcgcgtagctggaatgttgcagagttttcaaggcaaagatgtggcagcaattgcaggtggcttggtggatgctgaagccctggtagctctcaaagatttgcttaatagagtggactctgacaccttatgcactgaagaggtcttccccactgcaggagctggcacagatttgcgttccaattatcttcttaatactacaattgctggtgtggaagaggcagatgttgttcttctggttggtacaaacccacgttttgaggcaccactgtttaatgctagaattcgaaagagctggctgcataatgacttaaaagtggcccttataggcagtccagtggacctcacttacacatatgaccacctgggagactcccccaaaattcttcaagacattgcttcgggaagccatccatttagccaggtcctaaaggaagctaaaaaaccaatggtggttttaggcagttctgcactccaaagaaatgatggagcagcaattcttgcagctgtttctagcattgcacaaaagattcggatgactagtggtgttactggtgattggaaagttatgaatatccttcataggattgcaagtcaagtagctgctttggaccttggctataagcctggggtggaagcaattcggaagaaccctcccaaggtgctgtttctcctgggagcagatggaggttgtatcacacgacaggatttgccaaaggattgtttcattatttatcaaggacatcatggtgatgttggggctcccatagctgatgttattctcccaggagctgcttacacagagaagtctgctacatatgtcaacactgagggtagagctcagcagactaaggtagcagtgacacctcctggcttggcaagagaagactggaaaattataagagcactctctgagattgctggaatgactcttccatatgatactctggatcaagtaaggaacagattggaagaagtctctcctaatcttgttcgatatgatgatattgaaggggctaattacttccagcaagcaaatgagctctcaaagctagtgaaccagcagcttcttgctgacccacttgttccacctcagctaactataaaagacttctacatgacagattcaattagcagagcctcacagacaatggccaaatgtgtcaaagctgtcacagagggtgcccaggcagtagaggaaccatccatatgctgaagcttctactaggatcccagttttgccgcagataattaatggacaactgtagtgcagtgatcctttacaggtttatttctttgtaaaaaaaaataataataatttgaatcatgtaatatttaaggttatactatgcctatttgaaaatgatattagttatcaactttgcagtttgaaaaacatgtattgtgtgtaaaggttaaataacaaaactatgcagatgctcttaaaagcattgataacctttgtgacgaacataaagagatccttaaattatgagttgttggcttatcttcataaataatttgtctgtaaaatggatgaaatgaaaagaggttcaattaaaacctacttttttctagtgctaaagaaaagatttaagcaccttgtcaagctgggtaaataggaaaaatacataatcatgctcagatatgtatctaggataattataattaataataatcatagtaacaatggctaatgataatttagctttattatatgtgctaagcactctggttttacatgcattatcttcttttgttcttgctacaaccctgtgagatagtagtattatctcattttactgatgaagactgaagcctaggtatattaaatagcttgcccaaggccacacagcaaaagtcaccaactcaaacctacttcttatttactccaaagcctgttgttcttaactgcaacatattatttcgtctcattaatgttgattctataggttgttacttctaaaaattagtattgagtttaatggtgaacacatttttctattttctcttgaatctgcttctataatgtcatggtgatttatgtggcttttttttttttataagttatacatgtatgcatgtatacttatgagacctcccttggaatgagggaggtctcaagagatataatttagattctcattgatgttctgtattcattatcctaacaccatctgtagtgttaaatcaactaaattatttcagcaataggagacaaaacaaccagctttcataatttttaattgtcaaaaccaaaaggaatcagaataaggatcactgagaatttaaaaaaataaaaaaggaagtaaaaattttaca

SEQ ID NO: 326274 - DNA, 2851 bp, Homo sapiens
cggaaattgccgacaaacttgtcgaatgcaaggattctagtccctccgggctttccgttctccaggcccggctgacagagttagccgaggccgccatattgaataagcgacccggcctcctagggggtcgtcgtggtccagacagtttagcagaacagcctccgcggctccggggagaagcaatatgttaaggatacctgtaagaaaggccttagtaggcctttctaagtctcctaaaggatgtgttcgaacaactgccacagcagcaagcaacttgattgaagtatttgttgatggtcagtctgtcatggtggaaccgggaacgaccgtcctccaagcttgtgagaaggttggcatgcagatccctcgattctgttatcatgaaaggttgtctgttgctggaaactgcaggatgtgccttgttgaaattgagaaagcccctaaggttgtagctgcttgtgccatgccagtaatgaagggttggaatatcctaacaaactcagaaaaatccaaaaaagccagggaaggtgtgatggagttcttattagcaaatcacccattggactgtcctatttgtgaccagggaggtgaatgtgatctgcaggaccagtccatgatgtttggaaatgataggagccgatttttagaggggaagcgtgctgtggaagacaagaacattgggccattggtaaagaccatcatgacaagatgtatacagtgtactcgctgcatcaggtttgcaagtgagattgcaggagtagatgatttgggaacaacaggcagaggaaatgatatgcaagttggcacatacattgaaaagatgttcatgtctgaactgtctgggaatatcattgatatctgccctgtaggtgccctaacctctaagccctatgcctttactgcccggccttgggaaacaagaaagacagaatccattgatgtaatggatgcggttggaagtaatattgtggttagcacaagaactggagaagtgatgaggattttgccacgtatgcatgaggacatcaatgaagagtggatctctgataaaaccagatttgcctatgatgggctaaaacgtcaaagacttaccgagccaatggtcagaaatgaaaaagggcttttaacctatacttcttgggaggatgcgctctctcgcgtagctggaatgttgcagagttttcaaggcaaagatgtggcagcaattgcaggtggcttggtggatgctgaagccctggtagctctcaaagatttgcttaatagagtggactctgacaccttatgcactgaagaggtcttccccactgcaggagctggcacagatttgcgttccaattatcttcttaatactacaattgctggtgtggaagaggcagatgttgttcttctggttggtacaaacccacgttttgaggcaccactgtttaatgctagaattcgaaagagctggctgcataatgacttaaaagtggcccttataggcagtccagtggacctcacttacacatatgaccacctgggagactcccccaaaattcttcaagacattgcttcgggaagccatccatttagccaggtcctaaaggaagctaaaaaaccaatggtggttttaggcagttctgcactccaaagaaatgatggagcagcaattcttgcagctgtttctagcattgcacaaaagattcggatgactagtggtgttactggtgattggaaagttatgaatatccttcataggattgcaagtcaagtagctgctttggaccttggctataagcctggggtggaagcaattcggaagaaccctcccaaggtgctgtttctcctgggagcagatggaggttgtatcacacgacaggatttgccaaaggattgtttcattatttatcaaggacatcatggtgatgttggggctcccatagctgatgttattctcccaggagctgcttacacagagaagtctgctacatatgtcaacactgagggtagagctcagcagactaaggtagcagtgacacctcctggcttggcaagagaagactggaaaattataagagcactctctgagattgctggaatgactcttccatatgatactctggatcaagtaaggaacagattggaagaagtctctcctaatcttgttcgatatgatgatattgaaggggctaattacttccagcaagcaaatgagctctcaaagctagtgaaccagcagcttcttgctgacccacttgttccacctcagctaactataaaagacttctacatgacagattcaattagcagagcctcacagacaatggccaaatgtgtcaaagctgtcacagagggtgcccaggcagtagaggaaccatccatatgctgaagcttctactaggatcccagttttgccgcagataattaatggacaactgtagtgcagtgatcctttacaggtttatttctttgtaaaaaaaaataataataatttgaatcatgtaatatttaaggttatactatgcctatttgaaaatgatattagttatcaactttgcagtttgaaaaacatgtattgtgtgtaaaggttaaataacaaaactatgcagatgctcttaaaagcattgataacctttgtgacgaacataaagagatccttaaattaaaaaaaaaaaaaaaaaaaaaaaaaaaaaaaaaaaaaaaccgggggcatttatattgtggggggggggaaaaaggggttatgaaaggggccggggataggggtgtttttgggaccagttttttgtgtttaaagggtggaaaattcgggggggccccaatatagggaggggaatataatttgaaaaagcgggtgtacgggtttaaagag

SEQ ID NO: 326275 - DNA, 1965 bp, Homo sapiens
cggaaattgccgacaaacttgtcgaatgcaaggattctagtccctccgggctttccgttctccaggcccggctgacagagttagccgaggccgccatattgaataagcgacccggcctcctagggggtcgtcgtggtccagacagtttagcagaacagcctccgcggctccggggagaagcaatatgttaaggatacctgtaagaaaggccttagtaggcctttctaagtctcctaaaggatgtgttcgaacaactgccacagcagcaagcaacttgattgaagtatttgttgatggtcagtctgtcatggtggaaccgggaacgaccgtcctccaagcttgtgagaaggttggcatgcagatccctcgattctgttatcatgaaaggttgtctgttgctggaaactgcaggatgtgccttgttgaaattgagaaagcccctaaggttgtagctgcttgtgccatgccagtaatgaagggttggaatatcctaacaaactcagaaaaatccaaaaaagccagggaaggtgtgatggagttcttattagcaaatcacccattggactgtcctatttgtgaccagggaggtgaatgtgatctgcaggaccagtccatgatgtttggaaatgataggagccgatttttagaggggaagcgtgctgtggaagacaagaacattgggccattggtaaagaccatcatgacaagatgtatacagtgtactcgctgcatcaggtttgcaagtgagattgcaggagtagatgatttgggaacaacaggcagaggaaatgatatgcaagttggcacatacattgaaaagatgttcatgtctgaactgtctgggaatatcattgatatctgccctgtaggtgccctaacctctaagccctatgcctttactgcccggccttgggaaacaagaaagacagaatccattgatgtaatggatgcggttggaagtaatattgtggttagcacaagaactggagaagtgatgaggattttgccacgtatgcatgaggacatcaatgaagagtggatctctgataaaaccagatttgcctatgatgggctaaaacgtcaaagacttaccgagccaatggtcagaaatgaaaaagggcttttaacctatacttcttgggaggatgcgctctctcgcgtagctggaatgttgcagagttttcaaggcaaagatgtggcagcaattgcaggtggcttggtggatgctgaagccctggtagctctcaaagatttgcttaatagagtggactctgacaccttatgcactgaagaggtcttccccactgcaggagctggcacagatttgcgttccaattatcttcttaatactacaattgctggtgtggaagaggcagatgttgttcttctggttggtacaaacccacgttttgaggcaccactgtttaatgctagaattcgaaagagctggctgcataatgacttaaaagtggcccttataggcagtccagtggacctcacttacacatatgaccacctgggagactcccccaaaattcttcaagacattgcttcgggaagccatccatttagccaggtcctaaaggaagctaaaaaaccaatggtggttttaggcagttctgcactccaaagaaatgatggagcagcaattcttgcagctgtttctagcattgcacaaaagattcggatgactagtggtgttactggtgattggaaagttatgaatatccttcataggattgcaagtcaagtagctgctttggaccttggctataagcctggggtggaagcaattcggaagaaccctcccaaggtgctgtttctcctgggagcagatggaggttgtatcacacgacaggatttgccaaaggattgtttcattatttatcaagacatcatggtgatgttgaggctccccatagatagtatttctgggatcctactagagtcatcactgcaggtaat

SEQ ID NO: 326276 - DNA, 4714 bp, Homo sapiens
  misc_feature (2)..(4): n is a, c, g, or t
  misc_feature (6)..(6): n is a, c, g, or t
  misc_feature (8)..(9): n is a, c, g, or t
gnnnangnntgcggccgcccgaagaggagagagcgcgggcctctaggaaggtatggcctcacaagtcttggtctacccaccatatgtttatcaaactcagtcaagtgccttttgtagtgtgaagaaactcaaagtagagccaagcagttgtgtattccaggaaagaaactatccacggacctatgtgaatggtagaaactttggaaattctcatcctcccactaagggtagtgcttttcagacaaagataccatttaatagacctcgaggacacaacttttcattgcagacaagtgctgttgttttgaaaaacactgcaggtgctacaaaggtcatagcagctcaggcacagcaagctcacgtgcaggcacctcagattggggcgtggcgaaacagattgcatttcctagaaggcccccagcgatgtggattgaagcgcaagagtgaggagttggataatcatagcagcgcaatgcagattgtcgatgaattgtccatacttcctgcaatgttgcaaaccaacatgggaaatccagtgacagttgtgacagctaccacaggatcaaaacagaattgtaccactggagaaggtgactatcagttagtacagcatgaagtcttatgctccatgaaaaatacttacgaagtccttgattttcttggtcgaggcacgtttggccaggtagttaaatgctggaaaagagggacaaatgaaattgtagcaatcaaaattttgaagaatcatccttcttatgcccgtcaaggtcaaatagaagtgagcatattagcaaggctcagtactgaaaatgctgatgaatataactttgtacgagcttatgaatgctttcagcaccgtaaccatacttgtttagtctttgagatgctggaacaaaacttgtatgactttctgaaacaaaataaatttagtcccctgccactaaaagtgattcggcccattcttcaacaagtggccactgcactgaaaaaattgaaaagtcttggtttaattcatgctgatctcaagccagagaatattatgttggtggatcctgttcggcagccttacagggttaaagtaatagactttgggtcggccagtcatgtatcaaagactgtttgttcaacatatctacaatctcggtactacagagctccagagattatattggggttgccattttgtgaagccatagacatgtggtcattgggatgtgtgattgcagaattatttcttggatggccgctctacccaggagccttggagtatgatcagattcgatacatttctcagactcaaggtttgccaggagaacagttgttaaatgtgggtactaaatccacaagatttttttgcaaagaaacagatatgtctcattctggttggagattaaagacattggaagagcatgaggcagagacaggaatgaagtctaaagaagccagaaaatacattttcaacagtctggatgatgtagcgcatgtgaacacagtgatggatttggaaggaagtgatcttttggctgagaaagctgatagaagagaatttgttagtctgttgaagaaaatgttgctgattgatgcagatttaagaattactccagctgagaccctgaaccatccttttgttaatatgaaacatcttctagatttccctcatagcaaccatgtaaagtcctgttttcatattatggatatttgtaagtcccacctaaattcatgtgacacaaataatcacaacaaaacttcacttttaagaccagttgcttcaagcagtactgctacactgactgcaaattttactaaaatcggaacattaagaagtcaggcattgaccacatctgctcattcagttgtgcaccatggaatacctctgcaggcaggaactgctcagtttggttgtggtgatgcttttcagcagacattgattatctgtcccccagctattcaaggtattcctgcaacacatggtaaacccaccagttattcaataagggtagataatacagttccacttgtaactcaggccccagctgtgcagccactacagatccgaccaggagttctttctcagacgtggtctggtagaacacagcagatgctggtgcctgcctggcaacaggtgacacccctggctcctgctactactacactaacttctgagagtgtggctggttcacacaggcttggagactgggggaagatgatttcatgcagcaatcattataactcagtgatgccgcagcctcttctgaccaatcagataactttatctgcccctcagccagttagtgtggggattgcacatgttgtctggcctcagcctgccactaccaagaaaaataaacagtgccagaacaggagtaattcattacagaataccaatatcccacattcagcatttatttctccaaagataattaatgggaaagatgtcgaggaagtaagttgtatagaaacacaggacaatcagaactcagaaggagaggcaagaaattgctgtgaaacatctatcagacaggactctgattcatcagtttcagacaaacagcggcaaaccatcattattgccgactccccgagtcctgcagtgagtgtcatcactatcagcagtgacactgatgaggaagagacttcccagagacattcactcagagaatgtaaaggtagtctagattgtgaagcttgccagagcactttgaatattgatcggatgtgttcattaagtagtcctgatagtactctgagtaccagctcctcagggcagtccagcccatccccctgcaagagaccgaatagtatgtcagatgaagagcaagaaagtagttgtgatacggtggatggctctccgacatctgactcttccgggcatgacagtccatttgcagagagcacttttgtggaggacactcatgaaaacacagaattggtatcctctgctgacacagaaaccaagccagctgtctgttctgttgtggtgccaccagtggaactagaaaatggcttaaatgccgatgagcatatggcaaacacagattctatatgccagccattaataaaaggacgatctgcccctggaagattaaaccagccttctgcagtgggtactcgtcagcaaaaattgacatcagcattccagcagcagcatttgaacttcagtcaggttcagcactttggatctgggcatcaagagtggaatggaaactttgggcacagaagacagcaagcttatattcctactagtgttaccagtaatccattcactctttctcatggaagtcccaatcacacagcagtgcatgcccacctggctggaaatacacacctcggaggacagcctactctacttccatacccatcatcagccaccctcagtagtgctgcaccagtggcccacctgttagcctctccgtgtacctcaagacctatgttacagcatccaacttataatatctcccatcccagtggcatagttcaccaagtcccagtgggcttaaatccccgtctgttaccatccccaaccattcatcagactcagtacaaaccaatcttcccaccacattcttacattgcagcatcacctgcatatactggatttccactgagtccaacaaaactcagccagtatccatatatgtgaaaaacagtatattggggaagctcaatgatacaaacatttgattaaaaataaaaacatggtatttaatattagccatggcacaagaaaattatttttgaatcatgtagacttgggtgcaatttaaacaactttgagctttaaaaactcacttttgatgtgttttgcacatttggtataacttgtctttggtcatgttatcttcttatgtagtaactctagacaggtgacttatgggagcagaagtccagttttgctcctgctattttttataaattgccttctaactagtgcaagacacgtctacatttgggaagccattctgtgtacagacttagagcaacagatgcacatatgtcagaattacagcatacaagtgaattgtattatccgtgtcttagtgtataaatgttgggtcacttacctaagaaattgagctattgttctttacatttgcatgtgtcttttgcatgggcaaaatgttgcctagactttgctcttaaatgttgttctaataatctcagctgcattgtaaaccgttcctacacatagtgccttaaatatttgaggttgttaatgttattacctatatataaatgttgaggactgcagcacttaaaattcagacctactatttagtttccttttgatagcgtaatgttcatttttgtttttgtgtggtatgatttcaggtagtagctgtttttttccttattaagagggcagcatgtttgctatagctgaattctgctgtctgatttttcagaatgatctagcttcaagaaaagcaagcagttagtagtgcttaagaaaaattgattcagtatctaatggatagttgataactgtcacagcacagcattttatatactgttaagtgaaactgcaatacaatctaagtttattttgagagtgtttgctgtataattggacttaataaaatgtttagaggtacagtaggcatgactttgggtagataataaaatgcaaaatgctcattgattcatgatgtggttttatcttagcttgggcaaaccatgcagtatttaataaatagtagcagaacttttactattgaag

SEQ ID NO: 326277 - DNA, 1208 bp, Homo sapiens
  misc_feature (2)..(4): n is a, c, g, or t
  misc_feature (6)..(6): n is a, c, g, or t
  misc_feature (8)..(9): n is a, c, g, or t
gnnnangnntgcggccgcccgaagaggagagagcgcgggcctctaggaaggtatggcctcacaagtcttggtctacccaccatatgtttatcaaactcagtcaagtgccttttgtagtgtgaagaaactcaaagtagagccaagcagttgtgtattccaggaaagaaactatccacggacctatgtgaatggtagaaactttggaaattctcatcctcccactaagggtagtgcttttcagacaaagataccatttaatagacctcgaggacacaacttttcattgcagacaagtgctgttgttttgaaaaacactgcaggtgctacaaaggtcatagcagctcaggcacagcaagctcacgtgcaggcacctcagattggggcgtggcgaaacagattgcatttcctagaaggcccccagcgatgtggattgaagcgcaagagtgaggagttggataatcatagcagcgcaatgcagattgtcgatgaattgtccatacttcctgcaatgttgcaaaccaacatgggaaatccagtgacagttgtgacagctaccacaggatcaaaacagaattgtaccactggagaaggtgactatcagttagtacagcatgaagtcttatgctccatgaaaaatacttacgaagtccttgattttcttggtcgaggcacgtttggccaggtagttaaatgctggaaaagagggacaaatgaaattgtagcaatcaaaattttgaagaatcatccttcttatgcccgtcaaggtcaaatagaagtgagcatattagcaaggctcagtactgaaaatgctgatgaatataactttgtacgagcttatgaatgctttcagcaccgtaaccatacttgtttagtctttgagatgctggaacaaaacttgtatgactttctgaaacaaaataaatttagtcccctgccactaaaagtgattcggcccattcttcaacaagtggccactgcactgaaaaaattgaaaagtcttggtttaattcatgctgatctcaagccagagaatattatgttggtggatcctgttcggcagccttacagggttaaagtaatagactttgggtcggccagtcatgtatcaaagactgtttgttcaacatatctacaatctcggtactacaggtatggcctcacaagtcttgggctacccaccatatgtttatcaaactcagtcaagtgcc

SEQ ID NO: 326278 - DNA, 4872 bp, Homo sapiens
cggccgcgcggcggggctgttgccggcttctctcgttacggtggctgccgcccgcttcccttcgccgcactgggagaactggcggaaagactttggatgaaaatgtctgtttctctgtcgggagggagacggctgttgtaaaatggtatggcctcacaagtcttggtctacccaccatatgtttatcaaactcagtcaagtgccttttgtagtgtgaagaaactcaaagtagagccaagcagttgtgtattccaggaaagaaactatccacggacctatgtgaatggtagaaactttggaaattctcatcctcccactaagggtagtgcttttcagacaaagataccatttaatagacctcgaggacacaacttttcattgcagacaagtgctgttgttttgaaaaacactgcaggtgctacaaaggtcatagcagctcaggcacagcaagctcacgtgcaggcacctcagattggggcgtggcgaaacagattgcatttcctagaaggcccccagcgatgtggattgaagcgcaagagtgaggagttggataatcatagcagcgcaatgcagattgtcgatgaattgtccatacttcctgcaatgttgcaaaccaacatgggaaatccagtgacagttgtgacagctaccacaggatcaaaacagaattgtaccactggagaaggtgactatcagttagtacagcatgaagtcttatgctccatgaaaaatacttacgaagtccttgattttcttggtcgaggcacgtttggccaggtagttaaatgctggaaaagagggacaaatgaaattgtagcaatcaaaattttgaagaatcatccttcttatgcccgtcaaggtcaaatagaagtgagcatattagcaaggctcagtactgaaaatgctgatgaatataactttgtacgagcttatgaatgctttcagcaccgtaaccatacttgtttagtctttgagatgctggaacaaaacttgtatgactttctgaaacaaaataaatttagtcccctgccactaaaagtgattcggcccattcttcaacaagtggccactgcactgaaaaaattgaaaagtcttggtttaattcatgctgatctcaagccagagaatattatgttggtggatcctgttcggcagccttacagggttaaagtaatagactttgggtcggccagtcatgtatcaaagactgtttgttcaacatatctacaatctcggtactacagagctccagagattatattggggttgccattttgtgaagccatagacatgtggtcattgggatgtgtgattgcagaattatttcttggatggccgctctacccaggagccttggagtatgatcagattcgatacatttctcagactcaaggtttgccaggagaacagttgttaaatgtgggtactaaatccacaagatttttttgcaaagaaacagatatgtctcattctggttggagattaaagacattggaagagcatgaggcagagacaggaatgaagtctaaagaagccagaaaatacattttcaacagtctggatgatgtagcgcatgtgaacacagtgatggatttggaaggaagtgatcttttggctgagaaagctgatagaagagaatttgttagtctgttgaagaaaatgttgctgattgatgcagatttaagaattactccagctgagaccctgaaccatccttttgttaatatgaaacatcttctagatttccctcatagcaaccatgtaaagtcctgttttcatattatggatatttgtaagtcccacctaaattcatgtgacacaaataatcacaacaaaacttcacttttaagaccagttgcttcaagcagtactgctacactgactgcaaattttactaaaatcggaacattaagaagtcaggcattgaccacatctgctcattcagttgtgcaccatggaatacctctgcaggcaggaactgctcagtttggttgtggtgatgcttttcagcagacattgattatctgtcccccagctattcaaggtattcctgcaacacatggtaaacccaccagttattcaataagggtagataatacagttccacttgtaactcaggccccagctgtgcagccactacagatccgaccaggagttctttctcagacgtggtctggtagaacacagcagatgctggtgcctgcctggcaacaggtgacacccctggctcctgctactactacactaacttctgagagtgtggctggttcacacaggcttggagactgggggaagatgatttcatgcagcaatcattataactcagtgatgccgcagcctcttctgaccaatcagataactttatctgcccctcagccagttagtgtggggattgcacatgttgtctggcctcagcctgccactaccaagaaaaataaacagtgccagaacagaggtattttggtaaaactaatggaatgggagccaggaagagaggaaataaatgctttcagttggagtaattcattacagaataccaatatcccacattcagcatttatttctccaaagataattaatgggaaagatgtcgaggaagtaagttgtatagaaacacaggacaatcagaactcagaaggagaggcaagaaattgctgtgaaacatctatcagacaggactctgattcatcagtttcagacaaacagcggcaaaccatcattattgccgactccccgagtcctgcagtgagtgtcatcactatcagcagtgacactgatgaggaagagacttcccagagacattcactcagagaatgtaaaggtagtctagattgtgaagcttgccagagcactttgaatattgatcggatgtgttcattaagtagtcctgatagtactctgagtaccagctcctcagggcagtccagcccatccccctgcaagagaccgaatagtatgtcagatgaagagcaagaaagtagttgtgatacggtggatggctctccgacatctgactcttccgggcatgacagtccatttgcagagagcacttttgtggaggacactcatgaaaacacagaattggtatcctctgctgacacagaaaccaagccagctgtctgttctgttgtggtgccaccagtggaactagaaaatggcttaaatgccgatgagcatatggcaaacacagattctatatgccagccattaataaaaggacgatctgcccctggaagattaaaccagccttctgcagtgggtactcgtcagcaaaaattgacatcagcattccagcagcagcatttgaacttcagtcaggttcagcactttggatctgggcatcaagagtggaatggaaactttgggcacagaagacagcaagcttatattcctactagtgttaccagtaatccattcactctttctcatggaagtcccaatcacacagcagtgcatgcccacctggctggaaatacacacctcggaggacagcctactctacttccatacccatcatcagccaccctcagtagtgctgcaccagtggcccacctgttagcctctccgtgtacctcaagacctatgttacagcatccaacttataatatctcccatcccagtggcatagttcaccaagtcccagtgggcttaaatccccgtctgttaccatccccaaccattcatcagactcagtacaaaccaatcttcccaccacattcttacattgcagcatcacctgcatatactggatttccactgagtccaacaaaactcagccagtatccatatatgtgaaaaacagtatattggggaagctcaatgatacaaacatttgattaaaaataaaaacatggtatttaatattagccatggcacaagaaaattatttttgaatcatgtagacttgggtgcaatttaaacaactttgagctttaaaaactcacttttgatgtgttttgcacatttggtataacttgtctttggtcatgttatcttcttatgtagtaactctagacaggtgacttatgggagcagaagtccagttttgctcctgctattttttataaattgccttctaactagtgcaagacacgtctacatttgggaagccattctgtgtacagacttagagcaacagatgcacatatgtcagaattacagcatacaagtgaattgtattatccgtgtcttagtgtataaatgttgggtcacttacctaagaaattgagctattgttctttacatttgcatgtgtcttttgcatgggcaaaatgttgcctagactttgctcttaaatgttgttctaataatctcagctgcattgtaaaccgttcctacacatagtgccttaaatatttgaggttgttaatgttattacctatatataaatgttgaggactgcagcacttaaaattcagacctactatttagtttccttttgatagcgtaatgttcatttttgtttttgtgtggtatgatttcaggtagtagctgtttttttccttattaagagggcagcatgtttgctatagctgaattctgctgtctgatttttcagaatgatctagcttcaagaaaagcaagcagttagtagtgcttaagaaaaattgattcagtatctaatggatagttgataactgtcacagcacagcattttatatactgttaagtgaaactgcaatacaatctaagtttattttgagagtgtttgctgtataattggacttaataaaatgtttagaggtacagtaggcatgactttgggtagataataaaatgcaaaatgctcattgattcatgatgtggttttatcttagcttgggcaaaccatgcagtatttaataaatagtagcagaacttttactattgaag

SEQ ID NO: 326279 - DNA, 3662 bp, Homo sapiens
  misc_feature (2)..(4): n is a, c, g, or t
  misc_feature (6)..(6): n is a, c, g, or t
  misc_feature (8)..(9): n is a, c, g, or t
gnnnangnntgcggccgcccgaagaggagagagcgcgggcctctaggaaggtatggcctcacaagtcttggtctacccaccatatgtttatcaaactcagtcaagtgccttttgtagtgtgaagaaactcaaagtagagccaagcagttgtgtattccaggaaagaaactatccacggacctatgtgaatggtagaaactttggaaattctcatcctcccactaagggtagtgcttttcagacaaagataccatttaatagacctcgaggacacaacttttcattgcagacaagtgctgttgttttgaaaaacactgcaggtgctacaaaggtcatagcagctcaggcacagcaagctcacgtgcaggcacctcagattggggcgtggcgaaacagattgcatttcctagaaggcccccagcgatgtggattgaagcgcaagagtgaggagttggataatcatagcagcgcaatgcagattgtcgatgaattgtccatacttcctgcaatgttgcaaaccaacatgggaaatccagtgacagttgtgacagctaccacaggatcaaaacagaattgtaccactggagaaggtgactatcagttagtacagcatgaagtcttatgctccatgaaaaatacttacgaagtccttgattttcttggtcgaggcacgtttggccaggtagttaaatgctggaaaagagggacaaatgaaattgtagcaatcaaaattttgaagaatcatccttcttatgcccgtcaaggtcaaatagaagtgagcatattagcaaggctcagtactgaaaatgctgatgaatataactttgtacgagcttatgaatgctttcagcaccgtaaccatacttgtttagtctttgagatgctggaacaaaacttgtatgactttctgaaacaaaataaatttagtcccctgccactaaaagtgattcggcccattcttcaacaagtggccactgcactgaaaaaattgaaaagtcttggtttaattcatgctgatctcaagccagagaatattatgttggtggatcctgttcggcagccttacagggttaaagtaatagactttgggtcggccagtcatgtatcaaagactgtttgttcaacatatctacaatctcggtactacagagctccagagattatattggggttgccattttgtgaagccatagacatgtggtcattgggatgtgtgattgcagaattatttcttggatggccgctctacccaggagccttggagtatgatcagattcgatacatttctcagactcaaggtttgccaggagaacagttgttaaatgtgggtactaaatccacaagatttttttgcaaagaaacagatatgtctcattctggttggagattaaagacattggaagagcatgaggcagagacaggaatgaagtctaaagaagccagaaaatacattttcaacagtctggatgatgtagcgcatgtgaacacagtgatggatttggaaggaagtgatcttttggctgagaaagctgatagaagagaatttgttagtctgttgaagaaaatgttgctgattgatgcagatttaagaattactccagctgagaccctgaaccatccttttgttaatatgaaacatcttctagatttccctcatagcaaccatgtaaagtcctgttttcatattatggatatttgtaagtcccacctaaattcatgtgacacaaataatcacaacaaaacttcacttttaagaccagttgcttcaagcagtactgctacactgactgcaaattttactaaaatcggaacattaagaagtcaggcattgaccacatctgctcattcagttgtgcaccatggaatacctctgcaggcaggaactgctcagtttggttgtggtgatgcttttcagcagacattgattatctgtcccccagctattcaaggtattcctgcaacacatggtaaacccaccagttattcaataagggtagataatacagttccacttgtaactcaggccccagctgtgcagccactacagatccgaccaggagttctttctcagacgtggtctggtagaacacagcagatgctggtgcctgcctggcaacaggtgacacccctggctcctgctactactacactaacttctgagagtgtggctggttcacacaggcttggagactgggggaagatgatttcatgcagcaatcattataactcagtgatgccgcagcctcttctgaccaatcagataactttatctgcccctcagccagttagtgtggggattgcacatgttgtctggcctcagcctgccactaccaagaaaaataaacagtgccagaacaggagtaattcattacagaataccaatatcccacattcagcatttatttctccaaagataattaatgggaaagatgtcgaggaagtaagttgtatagaaacacaggacaatcagaactcagaaggagaggcaagaaattgctgtgaaacatctatcagacaggactctgattcatcagtttcagacaaacagcggcaaaccatcattattgccgactccccgagtcctgcagtgagtgtcatcactatcagcagtgacactgatgaggaagagacttcccagagacattcactcagagaatgtaaaggtagtctagattgtgaagcttgccagagcactttgaatattgatcggatgtgttcattaagtagtcctgatagtactctgagtaccagctcctcagggcagtccagcccatccccctgcaagagaccgaatagtatgtcagatgaagagcaagaaagtagttgtgatacggtggatggctctccgacatctgactcttccgggcatgacagtccatttgcagagagcacttttgtggaggacactcatgaaaacacagaattggtatcctctgctgacacagaaaccaagccagctgtctgttctgttgtggtgccaccagtggaactagaaaatggcttaaatgccgatgagcatatggcaaacacagattctatatgccagccattaataaaaggacgatctgcccctggaagattaaaccagccttctgcagtgggtactcgtcagcaaaaattgacatcagcattccagcagcagcatttgaacttcagtcaggttcagcactttggatctgggcatcaagagtggaatggaaactttgggcacagaagacagcaagcttatattcctactagtgttaccagtaatccattcactctttctcatggaagtcccaatcacacagcagtgcatgcccacctggctggaaatacacacctcggaggacagcctactctacttccatacccatcatcagccaccctcagtagtgctgcaccagtggcccacctgttagcctctccgtgtacctcaagacctatgttacagctattagggaggctgaggcagaagaactgcttgaaccaagggagcaccccaatttctgccatcgggtgattgacttcactgtgcctggctgatttttattcttttagttaaggctggttgatattaccttgtgtgtatataccacatgttgtttatccattgttgttgatggacatgtgggtggtttcaccttttggctattgtgaataaagctgctatgaacactgtg

SEQ ID NO: 326280 - DNA, 3329 bp, Homo sapiens
  misc_feature (1)..(1): n is a, c, g, or t
ngcttgaatttgcaactgaatgggatgtattcaaaacatctacagagaaatgagcaaattcttgaatttgcaactgaatggatgatgtagcgcatgtgaacacagtgatggatttggaaggaagtgatcttttggctgagaaagctgatagaagagaatttgttagtctgttgaagaaaatgttgctgattgatgcagatttaagaattactccagctgagaccctgaaccatccttttgttaatatgaaacatcttctagatttccctcatagcaaccatgtaaagtcctgttttcatattatggatatttgtaagtcccacctaaattcatgtgacacaaataatcacaacaaaacttcacttttaagaccagttgcttcaagcagtactgctacactgactgcaaattttactaaaatcggaacattaagaagtcaggcattgaccacatctgctcattcagttgtgcaccatggaatacctctgcaggcaggaactgctcagtttggttgtggtgatgcttttcagcagacattgattatctgtcccccagctattcaaggtattcctgcaacacatggtaaacccaccagttattcaataagggtagataatacagttccacttgtaactcaggccccagctgtgcagccactacagatccgaccaggagttctttctcagacgtggtctggtagaacacagcagatgctggtgcctgcctggcaacaggtgacacccctggctcctgctactactacactaacttctgagagtgtggctggttcacacaggcttggagactgggggaagatgatttcatgcagcaatcattataactcagtgatgccgcagcctcttctgaccaatcagataactttatctgcccctcagccagttagtgtggggattgcacatgttgtctggcctcagcctgccactaccaagaaaaataaacagtgccagaacaggagtaattcattacagaataccaatatcccacattcagcatttatttctccaaagataattaatgggaaagatgtcgaggaagtaagttgtatagaaacacaggacaatcagaactcagaaggagaggcaagaaattgctgtgaaacatctatcagacaggactctgattcatcagtttcagacaaacagcggcaaaccatcattattgccgactccccgagtcctgcagtgagtgtcatcactatcagcagtgacactgatgaggaagagacttcccagagacattcactcagagaatgtaaaggtagtctagattgtgaagcttgccagagcactttgaatattgatcggatgtgttcattaagtagtcctgatagtactctgagtaccagctcctcagggcagtccagcccatccccctgcaagagaccgaatagtatgtcagatgaagagcaagaaagtagttgtgatacggtggatggctctccgacatctgactcttccgggcatgacagtccatttgcagagagcacttttgtggaggacactcatgaaaacacagaattggtatcctctgctgacacagaaaccaagccagctgtctgttctgttgtggtgccaccagtggaactagaaaatggcttaaatgccgatgagcatatggcaaacacagattctatatgccagccattaataaaaggacgatctgcccctggaagattaaaccagccttctgcagtgggtactcgtcagcaaaaattgacatcagcattccagcagcagcatttgaacttcagtcaggttcagcactttggatctgggcatcaagagtggaatggaaactttgggcacagaagacagcaagcttatattcctactagtgttaccagtaatccattcactctttctcatggaagtcccaatcacacagcagtgcatgcccacctggctggaaatacacacctcggaggacagcctactctacttccatacccatcatcagccaccctcagtagtgctgcaccagtggcccacctgttagcctctccgtgtacctcaagacctatgttacagcatccaacttataatatctcccatcccagtggcatagttcaccaagtcccagtgggcttaaatccccgtctgttaccatccccaaccattcatcagactcagtacaaaccaatcttcccaccacattcttacattgcagcatcacctgcatatactggatttccactgagtccaacaaaactcagccagtatccatatatgtgaaaaacagtatattggggaagctcaatgatacaaacatttgattaaaaataaaaacatggtatttaatattagccatggcacaagaaaattatttttgaatcatgtagacttgggtgcaatttaaacaactttgagctttaaaaactcacttttgatgtgttttgcacatttggtataacttgtctttggtcatgttatcttcttatgtagtaactctagacaggtgacttatgggagcagaagtccagttttgctcctgctattttttataaattgccttctaactagtgcaagacacgtctacatttgggaagccattctgtgtacagacttagagcaacagatgcacatatgtcagaattacagcatacaagtgaattgtattatccgtgtcttagtgtataaatgttgggtcacttacctaagaaattgagctattgttctttacatttgcatgtgtcttttgcatgggcaaaatgttgcctagactttgctcttaaatgttgttctaataatctcagctgcattgtaaaccgttcctacacatagtgccttaaatatttgaggttgttaatgttattacctatatataaatgttgaggactgcagcacttaaaattcagacctactatttagtttccttttgatagcgtaatgttcatttttgtttttgtgtggtatgatttcaggtagtagctgtttttttccttattaagagggcagcatgtttgctatagctgaattctgctgtctgatttttcagaatgatctagcttcaagaaaagcaagcagttagtagtgcttaagaaaaattgattcagtatctaatggatagttgataactgtcacagcacagcattttatatactgttaagtgaaactgcaatacaatctaagtttattttgagagtgtttgctgtataattggacttaataaaatgtttagaggtacagtaggcatgactttgggtagataataaaatgcaaaatgctcattgattcatgatgtggttttatcttagcttgggcaaaccatgcagtatttaataaatagtagcagaacttttactattgaag

SEQ ID NO: 326281 - DNA, 4318 bp, Homo sapiens
gcgggaaggtgcgggttgttggctgaggcaagccgtggctcgggcgacgcggggccaggagggcaggaccgtctgccggcgacagcccataccgtctgccgttgcgcgacacgaaccaccctccgatccgccatccccgcgtcgtcgccgctagtccgcccgcccgccctcgggccccccgctgccgagcccgacctcctaagagctgaaagaaattattgagagtcatagtccatagccccctgcttcgtcccccaaccctcaacgacgaaaaggacttcggtcccctggcccggcgacgcccgggaaggaaaggagagcgacctccgccccgcgctcaggccaccctggagggagaagccgccccgcggccggtagagcgccccgccgccgcggagacccgaagccgcctggagcccaaggctgtacacgtgccctgtgctgattctctgcctaggaaaggaccatgcagctagagatcaaagtggccctgaacttcatcatctcctacttgtacaacaagctgccccggcgccgggcagacctgtttggggaggagctagagcggcttttgaaaaagaaatatgaaggccactggtaccctgagaagccactgaaaggctctggcttccgctgtgttcacattggggagatggtggaccccgtggtggagctggccgccaagcggagtggcctggcagtggaagatgtgcgggccaatgtgcctgaggagctgagtgtctggattgatccctttgaggtgtcctaccagattggtgagaagggagctgtgaaagtgctgtacctggatgacagtgagggttgcggtgccccagagctggacaaggagatcaagagcagcttcaaccctgacgcccaggtgttcgtgcccattggcagccaggacagctccctgtccaactccccatcgccatcctttggccagtcacccagccctaccttcattccccgctccgctcagcccatcaccttcaccaccgcctccttcgctgccaccaaatttggctccactaagatgaagaaggggggcggggcagcaagtggtgggggtgtagccagcagtggggcgggtggccagcagccaccacagcagcctcgcatggcccgctcacccaccaacagcctgctgaagcacaagagcctctctctgtctatgcattcactgaacttcatcacggccaacccggcccctcagtcccagctctcacccaatgccaaggagttcgtgtacaacggtggtggctcacccagcctcttctttgatgcggccgatggccagggcagcggcaccccaggcccgtttggaggcagtggggctggcacctgcaacagcagcagctttgacatggcccaggtatttggaggtggtgccaacagcctcttcctggagaagacaccctttgtggaaggcctcagctacaacctgaacaccatgcagtatcccagccagcagttccagcccgtggtgctggccaactgaccatctacctgcccgtggggccaggagcacccaagaccacagaaaagagaaaggaaaggccaaaaaaaagaggaaaagaaaaatgtacaaaaagattttcgatcttctcactcttacttctagaaaaaagatccagcccaggcacggaatgggagggccctgcaaagcacccaagtgtgtttcactcaccccttaccgctcgcccaccggcctgtgatttatttggttggtttgggttttatatttctttttcttttttttttttcttacatgtagttttctatataacatctttaatgagtggcttcctgtgctaagaatggtccagatgtgaactgctgctccctgctcctcccttcctccttcacactcctagtttaggattgatgtgtccaagctcatagggaagaaagagctgcagctggagcctgaccctccctggaacagggagaggctggcccgtgtcactgcctctgtcacccagctatcctcgcactcaaagccatccaacctcagcaggccttctcgggccctgccacctgaataggtctgaccccagtccccactccctttcaggctgggccacagggagttgctggctggccacttgacaccctccccctggagctgatgtctgtgactacagggagattagcacttcgtctagtgaaactcctttcatctctgtcctatggccccaccccaccattccctctaggcccagaccatcatcatggccctggccattgatgtgtatgggctttctttccctcatgcagccccttcttccccaggctggatgttgtgggtagggaggggtgtgtgtgtgtgtatttggtttgctgtccttttttaaaggattccaagccatgtgaaacttcccttctggatgtgattctgggtcgcaagtccttatttatatgtgaggctggggaatgggctgggggtattggcagtccttttgcagggcagtgtgtgtggtggggtgacaccgctgtggcttagcccaagacactcccagaggaaaacactgcagaaggaactggtttgcagactgtggaaggatctgcagttttgtttttgaccaaaaaaataataataagttagctctgaagggcagagggaatacccaagcccctgatgcctatgagaagtccctggacttcaaccctcctgttgtttggccttagcccagagggagctgctcacctgagcacccttgggggtgggcagagaggcagggtgggattttagagttagtgtctgtgcgggggcagccctgagcctggagttgagactttggggtctcttagtttggaggtgttgagtgcatttgtgcccctgcctggttgagagcttcttggtacctcttgccaccccttctcactgccctgacccaaccccactggaccttgatgctgcgaggagtggtgtcctgacggactcagcactcccgcctgatgtattggatcataggagagcacttgctctcctgcctctgccaggagagggcttgttcctccaactctaggaggccaggcaagcatggacaggagccaagggagcagggtcattaactttttcttctttgcaaagtgggcacttggcatcagggtcccaatcaccagaaagcaccaaagcccctggcaccccacccactccatcctacccagggaccccaagtaggcaactgttatggcagtgggtccagcccaggccagcactgccagcctcctctccctgcagtaggcaccagctctacctcccccggcaggcaatgtcctggcttctcagcccagcaccatctgttcccctagacttctcaggggccagcccagtctgggccaccctttgtttccctcatcctcggctcccacacaggtgacagacccagcagatagcttctctctgggaaaggttggatgctgccttacatccccttctagccctcctcccatccacacacacaggcacccacccacaccaggtcggcttgtttctcacatgtagggagagaggggagaccaacccctttgtgtcttttgaaatacgaagaaaaatgtgtgttcaggagcatgactccagtgctgcgctcttgggcctagttcagtctgtcttgtctcaaatctaggcatttttgcttcaattttattttttttaagaatacaaaaacagaaatctgcactaatttacctggtttcgtaggaaaacttttttttattttttacattttttggtgtccgtttgtattgaataatttgctacatttgtaaaatgtaagaggtatataatatatgtatatttctaacgtaaaaaacataatttttttcttttcaagattttttcttaaaaagatgagagaaacatattttttcaggaaaaacaaactttaaaaaaaaaagaggagaaataaaaccttttctcccctttccccatcctctatctatccctctttcccaggaacaaatcaaaaggtggattatcttctgaagaatggaaactgttagtccagaatgatgtctttttctcaatgcagtgagttatagattctctagttttctccctagggatgggaagggggcattgaggcaagcctggagaggagcccggggagcagggtcatgaacttttttctttagtgaaggaggaatacaatcaagggttttgtattcagaatgttgtgcaatattttggaatgggacattggtgtgtttagagattttagtttaaaaacaaaacaaaaagattgatcaaatctgtacagtttctattgttccagatttttttaagtttgtattaaaagcatgatacataata

SEQ ID NO: 326282 - DNA, 3864 bp, Homo sapiens
ttcatgatggcctcatgttactaatgaggaaactggggcccacagtcagacatgagccactggtgggacagaaataggctcctggttctgtgtgatccaaagttggtgcttttctgtctatccctagctgttggtcaccaccagctttctgcatattttctcacggtgcctctcatttcccagagccgcctggagcccaaggctgtacacgtgccctgtgctgattctctgcctaggaaaggaccatgcagctagagatcaaagtggccctgaacttcatcatctcctacttgtacaacaagctgccccggcgccgggcagacctgtttggggaggagctagagcggcttttgaaaaagaaatatgaaggccactggtaccctgagaagccactgaaaggctctggcttccgctgtgttcacattggggagatggtggaccccgtggtggagctggccgccaagcggagtggcctggcagtggaagatgtgcgggccaatgtgcctgaggagctgagtgtctggattgatccctttgaggtgtcctaccagattggtgagaagggagctgtgaaagtgctgtacctggatgacagtgagggttgcggtgccccagagctggacaaggagatcaagagcagcttcaaccctgacgcccaggtgttcgtgcccattggcagccaggacagctccctgtccaactccccatcgccatcctttggccagtcacccagccctaccttcattccccgctccgctcagcccatcaccttcaccaccgcctccttcgctgccaccaaatttggctccactaagatgaagaaggggggcggggcagcaagtggtgggggtgtagccagcagtggggcgggtggccagcagccaccacagcagcctcgcatggcccgctcacccaccaacagcctgctgaagcacaagagcctctctctgtctatgcattcactgaacttcatcacggccaacccggcccctcagtcccagctctcacccaatgccaaggagttcgtgtacaacggtggtggctcacccagcctcttctttgatgcggccgatggccagggcagcggcaccccaggcccgtttggaggcagtggggctggcacctgcaacagcagcagctttgacatggcccaggtatttggaggtggtgccaacagcctcttcctggagaagacaccctttgtggaaggcctcagctacaacctgaacaccatgcagtatcccagccagcagttccagcccgtggtgctggccaactgaccatctacctgcccgtggggccaggagcacccaagaccacagaaaagagaaaggaaaggccaaaaaaaagaggaaaagaaaaatgtacaaaaagattttcgatcttctcactcttacttctagaaaaaagatccagcccaggcacggaatgggagggccctgcaaagcacccaagtgtgtttcactcaccccttaccgctcgcccaccggcctgtgatttatttggttggtttgggttttatatttctttttcttttttttttttcttacatgtagttttctatataacatctttaatgagtggcttcctgtgctaagaatggtccagatgtgaactgctgctccctgctcctcccttcctccttcacactcctagtttaggattgatgtgtccaagctcatagggaagaaagagctgcagctggagcctgaccctccctggaacagggagaggctggcccgtgtcactgcctctgtcacccagctatcctcgcactcaaagccatccaacctcagcaggccttctcgggccctgccacctgaataggtctgaccccagtccccactccctttcaggctgggccacagggagttgctggctggccacttgacaccctccccctggagctgatgtctgtgactacagggagattagcacttcgtctagtgaaactcctttcatctctgtcctatggccccaccccaccattccctctaggcccagaccatcatcatggccctggccattgatgtgtatgggctttctttccctcatgcagccccttcttccccaggctggatgttgtgggtagggaggggtgtgtgtgtgtgtatttggtttgctgtccttttttaaaggattccaagccatgtgaaacttcccttctggatgtgattctgggtcgcaagtccttatttatatgtgaggctggggaatgggctgggggtattggcagtccttttgcagggcagtgtgtgtggtggggtgacaccgctgtggcttagcccaagacactcccagaggaaaacactgcagaaggaactggtttgcagactgtggaaggatctgcagttttgtttttgaccaaaaaaataataataagttagctctgaagggcagagggaatacccaagcccctgatgcctatgagaagtccctggacttcaaccctcctgttgtttggccttagcccagagggagctgctcacctgagcacccttgggggtgggcagagaggcagggtgggattttagagttagtgtctgtgcgggggcagccctgagcctggagttgagactttggggtctcttagtttggaggtgttgagtgcatttgtgcccctgcctggttgagagcttcttggtacctcttgccaccccttctcactgccctgacccaaccccactggaccttgatgctgcgaggagtggtgtcctgacggactcagcactcccgcctgatgtattggatcataggagagcacttgctctcctgcctctcctctccctgcagtaggcaccagctctacctcccccggcaggcaatgtcctggcttctcagcccagcaccatctgttcccctagacttctcaggggccagcccagtctgggccaccctttgtttccctcatcctcggctcccacacaggtgacagacccagcagatagcttctctctgggaaaggttggatgctgccttacatccccttctagccctcctcccatccacacacacaggcacccacccacaccaggtcggcttgtttctcacatgtagggagagaggggagaccaacccctttgtgtcttttgaaatacgaagaaaaatgtgtgttcaggagcatgactccagtgctgcgctcttgggcctagttcagtctgtcttgtctcaaatctaggcatttttgcttcaattttattttttttaagaatacaaaaacagaaatctgcactaatttacctggtttcgtaggaaaacttttttttattttttacattttttggtgtccgtttgtattgaataatttgctacatttgtaaaatgtaagaggtatataatatatgtatatttctaacgtaaaaaacataatttttttcttttcaagattttttcttaaaaagatgagagaaacatattttttcaggaaaaacaaactttaaaaaaaaaagaggagaaataaaaccttttctcccctttccccatcctctatctatccctctttcccaggaacaaatcaaaaggtggattatcttctgaagaatggaaactgttagtccagaatgatgtctttttctcaatgcagtgagttatagattctctagttttctccctagggatgggaagggggcattgaggcaagcctggagaggagcccggggagcagggtcatgaacttttttctttagtgaaggaggaatacaatcaagggttttgtattcagaatgttgtgcaatattttggaatgggacattggtgtgtttagagattttagtttaaaaacaaaacaaaaagattgatcaaatctgtacagtttctattgttccagatttttttaagtttgtattaaaagcatgatacataata

SEQ ID NO: 326283 - DNA, 4198 bp, Homo sapiens
  misc_feature (3657)..(3657): n is a, c, g, or t
ttcatgatggcctcatgttactaatgaggaaactggggcccacagtcagacatgagccactggtgggacagaaataggctcctggttctgtgtgatccaaagttggtgcttttctgtctatccctagctgttggtcaccaccagctttctgcatattttctcacggtgcctctcatttcccagagccgcctggagcccaaggctgtacacgtgccctgtgctgattctctgcctaggaaaggaccatgcagctagagatcaaagtggccctgaacttcatcatctcctacttgtacaacaagctgccccggcgccgggcagacctgtttggggaggagctagagcggcttttgaaaaagaaatatgaaggccactggtaccctgagaagccactgaaaggctctggcttccgctgtgttcacattggggagatggtggaccccgtggtggagctggccgccaagcggagtggcctggcagtggaagatgtgcgggccaatgtgcctgaggagctgagtgtctggattgatccctttgaggtgtcctaccagattggtgagaagggagctgtgaaagtgctgtacctggatgacagtgagggttgcggtgccccagagctggacaaggagatcaagagcagcttcaaccctgacgcccaggtgttcgtgcccattggcagccaggacagctccctgtccaactccccatcgccatcctttggccagtcacccagccctaccttcattccccgctccgctcagcccatcaccttcaccaccgcctccttcgctgccaccaaatttggctccactaagatgaagaaggggggcggggcagcaagtggtgggggtgtagccagcagtggggcgggtggccagcagccaccacagcagcctcgcatggcccgctcacccaccaacagcctgctgaagcacaagagcctctctctgtctatgcattcactgaacttcatcacggccaacccggcccctcagtcccagctctcacccaatgccaaggagttcgtgtacaacggtggtggctcacccagcctcttctttgatgcggccgatggccagggcagcggcaccccaggcccgtttggaggcagtggggctggcacctgcaacagcagcagctttgacatggcccaggtatttggaggtggtgccaacagcctcttcctggagaagacaccctttgtggaaggcctcagctacaacctgaacaccatgcagtatcccagccagcagttccagcccgtggtgctggccaactgaccatctacctgcccgtggggccaggagcacccaagaccacagaaaagagaaaggaaaggccaaaaaaaagaggaaaagaaaaatgtacaaaaagattttcgatcttctcactcttacttctagaaaaaagatccagcccaggcacggaatgggagggccctgcaaagcacccaagtgtgtttcactcaccccttaccgctcgcccaccggcctgtgatttatttggttggtttgggttttatatttctttttcttttttttttttcttacatgtagttttctatataacatctttaatgagtggcttcctgtgctaagaatggtccagatgtgaactgctgctccctgctcctcccttcctccttcacactcctagtttaggattgatgtgtccaagctcatagggaagaaagagctgcagctggagcctgaccctccctggaacagggagaggctggcccgtgtcactgcctctgtcacccagctatcctcgcactcaaagccatccaacctcagcaggccttctcgggccctgccacctgaataggtctgaccccagtccccactccctttcaggctgggccacagggagttgctggctggccacttgacaccctccccctggagctgatgtctgtgactacagggagattagcacttcgtctagtgaaactcctttcatctctgtcctatggccccaccccaccattccctctaggcccagaccatcatcatggccctggccattgatgtgtatgggctttctttccctcatgcagccccttcttccccaggctggatgttgtgggtagggaggggtgtgtgtgtgtgtatttggtttgctgtccttttttaaaggattccaagccatgtgaaacttcccttctggatgtgattctgggtcgcaagtccttatttatatgtgaggctggggaatgggctgggggtattggcagtccttttgcagggcagtgtgtgtggtggggtgacaccgctgtggcttagcccaagacactcccagaggaaaacactgcagaaggaactggtttgcagactgtggaaggatctgcagttttgtttttgaccaaaaaaataataataagttagctctgaagggcagagggaatacccaagcccctgatgcctatgagaagtccctggacttcaaccctcctgttgtttggccttagcccagagggagctgctcacctgagcacccttgggggtgggcagagaggcagggtgggattttagagttagtgtctgtgcgggggcagccctgagcctggagttgagactttggggtctcttagtttggaggtgttgagtgcatttgtgcccctgcctggttgagagcttcttggtacctcttgccaccccttctcactgccctgacccaaccccactggaccttgatgctgcgaggagtggtgtcctgacggactcagcactcccgcctgatgtattggatcataggagagcacttgctctcctgcctctgccaggagagggcttgttcctccaactctaggaggccaggcaagcatggacaggagccaagggagcagggtcattaactttttcttctttgcaaagtgggcacttggcatcagggtcccaatcaccagaaagcaccaaagcccctggcaccccacccactccatcctacccagggaccccaagtaggcaactgttatggcagtgggtccagcccaggccagcactgccagcctcctctccctgcagtaggcaccagctctacctcccccggcaggcaatgtcctggcttctcagcccagcaccatctgttcccctagacttctcaggggccagcccagtctgggccaccctttgtttccctcatcctcggctcccacacaggtgacagacccagcagatagcttctctctgggaaaggttggatgctgccttacatccccttctagccctcctcccatccacacacacaggcacccacccacaccaggtcggcttgtttctcacatgtagggagagaggggagaccaacccctttgtgtcttttgaaatacgaagaaaaatgtgtgttcaggagcatgactccagtgctgcgctcttgggcctagttcagtctgtcttgtctcaaatctaggcatttttgcttcaattttattttttttaagaatacaaaaacagaaatctgcactaatttacctggtttcgtaggaaaacttttttttattttttacattttttggtgtccgtttgtattgaataatttgctacatttgtaaaatgtaagaggtatataatatatgtatatttctaacgtaaaaaacataatttttttctgctttttctcggggtctgtgacaccgtaaaagtagccatcttgganccgggaggggggggggagggggaggggaggaagggagggaaagggggagagggggagggggggggggggggggggaagatgagagaaacatattttttcaggaaaaacaaactttaaaaaaaaaagaggagaaataaaaccttttctcccctttccccatcctctatctatccctctttcccaggaacaaatcaaaaggtggattatcttctgaagaatggaaactgttagtccagaatgatgtctttttctcaatgcagtgagttatagattctctagttttctccctagggatgggaagggggcattgaggcaagcctggagaggagcccggggagcagggtcatgaacttttttctttagtgaaggaggaatacaatcaagggttttgtattcagaatgttgtgcaatattttggaatgggacattggtgtgtttagagattttagtttaaaaacaaaacaaaaagattgatcaaatctgtacagtttctattgttccagatttttttaagtttgtattaaaagcatgatacataata

SEQ ID NO: 326284 - DNA, 1563 bp, Homo sapiens
tgacgaaaaatcagaataggtgtggtatagaatggggtctcctcctccggggggtcgaagaaggtggtgttgagtgcatttgtgcccctgcctggttgagagcttcttggtacctcttgccaccccttctcactgccctgacccaaccccactggaccttgatgctgcgaggagtggtgtcctgacggactcagcactcccgcctgatgtattggatcataggagagcacttgctctcctgcctctgccaggagagggcttgttcctccaactctaggaggccaggcaagcatggacaggagccaagggagcagggtcattaactttttcttctttgcaaagtgggcacttggcatcagggtcccaatcaccagaaagcaccaaagcccctggcaccccacccactccatcctacccagggaccccaagtaggcaactgttatggcagtgggtccagcccaggccagcactgccagcctcctctccctgcagtaggcaccagctctacctcccccggcaggcaatgtcctggcttctcagcccagcaccatctgttcccctagacttctcaggggccagcccagtctgggccaccctttgtttccctcatcctcggctcccacacaggtgacagacccagcagatagcttctctctgggaaaggttggatgctgccttacatccccttctagccctcctcccatccacacacacaggcacccacccacaccaggtcggcttgtttctcacatgtagggagagaggggagaccaacccctttgtgtcttttgaaatacgaagaaaaatgtgtgttcaggagcatgactccagtgctgcgctcttgggcctagttcagtctgtcttgtctcaaatctaggcatttttgcttcaattttattttttttaagaatacaaaaacagaaatctgcactaatttacctggtttcgtaggaaaacttttttttattttttacattttttggtgtccgtttgtattgaataatttgctacatttgtaaaatgtaagaggtatataatatatgtatatttctaacgtaaaaaacataatttttttcttttcaagattttttcttaaaaagatgagagaaacatattttttcaggaaaaacaaactttaaaaaaaaaagaggagaaataaaaccttttctcccctttccccatcctctatctatccctctttcccaggaacaaatcaaaaggtggattatcttctgaagaatggaaactgttagtccagaatgatgtctttttctcaatgcagtgagttatagattctctagttttctccctagggatgggaagggggcattgaggcaagcctggagaggagcccggggagcagggtcatgaacttttttctttagtgaaggaggaatacaatcaagggttttgtattcagaatgttgtgcaatattttggaatgggacattggtgtgtttagagattttagtttaaaaacaaaacaaaaagattgatcaaatctgtacagtttctattgttccagatttttttaagtttgtattaaaagcatgatacataata

SEQ ID NO: 326285 - DNA, 1670 bp, Homo sapiens
gcgggaaggtgcgggttgttggctgaggcaagccgtggctcgggcgacgcggggccaggagggcaggaccgtctgccggcgacagcccataccgtctgccgttgcgcgacacgaaccaccctccgatccgccatccccgcgtcgtcgccgctagtccgcccgcccgccctcgggccccccgctgccgagcccgacctcctaagagctgaaagaaattattgagagtcatagtccatagccccctgcttcgtcccccaaccctcaacgacgaaaaggacttcggtcccctggcccggcgacgcccgggaaggaaaggagagcgacctccgccccgcgctcaggccaccctggagggagaagccgccccgcggccggtagagcgccccgccgccgcggagacccgaagccgcctggagcccaaggctgtacacgtgccctgtgctgattctctgcctaggaaaggaccatgcagctagagatcaaagtggccctgaacttcatcatctcctacttgtacaacaagctgccccggcgccgggcagacctgtttggggaggagctagagcggcttttgaaaaagaaatatgaaggccactggtaccctgagaagccactgaaaggctctggcttccgctgtgttcacattggggagatggtggaccccgtggtggagctggccgccaagcggagtggcctggcagtggaagatgtgcgggccaatgtgcctgaggagctgagtgtctggattgatccctttgaggtgtcctaccagattggtgagaagggagctgtgaaagtgctgtacctggatgacagtgagggttgcggtgccccagagctggacaaggagatcaagagcagcttcaaccctgacgcccaggtgttcgtgcccattggcagccaggacagctccctgtccaactccccatcgccatcctttggccagtcacccagccctaccttcattccccgctccgctcagcccatcaccttcaccaccgcctccttcgctgccaccaaatttggctccactaagatgaagaaggggggcggggcagcaagtggtgggggtgtagccagcagtggggcgggtggccagcagccaccacagcagcctcgcatggcccgctcacccaccaacagcctgctgaagcacaagagcctctctctgtctatgcattcactgaacttcatcacggccaacccggcccctcagtcccagctctcacccaatgccaaggagttcgtgtacaacggtggtggctcacccagcctcttctttgatgcggccgatggccagggcagcggcaccccaggcccgtttggaggcagtggggctggcacctgcaacagcagcagctttgacatggcccaggtatttggaggtggtgccaacagcctcttcctggagaagacaccctttgtggaagggggcattgaggcaagcctggagaggagcccggggagcagggtcatgaacttttttctttagtgaaggaggaatacaatcaagggttttgtattcagaatgttgtgcaatattttggaatgggacattggtgtgtttagagattttagtttaaaaacaaaacaaaaagattgatcaaatctgtacagtttctattgttccagatttttttaagtttgtattaaaagcatgatacataata

SEQ ID NO: 326286 - DNA, 4097 bp, Homo sapiens
ttcatgatggcctcatgttactaatgaggaaactggggcccacagtcagacatgagccactggtgggacagaaataggctcctggttctgtgtgatccaaagttggtgcttttctgtctatccctagctgttggtcaccaccagctttctgcatattttctcacggtgcctctcatttcccagagccgcctggagcccaaggctgtacacgtgccctgtgctgattctctgcctaggaaaggaccatgcagctagagatcaaagtggccctgaacttcatcatctcctacttgtacaacaagctgccccggcgccgggcagacctgtttggggaggagctagagcggcttttgaaaaagaaatatgaaggccactggtaccctgagaagccactgaaaggctctggcttccgctgtgttcacattggggagatggtggaccccgtggtggagctggccgccaagcggagtggcctggcagtggaagatgtgcgggccaatgtgcctgaggagctgagtgtctggattgatccctttgaggtgtcctaccagattggtgagaagggagctgtgaaagtgctgtacctggatgacagtgagggttgcggtgccccagagctggacaaggagatcaagagcagcttcaaccctgacgcccaggtgttcgtgcccattggcagccaggacagctccctgtccaactccccatcgccatcctttggccagtcacccagccctaccttcattccccgctccgctcagcccatcaccttcaccaccgcctccttcgctgccaccaaatttggctccactaagatgaagaaggggggcggggcagcaagtggtgggggtgtagccagcagtggggcgggtggccagcagccaccacagcagcctcgcatggcccgctcacccaccaacagcctgctgaagcacaagagcctctctctgtctatgcattcactgaacttcatcacggccaacccggcccctcagtcccagctctcacccaatgccaaggagttcgtgtacaacggtggtggctcacccagcctcttctttgatgcggccgatggccagggcagcggcaccccaggcccgtttggaggcagtggggctggcacctgcaacagcagcagctttgacatggcccaggtatttggaggtggtgccaacagcctcttcctggagaagacaccctttgtggaaggcctcagctacaacctgaacaccatgcagtatcccagccagcagttccagcccgtggtgctggccaactgaccatctacctgcccgtggggccaggagcacccaagaccacagaaaagagaaaggaaaggccaaaaaaaagaggaaaagaaaaatgtacaaaaagattttcgatcttctcactcttacttctagaaaaaagatccagcccaggcacggaatgggagggccctgcaaagcacccaagtgtgtttcactcaccccttaccgctcgcccaccggcctgtgatttatttggttggtttgggttttatatttctttttcttttttttttttcttacatgtagttttctatataacatctttaatgagtggcttcctgtgctaagaatggtccagatgtgaactgctgctccctgctcctcccttcctccttcacactcctagtttaggattgatgtgtccaagctcatagggaagaaagagctgcagctggagcctgaccctccctggaacagggagaggctggcccgtgtcactgcctctgtcacccagctatcctcgcactcaaagccatccaacctcagcaggccttctcgggccctgccacctgaataggtctgaccccagtccccactccctttcaggctgggccacagggagttgctggctggccacttgacaccctccccctggagctgatgtctgtgactacagggagattagcacttcgtctagtgaaactcctttcatctctgtcctatggccccaccccaccattccctctaggcccagaccatcatcatggccctggccattgatgtgtatgggctttctttccctcatgcagccccttcttccccaggctggatgttgtgggtagggaggggtgtgtgtgtgtgtatttggtttgctgtccttttttaaaggattccaagccatgtgaaacttcccttctggatgtgattctgggtcgcaagtccttatttatatgtgaggctggggaatgggctgggggtattggcagtccttttgcagggcagtgtgtgtggtggggtgacaccgctgtggcttagcccaagacactcccagaggaaaacactgcagaaggaactggtttgcagactgtggaaggatctgcagttttgtttttgaccaaaaaaataataataagttagctctgaagggcagagggaatacccaagcccctgatgcctatgagaagtccctggacttcaaccctcctgttgtttggccttagcccagagggagctgctcacctgagcacccttgggggtgggcagagaggcagggtgggattttagagttagtgtctgtgcgggggcagccctgagcctggagttgagactttggggtctcttagtttggaggtgttgagtgcatttgtgcccctgcctggttgagagcttcttggtacctcttgccaccccttctcactgccctgacccaaccccactggaccttgatgctgcgaggagtggtgtcctgacggactcagcactcccgcctgatgtattggatcataggagagcacttgctctcctgcctctgccaggagagggcttgttcctccaactctaggaggccaggcaagcatggacaggagccaagggagcagggtcattaactttttcttctttgcaaagtgggcacttggcatcagggtcccaatcaccagaaagcaccaaagcccctggcaccccacccactccatcctacccagggaccccaagtaggcaactgttatggcagtgggtccagcccaggccagcactgccagcctcctctccctgcagtaggcaccagctctacctcccccggcaggcaatgtcctggcttctcagcccagcaccatctgttcccctagacttctcaggggccagcccagtctgggccaccctttgtttccctcatcctcggctcccacacaggtgacagacccagcagatagcttctctctgggaaaggttggatgctgccttacatccccttctagccctcctcccatccacacacacaggcacccacccacaccaggtcggcttgtttctcacatgtagggagagaggggagaccaacccctttgtgtcttttgaaatacgaagaaaaatgtgtgttcaggagcatgactccagtgctgcgctcttgggcctagttcagtctgtcttgtctcaaatctaggcatttttgcttcaattttattttttttaagaatacaaaaacagaaatctgcactaatttacctggtttcgtaggaaaacttttttttattttttacattttttggtgtccgtttgtattgaataatttgctacatttgtaaaatgtaagaggtatataatatatgtatatttctaacgtaaaaaacataatttttttcttttcaagattttttcttaaaaagatgagagaaacatattttttcaggaaaaacaaactttaaaaaaaaaagaggagaaataaaaccttttctcccctttccccatcctctatctatccctctttcccaggaacaaatcaaaaggtggattatcttctgaagaatggaaactgttagtccagaatgatgtctttttctcaatgcagtgagttatagattctctagttttctccctagggatgggaagggggcattgaggcaagcctggagaggagcccggggagcagggtcatgaacttttttctttagtgaaggaggaatacaatcaagggttttgtattcagaatgttgtgcaatattttggaatgggacattggtgtgtttagagattttagtttaaaaacaaaacaaaaagattgatcaaatctgtacagtttctattgttccagatttttttaagtttgtattaaaagcatgatacataata

SEQ ID NO: 326287 - DNA, 4814 bp, Homo sapiens
ttcatgatggcctcatgttactaatgaggaaactggggcccacagtcagacatgagccactggtgggacagaaataggctcctggttctgtgtgatccaaagttggtgcttttctgtctatccctagctgttggtcaccaccagctttctgcatattttctcacggtgcctctcatttcccagagccgcctggagcccaaggctgtacacgtgccctgtgctgattctctgcctaggaaaggaccatgcagctagagatcaaagtggccctgaacttcatcatctcctacttgtacaacaagctgccccggcgccgggcagacctgtttggggaggagctagagcggcttttgaaaaagaaatatgaaggccactggtaccctgagaagccactgaaaggctctggcttccgctgtgttcacattggggagatggtggaccccgtggtggagctggccgccaagcggagtggcctggcagtggaagatgtgcgggccaatgtgcctgaggagctgagtgtctggattgatccctttgaggtgtcctaccagattggtgagaagggagctgtgaaagtgctgtacctggatgacagtgagggttgcggtgccccagagctggacaaggagatcaagagcagcttcaaccctgacgcccaggtgttcgtgcccattggcagccaggacagctccctgtccaactccccatcgccatcctttggccagtcacccagccctaccttcattccccgctccgctcagcccatcaccttcaccaccgcctccttcgctgccaccaaatttggctccactaagatgaagaaggggggcggggcagcaagtggtgggggtgtagccagcagtggggcgggtggccagcagccaccacagcagcctcgcatggcccgctcacccaccaacagcctgctgaagcacaagagcctctctctgtctatgcattcactgaacttcatcacggccaacccggcccctcagtcccagctctcacccaatgccaaggagttcgtgtacaacggtggtggctcacccagcctcttctttgatgcggccgatggccagggcagcggcaccccaggcccgtttggaggcagtggggctggcacctgcaacagcagcagctttgacatggcccaggtatttggaggtggtgccaacagcctcttcctggagaagacaccctttgtggaaggcctcagctacaacctgaacaccatgcagtatcccagccagcagttccagcccgtggtgctggccaactgaccatctacctgcccgtggggccaggagcacccaagaccacagaaaagagaaaggaaaggccaaaaaaaagaggaaaagaaaaatgtacaaaaagattttcgatcttctcactcttacttctagaaaaaagatccagcccaggcacggaatgggagggccctgcaaagcacccaagtgtgtttcactcaccccttaccgctcgcccaccggcctgtgatttatttggttggtttgggttttatatttctttttcttttttttttttcttacatgtagttttctatataacatctttaatgagtggcttcctgtgctaagaatggtccagatgtgaactgctgctccctgctcctcccttcctccttcacactcctagtttaggattgatgtgtccaagctcatagggaagaaagagctgcagctggagcctgaccctccctggaacagggagaggctggcccgtgtcactgcctctgtcacccagctatcctcgcactcaaagccatccaacctcagcaggccttctcgggccctgccacctgaataggtctgaccccagtccccactccctttcaggctgggccacagggagttgctggctggccacttgacaccctccccctggagctgatgtctgtgactacagggagattagcacttcgtctagtgaaactcctttcatctctgtcctatggccccaccccaccattccctctaggcccagaccatcatcatggccctggccattgatgtgtatgggctttctttccctcatgcagccccttcttccccaggctggatgttgtgggtagggaggggtgtgtgtgtgtgtatttggtttgctgtccttttttaaaggattccaagccatgtgaaacttcccttctggatgtgattctgggtcgcaagtccttatttatatgtgaggctggggaatgggctgggggtattggcagtccttttgcagggcagtgtgtgtggtggggtgacaccgctgtggcttagcccaagacactcccagaggaaaacactgcagaaggaactggtttgcagactgtggaaggatctgcagttttgtttttgaccaaaaaaataataataagttagctctgaagggcagagggaatacccaagcccctgatgcctatgagaagtccctggacttcaaccctcctgttgtttggccttagcccagagggagctgctcacctgagcacccttgggggtgggcagagaggcagggtgggattttagagttagtgtctgtgcgggggcagccctgagcctggagttgagactttggggtctcttagtttggaggtgttgagtgcatttgtgcccctgcctggttgagagcttcttggtacctcttgccaccccttctcactgccctgacccaaccccactggaccttgatgctgcgaggagtggtgtcctgacggactcagcactcccgcctgatgtattggatcataggagagcacttgctctcctgcctctgccaggagagggcttgttcctccaactctaggaggccaggcaagcatggacaggagccaagggagcagggtcattaactttttcttctttgcaaagtgggcacttggcatcagggtcccaatcaccagaaagcaccaaagcccctggcaccccacccactccatcctacccagggaccccaagtaggcaactgttatggcagtgggtccagcccaggccagcactgccagcctcctctccctgcagtaggcaccagctctacctcccccggcaggcaatgtcctggcttctcagcccagcaccatctgttcccctagacttctcaggggccagcccagtctgggccaccctttgtttccctcatcctcggctcccacacaggtgacagacccagcagatagcttctctctgggaaaggttggatgctgccttacatccccttctagccctcctcccatccacacacacaggcacccacccacaccaggtcggcttgtttctcacatgtagggagagaggggagaccaacccctttgtgtcttttgaaatacgaagaaaaatgtgtgttcaggagcatgactccagtgctgcgctcttgggcctagttcagtctgtcttgtctcaaatctaggcatttttgcttcaattttattttttttaagaatacaaaaacagaaatctgcactaatttacctggtttcgtaggaaaacttttttttattttttacattttttggtgtccgtttgtattgaataatttgctacatttgtaaaatgtaagaggtatataatatatgtatatttctaacgtaaaaaacataatttttttcttttcaagattttttcttaaaaagatgagagaaacatattttttcaggaaaaacaaactttaaaaaaaaaagaggagaaataaaaccttttctcccctttccccatcctctatctatccctctttcccaggaacaaatcaaaaggtggattatcttctgaagaatggaaactgttagtccagaatgatgtctttttctcaatgcagtgagttatagattctctagttttctccctagggatgggaagggggcattgaggcaagcctggagaggagcccggggagcagggtcatgaacttttttctttagtgaaggaggaatacaatcaagggttttgtattcagaatgttgtgcaatattttggaatgggacattggtgtgtttagagattttagtttaaaaacaaaacaaaaagattgatcaaatctgtacagtttctattgttccagatttttttaagtttgtattaaaagcatgatacataatagccttctgcctgctcctggcttgcttggtttctggggtcccttttgggatggagagaatgggagtggcccagcccttacagactccaagaaacgattggtcctccttacagtgacagcctcggatggacataactgtcctggtgccccttcttgaccacctatccatcccatcaacacaggatacatcattgtgcttgctaccgcagatgcttttctacactggaaacaggttccacaaagttagaaaccgctccagttcccttagccagttggtggtggcagcagagcctggagaacggggtacttcatggctctttaggaattgtctattcctggggggaggagagcggggacagcctccagcctactctagatctagtacttgatccttagtactagatccttagatgtgggcaaggatgagaacagcttgcctaagccaggttccatccaaaagcccggtgcttggattctcaacccttttcttgggctggacaatttcggagctgccttaagagtgagacagcccagcccagagaaagccacccttctgccagtggccgatttccttaggagctctgctatctcccagtggcccgggccatattttccccttcccagggcctgtgcctatcaatgctgcccatctaggagagaaacctcccaccttggcctccctctcaaagtgctgggattatggacgtgagccaccattc

SEQ ID NO: 326288 - DNA, 3677 bp, Homo sapiens
ttcatgatggcctcatgttactaatgaggaaactggggcccacagtcagacatgagccactggtgggacagaaataggctcctggttctgtgtgatccaaagttggtgcttttctgtctatccctagctgttggtcaccaccagctttctgcatattttctcacggtgcctctcatttcccagagccgcctggagcccaaggctgtacacgtgccctgtgctgattctctgcctaggaaaggaccatgcagctagagatcaaagtggccctgaacttcatcatctcctacttgtacaacaagctgccccggcgccgggcagacctgtttggggaggagctagagcggcttttgaaaaagaaatatgaaggccactggtaccctgagaagccactgaaaggctctggcttccgctgtgttcacattggggagatggtggaccccgtggtggagctggccgccaagcggagtggcctggcagtggaagatgtgcgggccaatgtgcctgaggagctgagtgtctggattgatccctttgaggtgtcctaccagattggtgagaagggagctgtgaaagtgctgtacctggatgacagtgagggttgcggtgccccagagctggacaaggagatcaagagcagcttcaaccctgacgcccaggtgttcgtgcccattggcagccaggacagctccctgtccaactccccatcgccatcctttggccagtcacccagccctaccttcattccccgctccgctcagcccatcaccttcaccaccgcctccttcgctgccaccaaatttggctccactaagatgaagaaggggggcggggcagcaagtggtgggggtgtagccagcagtggggcgggtggccagcagccaccacagcagcctcgcatggcccgctcacccaccaacagcctgctgaagcacaagagcctctctctgtctatgcattcactgaacttcatcacggccaacccggcccctcagtcccagctctcacccaatgccaaggagttcgtgtacaacggtggtggctcacccagcctcttctttgatgcggccgatggccagggcagcggcaccccaggcccgtttggaggcagtggggctggcacctgcaacagcagcagctttgacatggcccaggtatttggaggtggtgccaacagcctcttcctggagaagacaccctttgtggaaggcctcagctacaacctgaacaccatgcagtatcccagccagcagttccagcccgtggtgctggccaactgaccatctacctgcccgtggggccaggagcacccaagaccacagaaaagagaaaggaaaggccaaaaaaaagaggaaaagaaaaatgtacaaaaagattttcgatcttctcactcttacttctagaaaaaagatccagcccaggcacggaatgggagggccctgcaaagcacccaagtgtgtttcactcaccccttaccgctcgcccaccggcctgtgatttatttggttggtttgggttttatatttctttttcttttttttttttcttacatgtagttttctatataacatctttaatgagtggcttcctgtgctaagaatggtccagatgtgaactgctgctccctgctcctcccttcctccttcacactcctagtttaggattgatgtgtccaagctcatagggaagaaagagctgcagctggagcctgaccctccctggaacagggagaggctggcccgtgtcactgcctctgtcacccagctatcctcgcactcaaagccatccaacctcagcaggccttctcgggccctgccacctgaataggtctgaccccagtccccactccctttcaggctgggccacagggagttgctggctggccacttgacaccctccccctggagctgatgtctgtgactacagggagattagcacttcgtctagtgaaactcctttcatctctgtcctatggccccaccccaccattccctctaggcccagaccatcatcatggccctggccattgatgtgtatgggctttctttccctcatgcagccccttcttccccaggctggatgttgtgggtagggaggggtgtgtgtgtgtgtatttggtttgctgtccttttttaaaggattccaagccatgtgaaacttcccttctggatgtgattctgggtcgcaagtccttatttatatgtgaggctggggaatgggctgggggtattggcagtccttttgcagggcagtgtgtgtggtggggtgacaccgctgtggcttagcccaagacactcccagaggaaaacactgcagaaggaactggtttgcagactgtggaaggatctgcagttttgtttttgaccaaaaaaataataataagttagctctgaagggcagagggaatacccaagcccctgatgcctatgagaagtccctggacttcaaccctcctgttgtttggccttagcccagagggagctgctcacctgagcacccttgggggtgggcagagaggcagggtgggattttagagttagtgtctgtgcgggggcagccctgagcctggagttgagactttggggtctcttagtttggaggtgttgagtgcatttgtgcccctgcctggttgagagcttcttggtacctcttgccaccccttctcactgccctgacccaaccccactggaccttgatgctgcgaggagtggtgtcctgacggactcagcactcccgcctgatgtattggatcataggagagcacttgctctcctgcctctgccaggagagggcttgttcctccaactctaggaggccaggcaagcatggacaggagccaagggagcagggtcattaactttttcttctttgcaaagtgggcacttggcatcagggtcccaatcaccagaaagcaccaaagcccctggcaccccacccactccatcctacccagggaccccaagtaggcaactgttatggcagtgggtccagcccaggccagcactgccagcctcctctccctgcagtaggcaccagctctacctcccccggcaggcaatgtcctggcttctcagcccagcaccatctgttcccctagacttctcaggggccagcccagtctgggccaccctttgtttccctcatcctcggctcccacacaggtgacagacccagcagatagcttctctctgggaaaggttggatgctgccttacatccccttctagccctcctcccatccacacacacaggcacccacccacaccaggtcggcttgtttctcacatgtagggagagaggggagaccaacccctttgtgtcttttgaaatacgaagaaaaatgtgtgttcaggagcatgactccagtgctgcgctcttgggcctagttcagtctgtcttgtctcaaatctaggcatttttgcttcaattttattttttttaagaatacaaaaacagaaatctgcactaatttacctggtttcgtaggaaaacttttttttattttttacattttttggtgtccgtttgtattcagaatgttgtgcaatattttggaatgggacattggtgtgtttagagattttagtttaaaaacaaaacaaaaagattgatcaaatctgtacagtttctattgttccagatttttttaagtttgtattaaaagcatgatacataata

SEQ ID NO: 326289 - DNA, 3382 bp, Homo sapiens
ttcatgatggcctcatgttactaatgaggaaactggggcccacagtcagacatgagccactggtgggacagaaataggctcctggttctgtgtgatccaaagttggtgcttttctgtctatccctagctgttggtcaccaccagctttctgcatattttctcacggtgcctctcatttcccagagccgcctggagcccaaggctgtacacgtgccctgtgctgattctctgcctaggaaaggaccatgcagctagagatcaaagtggccctgaacttcatcatctcctacttgtacaacaagctgccccggcgccgggcagacctgtttggggaggagctagagcggcttttgaaaaagaaatatgaaggccactggtaccctgagaagccactgaaaggctctggcttccgctgtgttcacattggggagatggtggaccccgtggtggagctggccgccaagcggagtggcctggcagtggaagatgtgcgggccaatgtgcctgaggagctgagtgtctggattgatccctttgaggtgtcctaccagattggtgagaagggagctgtgaaagtgctgtacctggatgacagtgagggttgcggtgccccagagctggacaaggagatcaagagcagcttcaaccctgacgcccaggtgttcgtgcccattggcagccaggacagctccctgtccaactccccatcgccatcctttggccagtcacccagccctaccttcattccccgctccgctcagcccatcaccttcaccaccgcctccttcgctgccaccaaatttggctccactaagatgaagaaggggggcggggcagcaagtggtgggggtgtagccagcagtggggcgggtggccagcagccaccacagcagcctcgcatggcccgctcacccaccaacagcctgctgaagcacaagagcctctctctgtctatgcattcactgaacttcatcacggccaacccggcccctcagtcccagctctcacccaatgccaaggagttcgtgtacaacggtggtggctcacccagcctcttctttgatgcggccgatggccagggcagcggcaccccaggcccgtttggaggcagtggggctggcacctgcaacagcagcagctttgacatggcccaggtatttggaggtggtgccaacagcctcttcctggagaagacaccctttgtggaaggcctcagctacaacctgaacaccatgcagtatcccagccagcagttccagcccgtggtgctggccaactgaccatctacctgcccgtggggccaggagcacccaagaccacagaaaagagaaaggaaaggccaaaaaaaagaggaaaagaaaaatgtacaaaaagattttcgatcttctcactcttacttctagaaaaaagatccagcccaggcacggaatgggagggccctgcaaagcacccaagtgtgtttcactcaccccttaccgctcgcccaccggcctgtgatttatttggttggtttgggttttatatttctttttcttttttttttttcttacatgtagttttctatataacatctttaatgagtggcttcctgtgctaagaatggtccagatgtgaactgctgctccctgctcctcccttcctccttcacactcctagtttaggattgatgtgtccaagctcatagggaagaaagagctgcagctggagcctgaccctccctggaacagggagaggctggcccgtgtcactgcctctgtcacccagctatcctcgcactcaaagccatccaacctcagcaggccttctcgggccctgccacctgaataggtctgaccccagtccccactccctttcaggctgggccacagggagttgctggctggccacttgacaccctccccctggagctgatgtctgtgactacagggagattagcacttcgtctagtgaaactcctttcatctctgtcctatggccccaccccaccattccctctaggcccagaccatcatcatggccctggccattgatgtgtatgggctttctttccctcatgcagccccttcttccccaggctggatgttgtgggtagggaggggtgtgtgtgtgtgtatttggtttgctgtccttttttaaaggattccaagccatgtgaaacttcccttctggatgtgattctgggtcgcaagtccttatttatatgtgaggctggggaatgggctgggggtattggcagtccttttgcagggcagtgtgtgtggtggggtgacaccgctgtggcttagcccaagacactcccagaggaaaacactgcagaaggaactggtttgcagactgtggaaggatctgcagttttgtttttgaccaaaaaaataataataagttagctctgaagggcagagggaatacccaagcccctgatgcctatgagaagtccctggacttcaaccctcctgttgtttggccttagcccagagggagctgctcacctgagcacccttgggggtgggcagagaggcagggtgggattttagagttagtgtctgtgcgggggcagccctgagcctggagttgagactttggggtctcttagtttggaggtgttgagtgcatttgtgcccctgcctggttgagagcttcttggtacctcttgccaccccttctcactgccctgacccaaccccactggaccttgatgctgcgaggagtggtgtcctgacggactcagcactcccgcctgatgtattggatcataggagagcacttgctctcctgcctctgccaggagagggcttgttcctccaactctaggaggccaggcaagcatggacaggagccaagggagcagggtcattaactttttcttctttgcaaagtgggcacttggcatcagggtcccaatcaccagaaagcaccaaagcccctggcaccccacccactccatcctacccagggaccccaagtaggcaactgttatggcagtgggtccagcccaggccagcactgccagcctcctctccctgcagtaggcaccagctctacctcccccggcaggcaatgtcctggcttctcagcccagcaccatctgttcccctagacttctcaggggccagcccagtctgggccaccctttgtttccctcatcctcggctcccacacaggtgacagaccccggggagcagggtcatgaacttttttctttagtgaaggaggaatacaatcaagggttttgtattcagaatgttgtgcaatattttggaatgggacattggtgtgtttagagattttagtttaaaaacaaaacaaaaagattgatcaaatctgtacagtttctattgttccagatttttttaagtttgtattaaaagcatgatacataata

SEQ ID NO: 326290 - DNA, 771 bp, Homo sapiens
gcgggaaggtgcgggttgttggctgaggcaagccgtggctcgggcgacgcggggccaggagggcaggaccgtctgccggcgacagcccataccgtctgccgttgcgcgacacgaaccaccctccgatccgccatccccgcgtcgtcgccgctagtccgcccgcccgccctcgggccccccgctgccgagcccgacctcctaagagctgaaagaaattattgagagtcatagtccatagccccctgcttcgtcccccaaccctcaacgacgaaaaggacttcggtcccctggcccggcgacgcccgggaaggaaaggagagcgacctccgccccgcgctcaggccaccctggagggagaagccgccccgcggccggtagagcgccccgccgccgcggagacccgaagccgcctggagcccaaggctgtacacgtgccctgtgctgattctctgcctaggaaaggaccatgcagctagagatcaaagtggccctgaacttcatcatctcctacttgtacaacaagctgccccggcgccgggcagacctgtttggggaggagcccggggagcagggtcatgaacttttttctttagtgaaggaggaatacaatcaagggttttgtattcagaatgttgtgcaatattttggaatgggacattggtgtgtttagagattttagtttaaaaacaaaacaaaaagattgatcaaatctgtacagtttctattgttccagatttttttaagtttgtattaaaagcatgatacataata

SEQ ID NO: 326291 - DNA, 314 bp, Homo sapiens
ttcctgggtgatgctgatactgatgctgcaggtcctcaggcccctctgctgtgggaaccactgctcaagatcataggaacacctaagcatcttcccactacatgctactgctattcatttatcccctattattcacattaacaatatattatttggtatctgttaacaaatttaatcatccataacccaaataaatccctgaactcctcataccagtttcaggtggagaagtacattcaaaccccaagtccagcaatggattaaaaaaaaaaatcacctcttgtgtggccattcctcttgattgacaactctta

SEQ ID NO: 326292 - DNA, 216 bp, Homo sapiens
gcctacttgagggtggaaggtggaaaaacaaagagggtgtgggcattgtggctcacgcctgtatgccaccacattgggagaccaaggcagatgaatcacttgaggtcaggagttcgagaccagtctggccaacatggtgaaaccccatctcaactaaaaatacagaaattagcctggcatggtgatacacagctctaatcccagccactcaggagg

SEQ ID NO: 326293 - DNA, 550 bp, Homo sapiens
tttgagacggagtcttgctctgtcgcccaggctggagtgcagtggcgcgatctctgctcactggaagctccgcctcccgggttcatgccgttctccagctactcaggaggttgaagcaggagaattgttgaacccgggaggcggaggttgcaatgagccaagatagcaccactgcactgcagcctgggtgacagagcgagactccatctcaaaagaagggctcctgtgtctacgtcatggtggggctagagagaggtccccgcagctgggctgtgttgagtgagggctcgtctcttcagcgccaggcaatagtttgtcttgtctctgtcccttttctgtgtccacatgacatttacatcttgcgagttgcataatttaagttgtttatttacattatacatttaattgcattctatagcgatgctatgttgaatgtattctgatcggatcgtttatggttatttacaatgcagttactcttgaagattattgttagaggtagactgttgatttgttttgataaaataaagcttttgtgttttaaaaaatg

SEQ ID NO: 326294 - DNA, 1659 bp, Homo sapiens
ctgtggaccgggtgactgtacttctgtggaccgggtgactatgcttctgtggaccggtgactgtgcttctgcggaccgggtgactgtacttctgtggaccgggtgactatgcttctgtggaccgggtgactatacttctgcggactgggtgaatgtacttcagccgaccgggtgaccatgcttctgcggactaggtgactatacttctgcggactgggtgaatatacttctgctgactgggtgaatgtacttctgcagactgggtgactatacttccatggactgggtgaacatacttttgtggactggttgactatacctttgtggactcggtgaatatacttctgcggaccgggtgaccgtgcttctgtggaatgggtgaatatacttctgcggaccaggtgactatgcttctgtcaaccaggtgaatatacttctgtggaccgggtgactgtacttctgtggaccgggtgaatatacttctgtggaccgggtgaatatacttctgtggactgggtgactagggaggagccggcgtgttagcgccagcatatgcagtccctcaggacagccagcctgccgtgatcctgtctgtgtggtcgtggcagtggcctgcagcaagccatcgtggttggctggaactagacgtgtgatttgaatgcaggagttcagtcagcccctcagtggcctaaaaggaagaaggtgtcagtcacagggctggttctgggccctgccttggggggaccccagttccagggttctgggccctgccttcaggggacccgagttccagggtcctgggccctgcctttgggggacccgagttccaggtcccggcctcagcgttgcagtggccagggtcagtggctctttggccctctaggagtgagcagaccttagtgaaatagatccacagggtcctgactttgtacctggtccaagctgttggggaattgctgctgttgacccaggcaggagtctgactagagaacaaactaaggttgctgcaacaaacaaggacctcttccaagaagggctcccaggcctggcgcagtgactcatgcctgtgatcccagcacttgggaggccgaggcgggtggatcatttgaggccaggagttcgagaccagcttggccaacatgatgagacccccgtctctattaaaaatacaaaaattagccaggcgtggtggcgcctgtagtcccagctactcaggaggttgaagcaggagaattgttgaacccgggaggcggaggttgcaatgagccaagatagcaccactgcactgcagcctgggtgacagagcgagactccatctcaaaagaagggctcctgtgtctacgtcatggtggggctagagagaggtccccgcagctgggctgtgttgagtgagggctcgtctcttcagcgccaggcaatagtttgtcttgtctctgtcccttttctgtgtccacatgacatttacatcttgcgagttgcataatttaagttgtttatttacattatacatttaattgcattctatagcgatgctatgttgaatgtattctgatcggatcgtttatggttatttacaatgcagttactcttgaagattattgttagaggtagactgttgatttgttttgataaaataaagcttttgtgttttaaaaaatg

SEQ ID NO: 326295 - DNA, 642 bp, Homo sapiens
tcaccctggcctgccttcagctgatgggacgaagatgcgcgcagtcttctcccatcaggtaggtaccctcgcatacacacccaggattaatactttgcatttgttaatccaatcaagttgacactcagtattaaccatcacaagtccaccccttgtcaacttgaacccatacacatctcctgagatcatacataatcttcaaataaagacactaataaggtcataattatacctaacataatacaactatcttttgtacaactggaaacaaaccaatccccaacccaaatgctattacataaagttaacaatacttaaatgctgatgggacgaagacgcatcttctcccatcagttacttttgcacagattctagggggacatttttctgaataggaagacaggacaaagttaacagcttaagggctcttaattctgtgagttgaggacttaaaagtattgtagcatttgtttggatccatgaaaaatgtattcagtgggctttaaaatttccatttgcagaatttggtctctcaggctgtttgggagcaagatgccatcttctcccatcagttttctttagttctcattacatctgtccaggctctttatcagcatcatcctttcctgatggacgcaagat

SEQ ID NO: 326296 - DNA, 508 bp, Homo sapiens
ctgcaggtcatgtaaaaatttaaaaaaaataaaatgagtttgggtgtgattattcatgtatgaaaagattctcttcttatcccttaatggttctctaaaatagtgatgtcatttctttttataaattgagacccgtgtctgcaaaaatgattaaatattgagatagcattggtaaatggagcagggcaagtggtgctggccagtagaattttgggtgacttttgttttttagagttgtttacaggatagattaatatgtttttcattcaaatcaatgtgcttttcattcttattttctatttagtgcatctaagtggcattctgattcacattattgataagactgatttcctagagttgttcttcactggatgacagcagtcgtatgtctagggaatgtgaatgaaccgctgcctggaggagtaagtcacacagtaaaagaaagtgtaggcatacctcggatatactgtgagtttagttccagactactgaaataaaacaagtacag

SEQ ID NO: 326297 - DNA, 3396 bp, Homo sapiens
  misc_feature (26)..(27): n is a, c, g, or t
  misc_feature (30)..(30): n is a, c, g, or t
  misc_feature (40)..(40): n is a, c, g, or t
  misc_feature (55)..(55): n is a, c, g, or t
  misc_feature (3096)..(3096): n is a, c, g, or t
  misc_feature (3105)..(3105): n is a, c, g, or t
  misc_feature (3109)..(3109): n is a, c, g, or t
  misc_feature (3115)..(3115): n is a, c, g, or t
  misc_feature (3119)..(3119): n is a, c, g, or t
  misc_feature (3121)..(3121): n is a, c, g, or t
tttttctctcccccagcccacggggnnccntttgtagacntcgttagaaacgccngccattgtgttggaaaccgggacttgggccattatgtcccggggaggggtgtgacgtacatccggcgagtagctggcggtcccgggtgctgctggttagtgtgctctgagggagggtccgagccagccgctgttttgccggaggagcccctcaggccgtagtaagcattaataatgtctttcatctttgagtggatctacaatggcttcagcagtgtgctccagttcctaggactgtacaagaaatctggaaaacttgtattcttaggtttggataatgcaggcaaaaccactcttcttcacatgctcaaagatgacagattgggccaacatgttccaacactacatccgacatcagaagagctaacaattgctggaatgacctttacaacttttgatcttggtgggcacgagcaagcacgtcgcgtttggaaaaattatctcccagcaattaatgggattgtctttctggtggactgtgcagatcattctcgcctcgtggaatccaaagttgagcttaatgctttaatgactgatgaaacaatatccaatgtgccaatccttatcttgggtaacaaaattgacagaacagatgcaatcagtgaagaaaaactccgtgagatatttgggctttatggacagaccacaggaaaggggaatgtgaccctgaaggagctgaatgctcgccccatggaagtgttcatgtgcagtgtgctcaagaggcaaggttacggcgagggtttccgctggctctcccagtatattgactgatgtttggacggtgaaaataaaagagttttacttctctggactgatcctattcacagcttcctcatgaacttttctaatagaacaaggaaagctctccaaccatgtctggcgttgagaagccaagagtctctgtcaactctctcattgcccagtggtgacatgtgctcttctccacactgttgggaggtaatgctgccccacgtgctggtgcaggtcagtatcctgggacttggaagctggcaggatttgccgggtaaagctgtatgccatcatggggcacctgaaaagaaaaacacgtctcaccactgtggttgattcaaaagaaagtgattctattttttaaagaaagcgttgttaatgtaattggtatccctcctaactttttgagttcacaatttacttggtccagagttttctattcttttttttttttaaactaatgaatgacatttagatacttcataaaattatgaacagatatggaggccagagctcatttgggtaaacttactcctgctgagttagcaggttggtgagagaagctcccctgagctcacctgtctctctgactgccttggagtaggtggcataaccttgtgcacagagaactagaaaaggggcagaaccccggccttgcagttgtggcaggtttccactgtggtaagctaggttcattcctcatcaaggaatgtgtagcagattgttcactgtggaggagttaattatagaatgggttattgttgttattcttactcatgaagttacagattttagccagtctttgcttttatacttttgtgaaatttaatttctctctatagcaccttcctttttcgttttcagttatcaaaagtgactttgacctcataaaagagttgagaacatctctcgtgtcacatactgcaggtgcatcagttacttttgcacagattctagggggacatttttctgaataggaagacaggacaaagttaacagcttaagggctcttaattctgtgagttgaggacttaaaagtattgtagcatttgtttggatccatgaaaaatgtattcagtgggctttaaaatttccatttgcagaatttggtctctcaggctgtttgggagctcttttttttacattttttctcctttgacacctattttattggtgtttaaagtaaaggttaacatctgtagcttttccaggtttttttttttttttttttgatatgaaattgtctttctccattgcagaaataagctagggaaacactaacccaaaaactttctgtagagctgttcctttggaggcagcatcacttattggcagtaaagactcagtataaaagcaccagcatccctacttgggtgatggggattaattttatagcattccattttcctagtgccacatgtgaaattggattttgatgatcttaatctatattctacccttataataaaagatcaaaagatatatctcctatgaacagattggagataggagatgaaaagttgggaggatgtctttattctaatgtgagggtagggaaaatgtggataacattactggggtgaaggaggcattgttctttagttggagttctcattcttattctccagtactgacttgtggggaaagcatactttttcactgccaggtactgaatgcagaggctcagtgaagtatatatgtgggaagtgcatgcatttcgtttattagcaaacatagctggattaagacaaagttgttggtttggaaaggggttaaagccttaagtgaacaaatctagctaacagtgaatgaactaggtaatataacttgcatatttttaatttcctttggttaaaggtcccccatacttctctgttcggagacatgagaagtatgattacttcagtgttagttttcttaattttttttttcccctatttgtcccttgtcactttgttgcaagctagaaatctgtgggttatacatagggcagctctttgtgaaagtggtttattccactggagaaaggggattgaaaatcagttagaaccaatgtatttcttgccccacggaacactattcctataagatagctgaaagaagctgctgtgaggagctcagctccaaacacaggatcagcaccttgtataggaattcccatgaattatgacttctcattctgttttatcagagtgcatatatgtcctacttcaggaaaagtaaaacagtcatttacgaaagaaagtcaatctgtatcctaagcattttaataaaaaggttaaaacaaaaaanagagaaccnaagnagacanagangnacaacaagaaagacacaacagaagaaagaaggaaaacaataaaaacaaaacaaaaaagaaaacacaaccaaaaaaaataggaagacgacaacacaaaacaccgcgacagaatacgcacacacaggccgcagcccttcttgcgccgctaccgccgcacaactcatcccagcatgtccgctgagcgcggcaaccgacctaccggtggcgggaccgcggaatgcactggtatcgactatccacggaacccggcgccagtccccacagagtaacgcgcc

SEQ ID NO: 326298 - DNA, 3526 bp, Homo sapiens
  misc_feature (3226)..(3226): n is a, c, g, or t
  misc_feature (3235)..(3235): n is a, c, g, or t
  misc_feature (3239)..(3239): n is a, c, g, or t
  misc_feature (3245)..(3245): n is a, c, g, or t
  misc_feature (3249)..(3249): n is a, c, g, or t
  misc_feature (3251)..(3251): n is a, c, g, or t
cctgttactttcacttggagaatagggaggcttggggtgggggcaggactgtggaggaagtcaagtttgctgtcttctatggttgtggtttgtggcacaacaaaacaattatactagtaataccaaagatcactgatcatagatcatgatgacagatataagaataatgaaaaagtttgaaatattgtgtgagaattaccaaaatgtaacatagagacatgaagggagcacatgctgttagaagatggtactgatacacttactcaactcagggctgcttccaaccttcaatttgtaaaaaaaccagaaaacctcaggatccacaaagtatcatcaaatgaggtagtaagcattaataatgtctttcatctttgagtggatctacaatggcttcagcagtgtgctccagttcctaggactgtacaagaaatctggaaaacttgtattcttaggtttggataatgcaggcaaaaccactcttcttcacatgctcaaagatgacagattgggccaacatgttccaacactacatccgacatcagaagagctaacaattgctggaatgacctttacaacttttgatcttggtgggcacgagcaagcacgtcgcgtttggaaaaattatctcccagcaattaatgggattgtctttctggtggactgtgcagatcattctcgcctcgtggaatccaaagttgagcttaatgctttaatgactgatgaaacaatatccaatgtgccaatccttatcttgggtaacaaaattgacagaacagatgcaatcagtgaagaaaaactccgtgagatatttgggctttatggacagaccacaggaaaggggaatgtgaccctgaaggagctgaatgctcgccccatggaagtgttcatgtgcagtgtgctcaagaggcaaggttacggcgagggtttccgctggctctcccagtatattgactgatgtttggacggtgaaaataaaagagttttacttctctggactgatcctattcacagcttcctcatgaacttttctaatagaacaaggaaagctctccaaccatgtctggcgttgagaagccaagagtctctgtcaactctctcattgcccagtggtgacatgtgctcttctccacactgttgggaggtaatgctgccccacgtgctggtgcaggtcagtatcctgggacttggaagctggcaggatttgccgggtaaagctgtatgccatcatggggcacctgaaaagaaaaacacgtctcaccactgtggttgattcaaaagaaagtgattctattttttaaagaaagcgttgttaatgtaattggtatccctcctaactttttgagttcacaatttacttggtccagagttttctattcttttttttttttaaactaatgaatgacatttagatacttcataaaattatgaacagatatggaggccagagctcatttgggtaaacttactcctgctgagttagcaggttggtgagagaagctcccctgagctcacctgtctctctgactgccttggagtaggtggcataaccttgtgcacagagaactagaaaaggggcagaaccccggccttgcagttgtggcaggtttccactgtggtaagctaggttcattcctcatcaaggaatgtgtagcagattgttcactgtggaggagttaattatagaatgggttattgttgttattcttactcatgaagttacagattttagccagtctttgcttttatacttttgtgaaatttaatttctctctatagcaccttcctttttcgttttcagttatcaaaagtgactttgacctcataaaagagttgagaacatctctcgtgtcacatactgcaggtgcatcagttacttttgcacagattctagggggacatttttctgaataggaagacaggacaaagttaacagcttaagggctcttaattctgtgagttgaggacttaaaagtattgtagcatttgtttggatccatgaaaaatgtattcagtgggctttaaaatttccatttgcagaatttggtctctcaggctgtttgggagctcttttttttacattttttctcctttgacacctattttattggtgtttaaagtaaaggttaacatctgtagcttttccaggtttttttttttttttttttgatatgaaattgtctttctccattgcagaaataagctagggaaacactaacccaaaaactttctgtagagctgttcctttggaggcagcatcacttattggcagtaaagactcagtataaaagcaccagcatccctacttgggtgatggggattaattttatagcattccattttcctagtgccacatgtgaaattggattttgatgatcttaatctatattctacccttataataaaagatcaaaagatatatctcctatgaacagattggagataggagatgaaaagttgggaggatgtctttattctaatgtgagggtagggaaaatgtggataacattactggggtgaaggaggcattgttctttagttggagttctcattcttattctccagtactgacttgtggggaaagcatactttttcactgccaggtactgaatgcagaggctcagtgaagtatatatgtgggaagtgcatgcatttcgtttattagcaaacatagctggattaagacaaagttgttggtttggaaaggggttaaagccttaagtgaacaaatctagctaacagtgaatgaactaggtaatataacttgcatatttttaatttcctttggttaaaggtcccccatacttctctgttcggagacatgagaagtatgattacttcagtgttagttttcttaattttttttttcccctatttgtcccttgtcactttgttgcaagctagaaatctgtgggttatacatagggcagctctttgtgaaagtggtttattccactggagaaaggggattgaaaatcagttagaaccaatgtatttcttgccccacggaacactattcctataagatagctgaaagaagctgctgtgaggagctcagctccaaacacaggatcagcaccttgtataggaattcccatgaattatgacttctcattctgttttatcagagtgcatatatgtcctacttcaggaaaagtaaaacagtcatttacgaaagaaagtcaatctgtatcctaagcattttaataaaaaggttaaaacaaaaaanagagaaccnaagnagacanagangnacaacaagaaagacacaacagaagaaagaaggaaaacaataaaaacaaaacaaaaaagaaaacacaaccaaaaaaaataggaagacgacaacacaaaacaccgcgacagaatacgcacacacaggccgcagcccttcttgcgccgctaccgccgcacaactcatcccagcatgtccgctgagcgcggcaaccgacctaccggtggcgggaccgcggaatgcactggtatcgactatccacggaacccggcgccagtccccacagagtaacgcgcc

SEQ ID NO: 326299 - DNA, 3562 bp, Homo sapiens
  misc_feature (26)..(27): n is a, c, g, or t
  misc_feature (30)..(30): n is a, c, g, or t
  misc_feature (40)..(40): n is a, c, g, or t
  misc_feature (55)..(55): n is a, c, g, or t
  misc_feature (3262)..(3262): n is a, c, g, or t
  misc_feature (3271)..(3271): n is a, c, g, or t
  misc_feature (3275)..(3275): n is a, c, g, or t
  misc_feature (3281)..(3281): n is a, c, g, or t
  misc_feature (3285)..(3285): n is a, c, g, or t
  misc_feature (3287)..(3287): n is a, c, g, or t
tttttctctcccccagcccacggggnnccntttgtagacntcgttagaaacgccngccattgtgttggaaaccgggacttgggccattatgtcccggggaggggtgtgacgtacatccggcgagtagctggcggtcccgggtgctgctggttagtgtgctctgagggagggtccgagccagccgctgttttgccggaggagcccctcaggccagatgcaggtctctctatgttacccaggctggtcttgaactcctgaggtcagggaggaatcccccacctcagccttgcaaaatgctgggattacagggctgcttccaaccttcaatttgtaaaaaaaccagaaaacctcaggatccacaaagtatcatcaaatgaggtagtaagcattaataatgtctttcatctttgagtggatctacaatggcttcagcagtgtgctccagttcctaggactgtacaagaaatctggaaaacttgtattcttaggtttggataatgcaggcaaaaccactcttcttcacatgctcaaagatgacagattgggccaacatgttccaacactacatccgacatcagaagagctaacaattgctggaatgacctttacaacttttgatcttggtgggcacgagcaagcacgtcgcgtttggaaaaattatctcccagcaattaatgggattgtctttctggtggactgtgcagatcattctcgcctcgtggaatccaaagttgagcttaatgctttaatgactgatgaaacaatatccaatgtgccaatccttatcttgggtaacaaaattgacagaacagatgcaatcagtgaagaaaaactccgtgagatatttgggctttatggacagaccacaggaaaggggaatgtgaccctgaaggagctgaatgctcgccccatggaagtgttcatgtgcagtgtgctcaagaggcaaggttacggcgagggtttccgctggctctcccagtatattgactgatgtttggacggtgaaaataaaagagttttacttctctggactgatcctattcacagcttcctcatgaacttttctaatagaacaaggaaagctctccaaccatgtctggcgttgagaagccaagagtctctgtcaactctctcattgcccagtggtgacatgtgctcttctccacactgttgggaggtaatgctgccccacgtgctggtgcaggtcagtatcctgggacttggaagctggcaggatttgccgggtaaagctgtatgccatcatggggcacctgaaaagaaaaacacgtctcaccactgtggttgattcaaaagaaagtgattctattttttaaagaaagcgttgttaatgtaattggtatccctcctaactttttgagttcacaatttacttggtccagagttttctattcttttttttttttaaactaatgaatgacatttagatacttcataaaattatgaacagatatggaggccagagctcatttgggtaaacttactcctgctgagttagcaggttggtgagagaagctcccctgagctcacctgtctctctgactgccttggagtaggtggcataaccttgtgcacagagaactagaaaaggggcagaaccccggccttgcagttgtggcaggtttccactgtggtaagctaggttcattcctcatcaaggaatgtgtagcagattgttcactgtggaggagttaattatagaatgggttattgttgttattcttactcatgaagttacagattttagccagtctttgcttttatacttttgtgaaatttaatttctctctatagcaccttcctttttcgttttcagttatcaaaagtgactttgacctcataaaagagttgagaacatctctcgtgtcacatactgcaggtgcatcagttacttttgcacagattctagggggacatttttctgaataggaagacaggacaaagttaacagcttaagggctcttaattctgtgagttgaggacttaaaagtattgtagcatttgtttggatccatgaaaaatgtattcagtgggctttaaaatttccatttgcagaatttggtctctcaggctgtttgggagctcttttttttacattttttctcctttgacacctattttattggtgtttaaagtaaaggttaacatctgtagcttttccaggtttttttttttttttttttgatatgaaattgtctttctccattgcagaaataagctagggaaacactaacccaaaaactttctgtagagctgttcctttggaggcagcatcacttattggcagtaaagactcagtataaaagcaccagcatccctacttgggtgatggggattaattttatagcattccattttcctagtgccacatgtgaaattggattttgatgatcttaatctatattctacccttataataaaagatcaaaagatatatctcctatgaacagattggagataggagatgaaaagttgggaggatgtctttattctaatgtgagggtagggaaaatgtggataacattactggggtgaaggaggcattgttctttagttggagttctcattcttattctccagtactgacttgtggggaaagcatactttttcactgccaggtactgaatgcagaggctcagtgaagtatatatgtgggaagtgcatgcatttcgtttattagcaaacatagctggattaagacaaagttgttggtttggaaaggggttaaagccttaagtgaacaaatctagctaacagtgaatgaactaggtaatataacttgcatatttttaatttcctttggttaaaggtcccccatacttctctgttcggagacatgagaagtatgattacttcagtgttagttttcttaattttttttttcccctatttgtcccttgtcactttgttgcaagctagaaatctgtgggttatacatagggcagctctttgtgaaagtggtttattccactggagaaaggggattgaaaatcagttagaaccaatgtatttcttgccccacggaacactattcctataagatagctgaaagaagctgctgtgaggagctcagctccaaacacaggatcagcaccttgtataggaattcccatgaattatgacttctcattctgttttatcagagtgcatatatgtcctacttcaggaaaagtaaaacagtcatttacgaaagaaagtcaatctgtatcctaagcattttaataaaaaggttaaaacaaaaaanagagaaccnaagnagacanagangnacaacaagaaagacacaacagaagaaagaaggaaaacaataaaaacaaaacaaaaaagaaaacacaaccaaaaaaaataggaagacgacaacacaaaacaccgcgacagaatacgcacacacaggccgcagcccttcttgcgccgctaccgccgcacaactcatcccagcatgtccgctgagcgcggcaaccgacctaccggtggcgggaccgcggaatgcactggtatcgactatccacggaacccggcgccagtccccacagagtaacgcgcc

SEQ ID NO: 326300 - DNA, 3339 bp, Homo sapiens
  misc_feature (26)..(27): n is a, c, g, or t
  misc_feature (30)..(30): n is a, c, g, or t
  misc_feature (40)..(40): n is a, c, g, or t
  misc_feature (55)..(55): n is a, c, g, or t
  misc_feature (3039)..(3039): n is a, c, g, or t
  misc_feature (3048)..(3048): n is a, c, g, or t
  misc_feature (3052)..(3052): n is a, c, g, or t
  misc_feature (3058)..(3058): n is a, c, g, or t
  misc_feature (3062)..(3062): n is a, c, g, or t
  misc_feature (3064)..(3064): n is a, c, g, or t
tttttctctcccccagcccacggggnnccntttgtagacntcgttagaaacgccngccattgtgttggaaaccgggacttgggccattatgtcccggggaggggtgtgacgtacatccggcgagtagctggcggtcccgggtgctgctggttagtgtgctctgagggagggtccgagccagccgctgttttgccggaggagcccctcaggccgtagtaagcattaataatgtctttcatctttgagtggatctacaatggcttcagcagtgtgctccagttcctaggactgtacaagaaatctggaaaacttgtattcttaggtttggataatgcaggcaaaaccactcttcttcacatgctcaaagatgacagattgggccaacatgttccaacactacatccgacatcagaagagctaacaattgctggaatgacctttacaacttttgatcttggtgggcacgagcaagactgtgcagatcattctcgcctcgtggaatccaaagttgagcttaatgctttaatgactgatgaaacaatatccaatgtgccaatccttatcttgggtaacaaaattgacagaacagatgcaatcagtgaagaaaaactccgtgagatatttgggctttatggacagaccacaggaaaggggaatgtgaccctgaaggagctgaatgctcgccccatggaagtgttcatgtgcagtgtgctcaagaggcaaggttacggcgagggtttccgctggctctcccagtatattgactgatgtttggacggtgaaaataaaagagttttacttctctggactgatcctattcacagcttcctcatgaacttttctaatagaacaaggaaagctctccaaccatgtctggcgttgagaagccaagagtctctgtcaactctctcattgcccagtggtgacatgtgctcttctccacactgttgggaggtaatgctgccccacgtgctggtgcaggtcagtatcctgggacttggaagctggcaggatttgccgggtaaagctgtatgccatcatggggcacctgaaaagaaaaacacgtctcaccactgtggttgattcaaaagaaagtgattctattttttaaagaaagcgttgttaatgtaattggtatccctcctaactttttgagttcacaatttacttggtccagagttttctattcttttttttttttaaactaatgaatgacatttagatacttcataaaattatgaacagatatggaggccagagctcatttgggtaaacttactcctgctgagttagcaggttggtgagagaagctcccctgagctcacctgtctctctgactgccttggagtaggtggcataaccttgtgcacagagaactagaaaaggggcagaaccccggccttgcagttgtggcaggtttccactgtggtaagctaggttcattcctcatcaaggaatgtgtagcagattgttcactgtggaggagttaattatagaatgggttattgttgttattcttactcatgaagttacagattttagccagtctttgcttttatacttttgtgaaatttaatttctctctatagcaccttcctttttcgttttcagttatcaaaagtgactttgacctcataaaagagttgagaacatctctcgtgtcacatactgcaggtgcatcagttacttttgcacagattctagggggacatttttctgaataggaagacaggacaaagttaacagcttaagggctcttaattctgtgagttgaggacttaaaagtattgtagcatttgtttggatccatgaaaaatgtattcagtgggctttaaaatttccatttgcagaatttggtctctcaggctgtttgggagctcttttttttacattttttctcctttgacacctattttattggtgtttaaagtaaaggttaacatctgtagcttttccaggtttttttttttttttttttgatatgaaattgtctttctccattgcagaaataagctagggaaacactaacccaaaaactttctgtagagctgttcctttggaggcagcatcacttattggcagtaaagactcagtataaaagcaccagcatccctacttgggtgatggggattaattttatagcattccattttcctagtgccacatgtgaaattggattttgatgatcttaatctatattctacccttataataaaagatcaaaagatatatctcctatgaacagattggagataggagatgaaaagttgggaggatgtctttattctaatgtgagggtagggaaaatgtggataacattactggggtgaaggaggcattgttctttagttggagttctcattcttattctccagtactgacttgtggggaaagcatactttttcactgccaggtactgaatgcagaggctcagtgaagtatatatgtgggaagtgcatgcatttcgtttattagcaaacatagctggattaagacaaagttgttggtttggaaaggggttaaagccttaagtgaacaaatctagctaacagtgaatgaactaggtaatataacttgcatatttttaatttcctttggttaaaggtcccccatacttctctgttcggagacatgagaagtatgattacttcagtgttagttttcttaattttttttttcccctatttgtcccttgtcactttgttgcaagctagaaatctgtgggttatacatagggcagctctttgtgaaagtggtttattccactggagaaaggggattgaaaatcagttagaaccaatgtatttcttgccccacggaacactattcctataagatagctgaaagaagctgctgtgaggagctcagctccaaacacaggatcagcaccttgtataggaattcccatgaattatgacttctcattctgttttatcagagtgcatatatgtcctacttcaggaaaagtaaaacagtcatttacgaaagaaagtcaatctgtatcctaagcattttaataaaaaggttaaaacaaaaaanagagaaccnaagnagacanagangnacaacaagaaagacacaacagaagaaagaaggaaaacaataaaaacaaaacaaaaaagaaaacacaaccaaaaaaaataggaagacgacaacacaaaacaccgcgacagaatacgcacacacaggccgcagcccttcttgcgccgctaccgccgcacaactcatcccagcatgtccgctgagcgcggcaaccgacctaccggtggcgggaccgcggaatgcactggtatcgactatccacggaacccggcgccagtccccacagagtaacgcgcc

SEQ ID NO: 326301 - DNA, 874 bp, Homo sapiens
  misc_feature (26)..(27): n is a, c, g, or t
  misc_feature (30)..(30): n is a, c, g, or t
  misc_feature (40)..(40): n is a, c, g, or t
  misc_feature (55)..(55): n is a, c, g, or t
tttttctctcccccagcccacggggnnccntttgtagacntcgttagaaacgccngccattgtgttggaaaccgggacttgggccattatgtcccggggaggggtgtgacgtacatccggcgagtagctggcggtcccgggtgctgctggttagtgtgctctgagggagggtccgagccagccgctgttttgccggaggagcccctcaggccgtagtaagcattaataatgtctttcatctttgagtggatctacaatggcttcagcagtgtgctccagttcctaggactgtacaagaaatctggaaaacttgtattcttaggtttggataatgcaggcaaaaccactcttcttcacatgctcaaagatgacagattgggccaacatgttccaacactacatccgacatcagaagagctaacaattgctggaatgacctttacaacttttgatcttggtgggcacgagcaagcacgtcgcgtttggaaaaattatctcccagcaattaatgggattgtctttctggtggactgtgcagatcattctcgcctcgtggaatccaaagttgagcttaatgctttaatgactgatgaaacaatatccaatgtgccaatccttatcttgggtaacaaaattgacagaacagatgcaatcagtgaagaaaaactccgtgagatatttgggctttatggacagaccacaggaaaggggaatgtgaccctgaaggagctgaatgctcgccccatggaagtgttcatgtgcagtgtgctcaagaggcaaggttacggcgagggtttccgctggctctcccagtatattgactgatgtttggacggtgaaaataaaagagttttacttctctggactgatccta

SEQ ID NO: 326302 - DNA, 768 bp, Homo sapiens
  misc_feature (26)..(27): n is a, c, g, or t
  misc_feature (30)..(30): n is a, c, g, or t
  misc_feature (40)..(40): n is a, c, g, or t
  misc_feature (55)..(55): n is a, c, g, or t
tttttctctcccccagcccacggggnnccntttgtagacntcgttagaaacgccngccattgtgttggaaaccgggacttgggccattatgtcccggggaggggtgtgacgtacatccggcgagtagctggcggtcccgggtgctgctggttagtgtgctctgagggagggtccgagccagccgctgttttgccggaggagcccctcaggccgtagtaagcattaataatgtctttcatctttgagtggatctacaatggcttcagcagtgtgctccagttcctaggactgtacaagaaatctggaaaacttgtattcttaggtttggataatgcaggcaaaaccactcttcttcacatgctcaaagatgacagattgggccaacatgttccaacactacatccgacatcagaagagctaacaattgctggaatgacctttacaacttttgatcttggtgggcacgagcaagcacgtcgcgtttggaaaaattatctcccagcaattaatgggattgtctttctggtggactgtgcagatcattctcgcctcgtggaatccaaagttgagcttaataggcagcgatgtgctattgaaacttctaaaactatgcttttcttgacaaaccaatcctgattggcctaccgctttcaatagcaaattgagctgggaggagattcaaagatgctcattcaacaaatatttgttgagcacacattatatgccaagcactgtgataaggatacaatggtgagcaatacgggtacc

SEQ ID NO: 326303 - DNA, 845 bp, Homo sapiens
  misc_feature (26)..(27): n is a, c, g, or t
  misc_feature (30)..(30): n is a, c, g, or t
  misc_feature (40)..(40): n is a, c, g, or t
  misc_feature (55)..(55): n is a, c, g, or t
tttttctctcccccagcccacggggnnccntttgtagacntcgttagaaacgccngccattgtgttggaaaccgggacttgggccattatgtcccggggaggggtgtgacgtacatccggcgagtagctggcggtcccgggtgctgctggttagtgtgctctgagggagggtccgagccagccgctgttttgccggaggagcccctcaggccagatgcaggtctctctatgttacccaggctggtcttgaactcctgaggtcagggaggaatcccccacctcagccttgcaaaatgctgggattacaggtgtgagccacgggggcccggcctgaataagtattcttattttaagaaaatctatttgtaaaatgagtttgggtgtgattattcatgtatgaaaagattctcttcttatcccttaatggttctctaaaatagtgatgtcatttctttttataaattgagacccgtgtctgcaaaaatgattaaatattgagatagcattggtaaatggagcagggcaagtggtgctggccagtagaattttgggtgacttttgttttttagagttgtttacaggatagattaatatgtttttcattcaaatcaatgtgcttttcattcttattttctatttagtgcatctaagtggcattctgattcacattattgataagactgatttcctagagttgttcttcactggatgacagcagtcgtatgtctagggaatgtgaatgaaccgctgcctggaggagtaagtcacacagtaaaagaaagtgtaggcatacctcggatatactgtgagtttagttccagactactgaaataaaacaagtacag

SEQ ID NO: 326304 - DNA, 355 bp, Homo sapiens
gccccacggaacactattcctataagatagctgaaagaagctgctgtgaggagctcagctccaaacacaggatcagcaccttgtataggaattcccatgaattatgacttctcattctgttttatcagagtgcatatatgtcctacttcaggaaaagtaaaacagtcatttacgaaagaaagtcaatctgtatcctaagcattttaataaaaaggttaaaacaaatacgctatttccttttttttttttcattggtttgttctgagctctgagtttgaacaatgccgtttatttggggaggcaaccaaaagttccctgcatagaggaagagacatttagggtgcgtgtgagatac

SEQ ID NO: 326305 - DNA, 723 bp, Homo sapiens
  misc_feature (26)..(27): n is a, c, g, or t
  misc_feature (30)..(30): n is a, c, g, or t
  misc_feature (40)..(40): n is a, c, g, or t
  misc_feature (55)..(55): n is a, c, g, or t
tttttctctcccccagcccacggggnnccntttgtagacntcgttagaaacgccngccattgtgttggaaaccgggacttgggccattatgtcccggggaggggtgtgacgtacatccggcgagtagctggcggtcccgggtgctgctggttagtgtgctctgagggagggtccgagccagccgctgttttgccggaggagcccctcaggccgtagtaagcattaataatgtctttcatctttgagtggatctacaatggcttcagcagtgtgctccagttcctaggactgtacaagaaatctggaaaacttgtattcttaggtttggataatgcaggcaaaaccactcttcttcacatgctcaaagatgacagattgggccaacatgttccaacactacatccgacatcagaagagctaacaattgctggaatgacctttacaacttttgatcttggtgggcacgagcaagcgtgtttggaaaaattattttccagcaaataattgggattggtttttctgggggacttgggagattattttgggctagtgggaataaaagttggagttaaggctttaaatgattgatgaaaaatatattcacatgggccaaatctttatttttgggtaacaaaattggcaggaacaggaggcaattatggaagaaatgaacctttgaagaaacttaatggttgcccaatagaaaggttaattgtaaggggg

SEQ ID NO: 326306 - DNA, 3245 bp, Homo sapiens
  misc_feature (26)..(27): n is a, c, g, or t
  misc_feature (30)..(30): n is a, c, g, or t
  misc_feature (40)..(40): n is a, c, g, or t
  misc_feature (55)..(55): n is a, c, g, or t
tttttctctcccccagcccacggggnnccntttgtagacntcgttagaaacgccngccattgtgttggaaaccgggacttgggccattatgtcccggggaggggtgtgacgtacatccggcgagtagctggcggtcccgggtgctgctggttagtgtgctctgagggagggtccgagccagccgctgttttgccggaggagcccctcaggccgtagtaagcattaataatgtctttcatctttgagtggatctacaatggcttcagcagtgtgctccagttcctaggactgtacaagaaatctggaaaacttgtattcttaggtttggataatgcaggcaaaaccactcttcttcacatgctcaaagatgacagattgggccaacatgttccaacactacatccgacatcagaagagctaacaattgctggaatgacctttacaacttttgatcttggtgggcacgagcaagcacgtcgcgtttggaaaaattatctcccagcaattaatgggattgtctttctggtggactgtgcagatcattctcgcctcgtggaatccaaagttgagcttaatgctttaatgactgatgaaacaatatccaatgtgccaatccttatcttgggtaacaaaattgacagaacagatgcaatcagtgaagaaaaactccgtgagatatttgggctttatggacagaccacaggaaaggggaatgtgaccctgaaggagctgaatgctcgccccatggaagtgttcatgtgcagtgtgctcaagaggcaaggttacggcgagggtttccgctggctctcccagtatattgactgatgtttggacggtgaaaataaaagagttttacttctctggactgatcctattcacagcttcctcatgaacttttctaatagaacaaggaaagctctccaaccatgtctggcgttgagaagccaagagtctctgtcaactctctcattgcccagtggtgacatgtgctcttctccacactgttgggaggtaatgctgccccacgtgctggtgcaggtcagtatcctgggacttggaagctggcaggatttgccgggtaaagctgtatgccatcatggggcacctgaaaagaaaaacacgtctcaccactgtggttgattcaaaagaaagtgattctattttttaaagaaagcgttgttaatgtaattggtatccctcctaactttttgagttcacaatttacttggtccagagttttctattcttttttttttttaaactaatgaatgacatttagatacttcataaaattatgaacagatatggaggccagagctcatttgggtaaacttactcctgctgagttagcaggttggtgagagaagctcccctgagctcacctgtctctctgactgccttggagtaggtggcataaccttgtgcacagagaactagaaaaggggcagaaccccggccttgcagttgtggcaggtttccactgtggtaagctaggttcattcctcatcaaggaatgtgtagcagattgttcactgtggaggagttaattatagaatgggttattgttgttattcttactcatgaagttacagattttagccagtctttgcttttatacttttgtgaaatttaatttctctctatagcaccttcctttttcgttttcagttatcaaaagtgactttgacctcataaaagagttgagaacatctctcgtgtcacatactgcaggtgcatcagttacttttgcacagattctagggggacatttttctgaataggaagacaggacaaagttaacagcttaagggctcttaattctgtgagttgaggacttaaaagtattgtagcatttgtttggatccatgaaaaatgtattcagtgggctttaaaatttccatttgcagaatttggtctctcaggctgtttgggagctcttttttttacattttttctcctttgacacctattttattggtgtttaaagtaaaggttaacatctgtagcttttccaggtttttttttttttttttttgatatgaaattgtctttctccattgcagaaataagctagggaaacactaacccaaaaactttctgtagagctgttcctttggaggcagcatcacttattggcagtaaagactcagtataaaagcaccagcatccctacttgggtgatggggattaattttatagcattccattttcctagtgccacatgtgaaattggattttgatgatcttaatctatattctacccttataataaaagatcaaaagatatatctcctatgaacagattggagataggagatgaaaagttgggaggatgtctttattctaatgtgagggtagggaaaatgtggataacattactggggtgaaggaggcattgttctttagttggagttctcattcttattctccagtactgacttgtggggaaagcatactttttcactgccaggtactgaatgcagaggctcagtgaagtatatatgtgggaagtgcatgcatttcgtttattagcaaacatagctggattaagacaaagttgttggtttggaaaggggttaaagccttaagtgaacaaatctagctaacagtgaatgaactaggtaatataacttgcatatttttaatttcctttggttaaaggtcccccatacttctctgttcggagacatgagaagtatgattacttcagtgttagttttcttaattttttttttcccctatttgtcccttgtcactttgttgcaagctagaaatctgtgggttatacatagggcagctctttgtgaaagtggtttattccactggagaaaggggattgaaaatcagttagaaccaatgtatttcttgccccacggaacactattcctataagatagctgaaagaagctgctgtgaggagctcagctccaaacacaggatcagcaccttgtataggaattcccatgaattatgacttctcattctgttttatcagagtgcatatatgtcctacttcaggaaaagtaaaacagtcatttacgaaagaaagtcaatctgtatcctaagcattttaataaaaaggttaaaacaaaaaaaaaaaaaaaacctgggggggggcccggccccaaatccgccttatagggagtcgtataacaatcatttggccggcgtttacaacggggggactggaaaacccctgggttaccaaacttaatcgctttggagaaaatcctctttccgccagt

SEQ ID NO: 326307 - DNA, 3466 bp, Homo sapiens
  misc_feature (26)..(27): n is a, c, g, or t
  misc_feature (30)..(30): n is a, c, g, or t
  misc_feature (40)..(40): n is a, c, g, or t
  misc_feature (55)..(55): n is a, c, g, or t
  misc_feature (3166)..(3166): n is a, c, g, or t
  misc_feature (3175)..(3175): n is a, c, g, or t
  misc_feature (3179)..(3179): n is a, c, g, or t
  misc_feature (3185)..(3185): n is a, c, g, or t
  misc_feature (3189)..(3189): n is a, c, g, or t
  misc_feature (3191)..(3191): n is a, c, g, or t
tttttctctcccccagcccacggggnnccntttgtagacntcgttagaaacgccngccattgtgttggaaaccgggacttgggccattatgtcccggggaggggtgtgacgtacatccggcgagtagctggcggtcccgggtgctgctggttagtgtgctctgagggagggtccgagccagccgctgttttgccggaggagcccctcaggccggctgcttccaaccttcaatttgtaaaaaaaccagaaaacctcaggatccacaaagtatcatcaaatgaggtagtaagcattaataatgtctttcatctttgagtggatctacaatggcttcagcagtgtgctccagttcctaggactgtacaagaaatctggaaaacttgtattcttaggtttggataatgcaggcaaaaccactcttcttcacatgctcaaagatgacagattgggccaacatgttccaacactacatccgacatcagaagagctaacaattgctggaatgacctttacaacttttgatcttggtgggcacgagcaagcacgtcgcgtttggaaaaattatctcccagcaattaatgggattgtctttctggtggactgtgcagatcattctcgcctcgtggaatccaaagttgagcttaatgctttaatgactgatgaaacaatatccaatgtgccaatccttatcttgggtaacaaaattgacagaacagatgcaatcagtgaagaaaaactccgtgagatatttgggctttatggacagaccacaggaaaggggaatgtgaccctgaaggagctgaatgctcgccccatggaagtgttcatgtgcagtgtgctcaagaggcaaggttacggcgagggtttccgctggctctcccagtatattgactgatgtttggacggtgaaaataaaagagttttacttctctggactgatcctattcacagcttcctcatgaacttttctaatagaacaaggaaagctctccaaccatgtctggcgttgagaagccaagagtctctgtcaactctctcattgcccagtggtgacatgtgctcttctccacactgttgggaggtaatgctgccccacgtgctggtgcaggtcagtatcctgggacttggaagctggcaggatttgccgggtaaagctgtatgccatcatggggcacctgaaaagaaaaacacgtctcaccactgtggttgattcaaaagaaagtgattctattttttaaagaaagcgttgttaatgtaattggtatccctcctaactttttgagttcacaatttacttggtccagagttttctattcttttttttttttaaactaatgaatgacatttagatacttcataaaattatgaacagatatggaggccagagctcatttgggtaaacttactcctgctgagttagcaggttggtgagagaagctcccctgagctcacctgtctctctgactgccttggagtaggtggcataaccttgtgcacagagaactagaaaaggggcagaaccccggccttgcagttgtggcaggtttccactgtggtaagctaggttcattcctcatcaaggaatgtgtagcagattgttcactgtggaggagttaattatagaatgggttattgttgttattcttactcatgaagttacagattttagccagtctttgcttttatacttttgtgaaatttaatttctctctatagcaccttcctttttcgttttcagttatcaaaagtgactttgacctcataaaagagttgagaacatctctcgtgtcacatactgcaggtgcatcagttacttttgcacagattctagggggacatttttctgaataggaagacaggacaaagttaacagcttaagggctcttaattctgtgagttgaggacttaaaagtattgtagcatttgtttggatccatgaaaaatgtattcagtgggctttaaaatttccatttgcagaatttggtctctcaggctgtttgggagctcttttttttacattttttctcctttgacacctattttattggtgtttaaagtaaaggttaacatctgtagcttttccaggtttttttttttttttttttgatatgaaattgtctttctccattgcagaaataagctagggaaacactaacccaaaaactttctgtagagctgttcctttggaggcagcatcacttattggcagtaaagactcagtataaaagcaccagcatccctacttgggtgatggggattaattttatagcattccattttcctagtgccacatgtgaaattggattttgatgatcttaatctatattctacccttataataaaagatcaaaagatatatctcctatgaacagattggagataggagatgaaaagttgggaggatgtctttattctaatgtgagggtagggaaaatgtggataacattactggggtgaaggaggcattgttctttagttggagttctcattcttattctccagtactgacttgtggggaaagcatactttttcactgccaggtactgaatgcagaggctcagtgaagtatatatgtgggaagtgcatgcatttcgtttattagcaaacatagctggattaagacaaagttgttggtttggaaaggggttaaagccttaagtgaacaaatctagctaacagtgaatgaactaggtaatataacttgcatatttttaatttcctttggttaaaggtcccccatacttctctgttcggagacatgagaagtatgattacttcagtgttagttttcttaattttttttttcccctatttgtcccttgtcactttgttgcaagctagaaatctgtgggttatacatagggcagctctttgtgaaagtggtttattccactggagaaaggggattgaaaatcagttagaaccaatgtatttcttgccccacggaacactattcctataagatagctgaaagaagctgctgtgaggagctcagctccaaacacaggatcagcaccttgtataggaattcccatgaattatgacttctcattctgttttatcagagtgcatatatgtcctacttcaggaaaagtaaaacagtcatttacgaaagaaagtcaatctgtatcctaagcattttaataaaaaggttaaaacaaaaaanagagaaccnaagnagacanagangnacaacaagaaagacacaacagaagaaagaaggaaaacaataaaaacaaaacaaaaaagaaaacacaaccaaaaaaaataggaagacgacaacacaaaacaccgcgacagaatacgcacacacaggccgcagcccttcttgcgccgctaccgccgcacaactcatcccagcatgtccgctgagcgcggcaaccgacctaccggtggcgggaccgcggaatgcactggtatcgactatccacggaacccggcgccagtccccacagagtaacgcgcc

SEQ ID NO: 326308 - DNA, 3047 bp, Homo sapiens
  misc_feature (26)..(27): n is a, c, g, or t
  misc_feature (30)..(30): n is a, c, g, or t
  misc_feature (40)..(40): n is a, c, g, or t
  misc_feature (55)..(55): n is a, c, g, or t
  misc_feature (2884)..(2884): n is a, c, g, or t
tttttctctcccccagcccacggggnnccntttgtagacntcgttagaaacgccngccattgtgttggaaaccgggacttgggccattatgtcccggggaggggtgtgacgtacatccggcgagtagctggcggtcccgggtgctgctggttagtgtgctctgagggagggtccgagccagccgctgttttgccggaggagcccctcaggccgtagtaagcattaataatgtctttcatctttgagtggatctacaatggcttcagcagtgtgctccagttcctaggactgtacaagaaatctggaaaacttgtattcttaggtttggataatgcaggcaaaaccactcttcttcacatgctcaaagatgacagattgggccaacatgttccaacactacatccgacatcagaagagctaacaattgctggaatgacctttacaacttttgatcttggtgggcacgagcaagcacgtcgcgtttggaaaaattatctcccagcaattaatgggattgtctttctggtggactgtgcagatcattctcgcctcgtggaatccaaagttgagcttaatgctttaatgactgatgaaacaatatccaatgtgccaatccttatcttgggtaacaaaattgacagaacagatgcaatcagtgaagaaaaactccgtgagatatttgggctttatggacagaccacaggaaaggggaatgtgaccctgaaggagctgaatgctcgccccatggaagtgttcatgtgcagtgtgctcaagaggcaaggttacggcgagggtttccgctggctctcccagtatattgactgatgtttggacggtgaaaataaaagagttttacttctctggactgatcctattcacagcttcctcatgaacttttctaatagaacaaggaaagctctccaaccatgtctggcgttgagaagccaagagtctctgtcaactctctcattgcccagtggtgacatgtgctcttctccacactgttgggaggtaatgctgccccacgtgctggtgcaggtcagtatcctgggacttggaagctggcaggatttgccgggtaaagctgtatgccatcatggggcacctgaaaagaaaaacacgtctcaccactgtggttgattcaaaagaaagtgattctattttttaaagaaagcgttgttaatgtaattggtatccctcctaactttttgagttcacaatttacttggtccagagttttctattcttttttttttttaaactaatgaatgacatttagatacttcataaaattatgaacagatatggaggccagagctcatttgggtaaacttactcctgctgagttagcaggttggtgagagaagctcccctgagctcacctgtctctctgactgccttggagtaggtggcataaccttgtgcacagagaactagaaaaggggcagaaccccggccttgcagttgtggcaggtttccactgtggtaagctaggttcattcctcatcaaggaatgtgtagcagattgttcactgtggaggagttaattatagaatgggttattgttgttattcttactcatgaagttacagattttagccagtctttgcttttatacttttgtgaaatttaatttctctctatagcaccttcctttttcgttttcagttatcaaaagtgactttgacctcataaaagagttgagaacatctctcgtgtcacatactgcaggtgcatcagttacttttgcacagattctagggggacatttttctgaataggaagacaggacaaagttaacagcttaagggctcttaattctgtgagttgaggacttaaaagtattgtagcatttgtttggatccatgaaaaatgtattcagtgggctttaaaatttccatttgcagaatttggtctctcaggctgtttgggagctcttttttttacattttttctcctttgacacctattttattggtgtttaaagtaaaggttaacatctgtagcttttccaggtttttttttttttttttttgatatgaaattgtctttctccattgcagaaataagctagggaaacactaacccaaaaactttctgtagagctgttcctttggaggcagcatcacttattggcagtaaagactcagtataaaagcaccagcatccctacttgggtgatggggattaattttatagcattccattttcctagtgccacatgtgaaattggattttgatgatcttaatctatattctacccttataataaaagatcaaaagatatatctcctatgaacagattggagataggagatgaaaagttgggaggatgtctttattctaatgtgagggtagggaaaatgtggataacattactggggtgaaggaggcattgttctttagttggagttctcattcttattctccagtactgacttgtggggaaagcatactttttcactgccaggtactgaatgcagaggctcagtgaagtatatatgtgggaagtgcatgcatttcgtttattagcaaacatagctggattaagacaaagttgttggtttggaaaggggttaaagccttaagtgaacaaatctagctaacagtgaatgaactaggtaatataacttgcatatttttaatttcctttggttaaaggtcccccatacttctctgttcggagacatgagaagtatgattacttcagtgttagttttcttaattttttttttcccctatttgtcccttgtcactttgttgcaagctagaaatctgtgggttatacatagggcagctctttgtgaaagtggtttattccactggagaaaggggattgaaaatcagttagaaccaatgtataacccatggcatttcgtttatntagcaaacataggctggatttacgacaaagttgttggtttggaaagggggttaaagccttaagctgaaccacaacaaccacacaccacacacacaaaaaaagggggcgccgcccaaaaaaaacccccgggggcccattcccacccctttttctacagggccca

SEQ ID NO: 326309 - DNA, 665 bp, Homo sapiens
  misc_feature (26)..(27): n is a, c, g, or t
  misc_feature (30)..(30): n is a, c, g, or t
  misc_feature (40)..(40): n is a, c, g, or t
  misc_feature (55)..(55): n is a, c, g, or t
tttttctctcccccagcccacggggnnccntttgtagacntcgttagaaacgccngccattgtgttggaaaccgggacttgggccattatgtcccggggaggggtgtgacgtacatccggcgagtagctggcggtcccgggtgctgctggttagtgtgctctgagggagggtccgagccagccgctgttttgccggaggagcccctcaggccgtagtaagcattaataatgtctttcatctttgagtggatctacaatggcttcagcagtgtgctccagttcctaggactgtacaagaaatctggaaaacttgtattcttaggtttggataatgcaggcaaaaccactcttcttcacatgctcaaagatgacagattgggccaacatgttccaacactacatccgacatcagaagagctaacaattgctggaatgacctttacaacttttgatcttggtgggcacgagcaagcacgtcgcgtttggaaaaattatctcccagcaattaatgggattgtctttctggtggactgtgcagatcattctcgcctcgtggaatccaaagttgagcttaatgtatgttttgtcctttaatgtgtattttaatgtatattttgttcttttttggcctctatttttttttaaggaatatagctcagtagtgc

SEQ ID NO: 326310 - DNA, 1150 bp, Homo sapiens
aacaagacaaagtccctgcctccatggagctcacagtaataccttcttacactttcctaatttgctaatcttttcagactctctttataacacatttctgatataatttttcagtcctctccatgagtcgagtggtattatccccagtttgcagatgagaagactggtgcaggtagtttgcatcatttatccaaggtctctggtctcttagtcaaatgccgtttctataattccatattattctatggtggcatttaggatgctaaccttaaaaataagcagcatgctttttctgctagcttgtttttatatacgtttgagaccctagattttataaaaagtaatttcccagttttgctcgtggtgtactctttttttttttttttttttaagcattcagagcaacagaaaatgtaagagcatggtgaatgatccctacagccagagcttgaagcaaatgtaacttttttggcaggacagtcttatcttaaatgataacagcatcaaggaatgagggtttattttctatacaatccccttttctttataatccactatgggttcctttgtcacaactttgattttagagctacatgtgactgtgtctgtcatgtagctcagatgaggaaattgaagctcagaataaatgatttgcccaaaattacatggtgatctcagttcagttctagactgaactgagactagaactctacttcttttcatcctgcataatgtcatgggatctcctgtttgaatttactgctagggcttacctaggaccactgtcctaatacctctgaagataatggaatgagagtgaggttttaattagtttggctaattgttatggtattacctgcatgtagtataacctgaattttaaagtgttaagaaaaacccctttaaagctttgagtagtaatttttttctgattctttaataatttaataaactttgtaacttttgccatctgattaactccttggagcaaggggaggagcaaagtagccctccacagaaactgtcaggcccttttggtcctgatgtttttctcattccacattccttcattctcttgcctgtgccatttctctttgagcagtgtctctctccccagtgtggtgtctgtatgtttcatgcatttgtatcc

SEQ ID NO: 326311 - DNA, 357 bp, Homo sapiens
ctgcaccctgaggactacgacacactgcaagaggaaaatgatgagacggcttctcctgctgatgttttttatgatgtctcaaaagagaatgaaaattccatggttccccagggggcaccagttggtagcttaagtgtgaagaacaaagcacattgtcttcaggatttccttatggatgttgagaaagatgaattagattctggtgaaaaaatacatttaaatcctgttggctcagataaggtgaatggacagtcactggaaactggatcagaaagggaatgcacaaatatccttgaaggtgatgaatctgactcattgactgattatgatattgtaggaggaaaagagagcttcact

SEQ ID NO: 326312 - DNA, 2693 bp, Homo sapiens
cgcgcgcccgccgttcccgcgaggcccacctagagccggaatgcgcaggcgcagtgtccccgggccaagatggctgcgcggtgctccacacgctggttgctggtggttgtggggaccccgcggctgccggctatatcgggtagaggggcccggccgcccagggagggcgtggtgggggcatggctgagccgcaagctgagcgtccccgcctttgcgtcttccctgacctcttgcggcccccgagcgctgctgacattgagacctggtgtcagcctcacaggaacaaaacattaccctttcatttgtactgcctccttccacacgagtgcccctttggccaaagaagattattatcagatattaggagtgcctcgaaatgccagccagaaagagatcaagaaagcctattatcagcttgccaagaagtatcaccctgacacaaataaggatgatcccaaagccaaggagaagttctcccagctggcagaagcctatgaggttttgagtgatgaggtgaagaggaagcagtacgatgcctacggctctgcaggcttcgatcctggggccagcggctcccagcatagctactggaagggaggccccactgtggaccccgaggagctgttcaggaagatctttggcgagttctcatcctcttcatttggagatttccagaccgtgtttgatcagcctcaggaatacttcatggagttgacattcaatcaagctgcaaagggggtcaacaaggagttcaccgtgaacatcatggacacgtgtgagcgctgcaacggcaaggggaacgagcccggcaccaaggtgcagcattgccactactgtggcggctccggcatggaaaccatcaacacaggcccttttgtgatgcgttccacgtgtaggagatgtggtggccgcggctccatcatcatatcgccctgtgtggtctgcaggggagcaggacaagccaagcagaaaaagcgagtgatgatccctgtgcctgcaggagtcgaggatggccagaccgtgaggatgcctgtgggaaaaagggaaattttcattacgttcagggtgcagaaaagccctgtgttccggagggacggcgcagacatccactccgacctctttatttctatagctcaggctcttcttgggggaacagccagagcccagggcctgtacgagacgatcaacgtgacgatcccccctgggactcagacagaccagaagattcggatgggtgggaaaggcatcccccggattaacagctacggctacggagaccactacatccacatcaagatacgagttccaaagaggctaacgagccggcagcagagcctgatcctgagctacgccgaggacgagacagatgtggaggggacggtgaacggcgtcaccctcaccagctctggtggcagcaccatggatagctccgcaggaagcaaggctaggcgtgaggctggggaggacgaggagggattcctttccaaacttaagaaaatgtttacctcatgatatcccagccgaggaaaaagatccactggaaactaggccgggaagcagcagcccctccaagggccagggcacctgggagacgggaggattccagaacagcagcactgagctcccacccgcagagcctctggacggccttggcaacagcaaaatcatgggacaacacctctctccacggaaaggtcacagtggacagcccgggcagtaggatgcagccccagaggctggtggcagtttcctgtccattggtaggtgacggcccctggctcaggcagagggagatggttagactcttgcagggctaaaactctaatttggaattgaatattgtggatatcttagttaaaggccatgcttacagcttagaaatgaagccttaagctgcatcaagttacgaagtgattaatttccttctcagcaaacctccgggaggttccagaatgagttcttcctgacaggttgtcttcactgggagcgtggggcccccaggccccaccagcaccgtcctcccctaatgaggggccctgccgaggcatcagctgctctgctcagttagtttttattcccggggtaccaagcagctgcacagtcggtgcctgggaggcacgtagaggcccagagagtccctgggggttctgctctgaccgtgtgggtggtgatccttgtcaggatgtacagtccttgctcccaccccatccaggatggccgcctgtccctgactattgagtcctgttgttgtaagccaggcatggagggctcctgcccttctgctgagccacagcccattgcagcactgtgctggccagacttcagctgccttgggaactgaagccctgccactgttgctagtcaggggcttggttctcccacttacactgttgacatctattttctgaagtgtgtttaaattattcagtgctaatcattgttttttcctttgtaaatgttgattcagaaaaggaaagcacaggctaagcagttgaaggttccccaccattcagtgagagcagaacccccattccccagcctctgctggtagcatgtcgcagtttccatgtgtttcaggatcttcgggctgtcgttagacaggttaatgaagaacacttctcaacagtttcctttttgttttcctttataattcactaaaataaagcatctattagtgtctgatttaggaatgt

SEQ ID NO: 326313 - DNA, 2985 bp, Homo sapiens
cgcgcgcccgccgttcccgcgaggcccacctagagccggaatgcgcaggcgcagtgtccccgggccaagatggctgcgcggtgctccacacgctggttgctggtggttgtggggaccccgcggctgccggctatatcgggtagaggggcccggccgcccagggagggcgtggtgggggcatggctgagccgcaagctgagcgtccccgcctttgcgtcttccctgacctcttgcggcccccgagcgctgctgacattgagacctggtgtcagcctcacaggaacaaaacattaccctttcatttgtactgcctccttccacacgagtgcccctttggccaaagaagattattatcagatattaggagtgcctcgaaatgccagccagaaagagatcaagaaagcctattatcagcttgccaagaagtatcaccctgacacaaataaggatgatcccaaagccaaggagaagttctcccagctggcagaagcctatgaggttttgagtgatgaggtgaagaggaagcagtacgatgcctacggctctgcaggcttcgatcctggggccagcggctcccagcatagctactggaagggaggccccactgtggaccccgaggagctgttcaggaagatctttggcgagttctcatcctcttcatttggagatttccagaccgtgtttgatcagcctcaggaatacttcatggagttgacattcaatcaagctgcaaagggggtcaacaaggagttcaccgtgaacatcatggacacgtgtgagcgctgcaacggcaaggggaacgagcccggcaccaaggtgcagcattgccactactgtggcggctccggcatggaaaccatcaacacaggcccttttgtgatgcgttccacgtgtaggagatgtggtggccgcggctccatcatcatatcgccctgtgtggtctgcaggggagcaggacaagccaagcagaaaaagcgagtgatgatccctgtgcctgcaggagtcgaggatggccagaccgtgaggatgcctgtgggaaaaagggaaattttcattacgttcagggtgcagaaaagccctgtgttccggagggacggcgcagacatccactccgacctctttatttctatagctcaggctcttcttgggggaacagccagagcccagggcctgtacgagacgatcaacgtgacgatcccccctgggactcagacagaccagaagattcggatgggtgggaaaggcatcccccggattaacagctacggctacggagaccactacatccacatcaagatacgagttccaaagaggctaacgagccggcagcagagcctgatcctgagctacgccgaggacgagacagatgtggaggggacggtgaacggcgtcaccctcaccagctctggaaaaagatccactggaaactaggccgggaagcagcagcccctccaagggccagggcacctgggagacgggaggattccagaacagcagcactgagctcccacccgcagagcctctggacggccttggcaacagcaaaatcatgggacaacacctctctccacggaaaggtcacagtggacagcccgggcagtaggatgcagccccagaggctggtggcagtttcctgtccattggtaggtgacggcccctggctcaggcagagggagatggttagactcttgcagggctaaaactctaatttggaattgaatattgtggatatcttagttaaaggccatgcttacagcttagaaatgaagccttaagctgcatcaagttacgaagtgattaatttccttctcagcaaacctccgggaggttccagaatgagttcttcctgacaggttgtcttcactgggagcgtggggcccccaggccccaccagcaccgtcctcccctaatgaggggccctgccgaggcatcagctgctctgctcagttagtttttattcccggggtaccaagcagctgcacagtcggtgcctgggaggcacgtagaggcccagagagtccctgggggttctgctctgaccgtgtgggtggtgatccttgtcaggatgtacagtccttgctcccaccccatccaggatggccgcctgtccctgactattgagtcctgttgttgtaagccaggcatggagggctcctgcccttctgctgagccacagcccattgcagcactgtgctggccagacttcagctgccttgggaactgaagccctgccactgttgctagtcaggggcttggttctcccacttacactgttgacatctattttctgaagtgtgtttaaattattcagtgctaatcattgttttttcctttgtaaatgttgattcagaaaaggaaagcacaggctaagcagttgaaggttccccaccattcagtgagagcagaacccccattccccagcctctgctggtagcatgtcgcagtttccatgtgtttcaggatcttcgggctgtcgttagacaggttaatgaagaacacttctcaacagtttcctttttgttttcctttataattcactaaaataaagcatctattagtgtctgatttaggaatgtaaaatgattctgtattaatgtaaataagattatctattgcaaaaagatatttcaaacctaaaaaaaaaaaaaaaaaaaaaaaaaaaaaattgtgtttggggcggccttgggccccgggaaaagttttttaaaccttttggttgtggggggggggcgccccaggaagggtgataacagtgagaccacgtggcgccaaagcgcgtgggttccccaaaggagagagaccccggggccagagaaccacaggtgtggctggggtttcctcccccacaattaaaaaaagccgcccggggggaagaccggagggtgtctcggaaccaattcccaaaagggggagtcccaggagggccatcagcggggtcgctatcaccaggggggtcccaaggggggcccagaattaaaattaagg

SEQ ID NO: 326314 - DNA, 4144 bp, Homo sapiens
cgcgcgcccgccgttcccgcgaggcccacctagagccggaatgcgcaggcgcagtgtccccgggccaagatggctgcgcggtgctccacacgctggttgctggtggttgtggggaccccgcggctgccggctatatcgggtagaggggcccggccgcccagggagggcgtggtgggggcatggctgagccgcaagctgagcgtccccgcctttgcgtcttccctgacctcttgcggcccccgagcgctgctgacattgagacctggtgtcagcctcacaggaacaaaacattaccctttcatttgtactgcctccttccacacgagtgcccctttggccaaagaagattattatcagatattaggagtgcctcgaaatgccagccagaaagagatcaagaaagcctattatcagcttgccaagaagtatcaccctgacacaaataaggatgatcccaaagccaaggagaagttctcccagctggcagaagcctatgaggttttgagtgatgaggtgaagaggaagcagtacgatgcctacggctctgcaggcttcgatcctggggccagcggctcccagcatagctactggaagggaggccccactgtggaccccgaggagctgttcaggaagatctttggcgagttctcatcctcttcatttggagatttccagaccgtgtttgatcagcctcaggaatacttcatggagttgacattcaatcaagctgcaaagggggtcaacaaggagttcaccgtgaacatcatggacacgtgtgagcgctgcaacggcaaggggaacgagcccggcaccaaggtgcagcattgccactactgtggcggctccggcatggaaaccatcaacacaggcccttttgtgatgcgttccacgtgtaggagatgtggtggccgcggctccatcatcatatcgccctgtgtggtctgcaggggagcaggacaagccaagcagaaaaagcgagtgatgatccctgtgcctgcaggagtcgaggatggccagaccgtgaggatgcctgtgggaaaaagggaaattttcattacgttcagggtgcagaaaagccctgtgttccggagggacggcgcagacatccactccgacctctttatttctatagctcaggctcttcttgggggaacagccagagcccagggcctgtacgagacgatcaacgtgacgatcccccctgggactcagacagaccagaagattcggatgggtgggaaaggcatcccccggattaacagctacggctacggagaccactacatccacatcaagatacgagttccaaagaggctaacgagccggcagcagagcctgatcctgagctacgccgaggacgagacagatgtggaggggacggtgaacggcgtcaccctcaccagctctggtggcagcaccatggatagctccgcaggaagcaaggctaggcgtgaggctggggaggacgaggagggattcctttccaaacttaagaaaatgtttacctcatgatatcccagccgaggaaaaagatccactggaaactaggccgggaagcagcagcccctccaagggccagggcacctgggagacgggaggattccagaacagcagcactgagctcccacccgcagagcctctggacggccttggcaacagcaaaatcatgggacaacacctctctccacggaaaggtcacagtggacagcccgggcagtaggatgcagccccagaggctggtggcagtttcctgtccattggtaggtgacggcccctggctcaggcagagggagatggttagactcttgcagggctaaaactctaatttggaattgaatattgtggatatcttagttaaaggccatgcttacagcttagaaatgaagccttaagctgcatcaagttacgaagtgattaatttccttctcagcaaacctccgggaggttccagaatgagttcttcctgacaggttgtcttcactgggagcgtggggcccccaggccccaccagcaccgtcctcccctaatgaggggccctgccgaggcatcagctgctctgctcagttagtttttattcccggggtaccaagcagctgcacagtcggtgcctgggaggcacgtagaggcccagagagtccctgggggttctgctctgaccgtgtgggtggtgatccttgtcaggatgtacagtccttgctcccaccccatccaggatggccgcctgtccctgactattgagtcctgttgttgtaagccaggcatggagggctcctgcccttctgctgagccacagcccattgcagcactgtgctggccagacttcagctgccttgggaactgaagccctgccactgttgctagtcaggggcttggttctcccacttacactgttgacatctattttctgaagtgtgtttaaattattcagtgctaatcattgttttttcctttgtaaatgttgattcagaaaaggaaagcacaggctaagcagttgaaggttccccaccattcagtgagagcagaacccccattccccagcctctgctggtagcatgtcgcagtttccatgtgtttcaggatcttcgggctgtcgttagacaggttaatgaagaacacttctcaacagtttcctttttgttttcctttataattcactaaaataaagcatctattagtgtctgatttaggaatgtaaaatgattctgtattaatgtaaataagattatctattgcaaaaagatatttcaaacctaaaattgtggtcatttcttctttgaaagaattcagacagcctctgcaggtggcttatgggggttacaggagacttggctggcctcatcctgtgctcacagccacccagagcacatagaggcagatgggtctggggtgccgacagtgctgaccctcacttggattccagagcagggtgcttgccatgacacaacagtcccctgtgagtgaatgttctagaatctggatgtgacttttttcttgggagcccatgctgtgagagctggccaatgtccctgggtccctgcatttcagtctccctcactggattgtttcccttcattctttccagtctttgcatcttttacattcaattttattttattttttttttaaatggagtctcgctgtgtcgcccatactggagtgaagtgataccatctctgctcactgcaacctctgcctcctgggcccaagcgattctcctgtctcaggcttccgagtagctgggactacaggtgcatgccaccacgcctggctaattcttgtatttttagtagagatggggggtttcaccatgttggccaggctggtcttgaacttctgacctcaggtgatccgcccacctcggcctcccaaagtgctgggattacaggtgtgagccaccatgcctggcccgttgcttttcttgttgatgttactagcactgttaggagctggagaggtggcctgggcagagtgctgtgggtacctagggcaggacatgcctgactcccctcgggagcactcatgctttttgttaattagataatttctttttttttttgagatggtgtctagctctgtctctaggtggagttcagtggtgcaatctccacctcccagatttaagcaattctcctgcctcagcctcccaagtagctgggactataggcttgtgccgccacgcccagctaaattttggtattttcagtagagacggggtttcaccttgttggccaggatggtctctatctcctgacttgtgatccgccaccttggctcccaagatgctgggattaccgggcgttggccagtgcgcctggcctattcagatatttcttacttgcttcacataccgcacgtggtaaatctgtccctcttgtaaactgtatttagattaccacagtgacacttgttgaatgactagggagggggtaggagcttttgtcagaagttgagggatgcccttagtgtcacccgtggcaggtcaaggttcgcccttgccaggtgggtccctctccaagtgcggagggtgcgacgaagtttcacaatcacgagaacagtgtgacttccgcaaagattaagcggcacgactatcccgagaaatgggggggccccacagtaacgaagggatcgcaggtaggaaaacacg

SEQ ID NO: 326315 - DNA, 4090 bp, Homo sapiens
cgcgcgcccgccgttcccgcgaggcccacctagagccggaatgcgcaggcgcagtgtccccgggccaagatggctgcgcggtgctccacacgctggttgctggtggttgtggggaccccgcggctgccggctatatcgggtagaggggcccggccgcccagggagggcgtggtgggggcatggctgagccgcaagctgagcgtccccgcctttgcgtcttccctgacctcttgcggcccccgagcgctgctgacattgagacctggtgtcagcctcacaggaacaaaacattaccctttcatttgtactgcctccttccacacgagtgcccctttggccaaagaagattattatcagatattaggagtgcctcgaaatgccagccagaaagagatcaagaaagcctattatcagcttgccaagaagtatcaccctgacacaaataaggatgatcccaaagccaaggagaagttctcccagctggcagaagcctatgaggttttgagtgatgaggtgaagaggaagcagtacgatgcctacggctctgcaggcttcgatcctggggccagcggctcccagcatagctactggaagggaggccccactgtggaccccgaggagctgttcaggaagatctttggcgagttctcatcctcttcatttggagatttccagaccgtgtttgatcagcctcaggaatacttcatggagttgacattcaatcaagctgcaaagggggtcaacaaggagttcaccgtgaacatcatggacacgtgtgagcgctgcaacggcaaggggaacgagcccggcaccaaggtgcagcattgccactactgtggcggctccggcatggaaaccatcaacacaggcccttttgtgatgcgttccacgtgtaggagatgtggtggccgcggctccatcatcatatcgccctgtgtggtctgcaggggagcaggacaagccaagcagaaaaagcgagtgatgatccctgtgcctgcaggagtcgaggatggccagaccgtgaggatgcctgtgggaaaaagggaaattttcattacgttcagggtgcagaaaagccctgtgttccggagggacggcgcagacatccactccgacctctttatttctatagctcaggctcttcttgggggaacagccagagcccagggcctgtacgagacgatcaacgtgacgatcccccctgggactcagacagaccagaagattcggatgggtgggaaaggcatcccccggattaacagctacggctacggagaccactacatccacatcaagatacgagttccaaagaggctaacgagccggcagcagagcctgatcctgagctacgccgaggacgagacagatgtggaggggacggtgaacggcgtcaccctcaccagctctggtggcagcaccatggatagctccgcaggaagcaaggctaggcgtgaggctggggaggacgaggagggattcctttccaaacttaagaaaatgtttacctcatgatatcccagccgaggaaaaagatccactggaaactaggccgggaagcagcagcccctccaagggccagggcacctgggagacgggaggattccagaacagcagcactgagctcccacccgcagagcctctggacggccttggcaacagcaaaatcatgggacaacacctctctccacggaaaggtcacagtggacagcccgggcagtaggatgcagccccagaggctggtggcagtttcctgtccattggtaggtgacggcccctggctcaggcagagggagatggttagactcttgcagggttacagcttagaaatgaagccttaagctgcatcaagttacgaagtgattaatttccttctcagcaaacctccgggaggttccagaatgagttcttcctgacaggttgtcttcactgggagcgtggggcccccaggccccaccagcaccgtcctcccctaatgaggggccctgccgaggcatcagctgctctgctcagttagtttttattcccggggtaccaagcagctgcacagtcggtgcctgggaggcacgtagaggcccagagagtccctgggggttctgctctgaccgtgtgggtggtgatccttgtcaggatgtacagtccttgctcccaccccatccaggatggccgcctgtccctgactattgagtcctgttgttgtaagccaggcatggagggctcctgcccttctgctgagccacagcccattgcagcactgtgctggccagacttcagctgccttgggaactgaagccctgccactgttgctagtcaggggcttggttctcccacttacactgttgacatctattttctgaagtgtgtttaaattattcagtgctaatcattgttttttcctttgtaaatgttgattcagaaaaggaaagcacaggctaagcagttgaaggttccccaccattcagtgagagcagaacccccattccccagcctctgctggtagcatgtcgcagtttccatgtgtttcaggatcttcgggctgtcgttagacaggttaatgaagaacacttctcaacagtttcctttttgttttcctttataattcactaaaataaagcatctattagtgtctgatttaggaatgtaaaatgattctgtattaatgtaaataagattatctattgcaaaaagatatttcaaacctaaaattgtggtcatttcttctttgaaagaattcagacagcctctgcaggtggcttatgggggttacaggagacttggctggcctcatcctgtgctcacagccacccagagcacatagaggcagatgggtctggggtgccgacagtgctgaccctcacttggattccagagcagggtgcttgccatgacacaacagtcccctgtgagtgaatgttctagaatctggatgtgacttttttcttgggagcccatgctgtgagagctggccaatgtccctgggtccctgcatttcagtctccctcactggattgtttcccttcattctttccagtctttgcatcttttacattcaattttattttattttttttttaaatggagtctcgctgtgtcgcccatactggagtgaagtgataccatctctgctcactgcaacctctgcctcctgggcccaagcgattctcctgtctcaggcttccgagtagctgggactacaggtgcatgccaccacgcctggctaattcttgtatttttagtagagatggggggtttcaccatgttggccaggctggtcttgaacttctgacctcaggtgatccgcccacctcggcctcccaaagtgctgggattacaggtgtgagccaccatgcctggcccgttgcttttcttgttgatgttactagcactgttaggagctggagaggtggcctgggcagagtgctgtgggtacctagggcaggacatgcctgactcccctcgggagcactcatgctttttgttaattagataatttctttttttttttgagatggtgtctagctctgtctctaggtggagttcagtggtgcaatctccacctcccagatttaagcaattctcctgcctcagcctcccaagtagctgggactataggcttgtgccgccacgcccagctaaattttggtattttcagtagagacggggtttcaccttgttggccaggatggtctctatctcctgacttgtgatccgccaccttggctcccaagatgctgggattaccgggcgttggccagtgcgcctggcctattcagatatttcttacttgcttcacataccgcacgtggtaaatctgtccctcttgtaaactgtatttagattaccacagtgacacttgttgaatgactagggagggggtaggagcttttgtcagaagttgagggatgcccttagtgtcacccgtggcaggtcaaggttcgcccttgccaggtgggtccctctccaagtgcggagggtgcgacgaagtttcacaatcacgagaacagtgtgacttccgcaaagattaagcggcacgactatcccgagaaatgggggggccccacagtaacgaagggatcgcaggtaggaaaacacg

SEQ ID NO: 326316 - DNA, 4101 bp, Homo sapiens
cgcgcgcccgccgttcccgcgaggcccacctagagccggaatgcgcaggcgcagtgtccccgggccaagatggctgcgcggtgctccacacgctggttgctggtggttgtggggaccccgcggctgccggctatatcgggtagaggggcccggccgcccagggagggcgtggtgggggcatggctgagccgcaagctgagcgtccccgcctttgcgtcttccctgacctcttgcggcccccgagcgctgctgacattgagacctggtgtcagcctcacaggtggagtcttgctctgtcgcccaggctggagtgcaatggcgcgatcttggctcactgcaacctcagcctcccaggaacaaaacattaccctttcatttgtactgcctccttccacacgagtgcccctttggccaaagaagattattatcagatattaggagtgcctcgaaatgccagccagaaagagatcaagaaagcctattatcagcttgccaagaagtatcaccctgacacaaataaggatgatcccaaagccaaggagaagttctcccagctggcagaagcctatgaggttttgagtgatgaggtgaagaggaagcagtacgatgcctacggctctgcaggcttcgatcctggggccagcggctcccagcatagctactggaagggaggccccactgtggaccccgaggagctgttcaggaagatctttggcgagttctcatcctcttcatttggagatttccagaccgtgtttgatcagcctcaggaatacttcatggagttgacattcaatcaagctgcaaagggggtcaacaaggagttcaccgtgaacatcatggacacgtgtgagcgctgcaacggcaaggggaacgagcccggcaccaaggtgcagcattgccactactgtggcggctccggcatggaaaccatcaacacaggcccttttgtgatgcgttccacgtgtaggagatgtggtggccgcggctccatcatcatatcgccctgtgtggtctgcaggggagcaggacaagccaagcagaaaaagcgagtgatgatccctgtgcctgcaggagtcgaggatggccagaccgtgaggatgcctgtgggaaaaagggaaattttcattacgttcagggtgcagaaaagccctgtgttccggagggacggcgcagacatccactccgacctctttatttctatagctcaggctcttcttgggggaacagccagagcccagggcctgtacgagacgatcaacgtgacgatcccccctgggactcagacagaccagaagattcggatgggtgggaaaggcatcccccggattaacagctacggctacggagaccactacatccacatcaagatacgagttccaaagaggctaacgagccggcagcagagcctgatcctgagctacgccgaggacgagacagatgtggaggggacggtgaacggcgtcaccctcaccagctctggaaaaagatccactggaaactaggccgggaagcagcagcccctccaagggccagggcacctgggagacgggaggattccagaacagcagcactgagctcccacccgcagagcctctggacggccttggcaacagcaaaatcatgggacaacacctctctccacggaaaggtcacagtggacagcccgggcagtaggatgcagccccagaggctggtggcagtttcctgtccattggtaggtgacggcccctggctcaggcagagggagatggttagactcttgcagggctaaaactctaatttggaattgaatattgtggatatcttagttaaaggccatgcttacagcttagaaatgaagccttaagctgcatcaagttacgaagtgattaatttccttctcagcaaacctccgggaggttccagaatgagttcttcctgacaggttgtcttcactgggagcgtggggcccccaggccccaccagcaccgtcctcccctaatgaggggccctgccgaggcatcagctgctctgctcagttagtttttattcccggggtaccaagcagctgcacagtcggtgcctgggaggcacgtagaggcccagagagtccctgggggttctgctctgaccgtgtgggtggtgatccttgtcaggatgtacagtccttgctcccaccccatccaggatggccgcctgtccctgactattgagtcctgttgttgtaagccaggcatggagggctcctgcccttctgctgagccacagcccattgcagcactgtgctggccagacttcagctgccttgggaactgaagccctgccactgttgctagtcaggggcttggttctcccacttacactgttgacatctattttctgaagtgtgtttaaattattcagtgctaatcattgttttttcctttgtaaatgttgattcagaaaaggaaagcacaggctaagcagttgaaggttccccaccattcagtgagagcagaacccccattccccagcctctgctggtagcatgtcgcagtttccatgtgtttcaggatcttcgggctgtcgttagacaggttaatgaagaacacttctcaacagtttcctttttgttttcctttataattcactaaaataaagcatctattagtgtctgatttaggaatgtaaaatgattctgtattaatgtaaataagattatctattgcaaaaagatatttcaaacctaaaattgtggtcatttcttctttgaaagaattcagacagcctctgcaggtggcttatgggggttacaggagacttggctggcctcatcctgtgctcacagccacccagagcacatagaggcagatgggtctggggtgccgacagtgctgaccctcacttggattccagagcagggtgcttgccatgacacaacagtcccctgtgagtgaatgttctagaatctggatgtgacttttttcttgggagcccatgctgtgagagctggccaatgtccctgggtccctgcatttcagtctccctcactggattgtttcccttcattctttccagtctttgcatcttttacattcaattttattttattttttttttaaatggagtctcgctgtgtcgcccatactggagtgaagtgataccatctctgctcactgcaacctctgcctcctgggcccaagcgattctcctgtctcaggcttccgagtagctgggactacaggtgcatgccaccacgcctggctaattcttgtatttttagtagagatggggggtttcaccatgttggccaggctggtcttgaacttctgacctcaggtgatccgcccacctcggcctcccaaagtgctgggattacaggtgtgagccaccatgcctggcccgttgcttttcttgttgatgttactagcactgttaggagctggagaggtggcctgggcagagtgctgtgggtacctagggcaggacatgcctgactcccctcgggagcactcatgctttttgttaattagataatttctttttttttttgagatggtgtctagctctgtctctaggtggagttcagtggtgcaatctccacctcccagatttaagcaattctcctgcctcagcctcccaagtagctgggactataggcttgtgccgccacgcccagctaaattttggtattttcagtagagacggggtttcaccttgttggccaggatggtctctatctcctgacttgtgatccgccaccttggctcccaagatgctgggattaccgggcgttggccagtgcgcctggcctattcagatatttcttacttgcttcacataccgcacgtggtaaatctgtccctcttgtaaactgtatttagattaccacagtgacacttgttgaatgactagggagggggtaggagcttttgtcagaagttgagggatgcccttagtgtcacccgtggcaggtcaaggttcgcccttgccaggtgggtccctctccaagtgcggagggtgcgacgaagtttcacaatcacgagaacagtgtgacttccgcaaagattaagcggcacgactatcccgagaaatgggggggccccacagtaacgaagggatcgcaggtaggaaaacacg

SEQ ID NO: 326317 - DNA, 3972 bp, Homo sapiens
cgcgcgcccgccgttcccgcgaggcccacctagagccggaatgcgcaggcgcagtgtccccgggccaagatggctgcgcggtgctccacacgctggttgctggtggttgtggggaccccgcggctgccggctatatcgggtagaggggcccggccgcccagggagggcgtggtgggggcatggctgagccgcaagctgagcgtccccgcctttgcgtcttccctgacctcttgcggcccccgagcgctgctgacattgagacctggtgtcagcctcacagggccaaagaagattattatcagatattaggagtgcctcgaaatgccagccagaaagagatcaagaaagcctattatcagcttgccaagaagtatcaccctgacacaaataaggatgatcccaaagccaaggagaagttctcccagctggcagaagcctatgaggttttgagtgatgaggtgaagaggaagcagtacgatgcctacggctctgcaggcttcgatcctggggccagcggctcccagcatagctactggaagggaggccccactgtggaccccgaggagctgttcaggaagatctttggcgagttctcatcctcttcatttggagatttccagaccgtgtttgatcagcctcaggaatacttcatggagttgacattcaatcaagctgcaaagggggtcaacaaggagttcaccgtgaacatcatggacacgtgtgagcgctgcaacggcaaggggaacgagcccggcaccaaggtgcagcattgccactactgtggcggctccggcatggaaaccatcaacacaggcccttttgtgatgcgttccacgtgtaggagatgtggtggccgcggctccatcatcatatcgccctgtgtggtctgcaggggagcaggacaagccaagcagaaaaagcgagtgatgatccctgtgcctgcaggagtcgaggatggccagaccgtgaggatgcctgtgggaaaaagggaaattttcattacgttcagggtgcagaaaagccctgtgttccggagggacggcgcagacatccactccgacctctttatttctatagctcaggctcttcttgggggaacagccagagcccagggcctgtacgagacgatcaacgtgacgatcccccctgggactcagacagaccagaagattcggatgggtgggaaaggcatcccccggattaacagctacggctacggagaccactacatccacatcaagatacgagttccaaagaggctaacgagccggcagcagagcctgatcctgagctacgccgaggacgagacagatgtggaggggacggtgaacggcgtcaccctcaccagctctggaaaaagatccactggaaactaggccgggaagcagcagcccctccaagggccagggcacctgggagacgggaggattccagaacagcagcactgagctcccacccgcagagcctctggacggccttggcaacagcaaaatcatgggacaacacctctctccacggaaaggtcacagtggacagcccgggcagtaggatgcagccccagaggctggtggcagtttcctgtccattggtaggtgacggcccctggctcaggcagagggagatggttagactcttgcagggctaaaactctaatttggaattgaatattgtggatatcttagttaaaggccatgcttacagcttagaaatgaagccttaagctgcatcaagttacgaagtgattaatttccttctcagcaaacctccgggaggttccagaatgagttcttcctgacaggttgtcttcactgggagcgtggggcccccaggccccaccagcaccgtcctcccctaatgaggggccctgccgaggcatcagctgctctgctcagttagtttttattcccggggtaccaagcagctgcacagtcggtgcctgggaggcacgtagaggcccagagagtccctgggggttctgctctgaccgtgtgggtggtgatccttgtcaggatgtacagtccttgctcccaccccatccaggatggccgcctgtccctgactattgagtcctgttgttgtaagccaggcatggagggctcctgcccttctgctgagccacagcccattgcagcactgtgctggccagacttcagctgccttgggaactgaagccctgccactgttgctagtcaggggcttggttctcccacttacactgttgacatctattttctgaagtgtgtttaaattattcagtgctaatcattgttttttcctttgtaaatgttgattcagaaaaggaaagcacaggctaagcagttgaaggttccccaccattcagtgagagcagaacccccattccccagcctctgctggtagcatgtcgcagtttccatgtgtttcaggatcttcgggctgtcgttagacaggttaatgaagaacacttctcaacagtttcctttttgttttcctttataattcactaaaataaagcatctattagtgtctgatttaggaatgtaaaatgattctgtattaatgtaaataagattatctattgcaaaaagatatttcaaacctaaaattgtggtcatttcttctttgaaagaattcagacagcctctgcaggtggcttatgggggttacaggagacttggctggcctcatcctgtgctcacagccacccagagcacatagaggcagatgggtctggggtgccgacagtgctgaccctcacttggattccagagcagggtgcttgccatgacacaacagtcccctgtgagtgaatgttctagaatctggatgtgacttttttcttgggagcccatgctgtgagagctggccaatgtccctgggtccctgcatttcagtctccctcactggattgtttcccttcattctttccagtctttgcatcttttacattcaattttattttattttttttttaaatggagtctcgctgtgtcgcccatactggagtgaagtgataccatctctgctcactgcaacctctgcctcctgggcccaagcgattctcctgtctcaggcttccgagtagctgggactacaggtgcatgccaccacgcctggctaattcttgtatttttagtagagatggggggtttcaccatgttggccaggctggtcttgaacttctgacctcaggtgatccgcccacctcggcctcccaaagtgctgggattacaggtgtgagccaccatgcctggcccgttgcttttcttgttgatgttactagcactgttaggagctggagaggtggcctgggcagagtgctgtgggtacctagggcaggacatgcctgactcccctcgggagcactcatgctttttgttaattagataatttctttttttttttgagatggtgtctagctctgtctctaggtggagttcagtggtgcaatctccacctcccagatttaagcaattctcctgcctcagcctcccaagtagctgggactataggcttgtgccgccacgcccagctaaattttggtattttcagtagagacggggtttcaccttgttggccaggatggtctctatctcctgacttgtgatccgccaccttggctcccaagatgctgggattaccgggcgttggccagtgcgcctggcctattcagatatttcttacttgcttcacataccgcacgtggtaaatctgtccctcttgtaaactgtatttagattaccacagtgacacttgttgaatgactagggagggggtaggagcttttgtcagaagttgagggatgcccttagtgtcacccgtggcaggtcaaggttcgcccttgccaggtgggtccctctccaagtgcggagggtgcgacgaagtttcacaatcacgagaacagtgtgacttccgcaaagattaagcggcacgactatcccgagaaatgggggggccccacagtaacgaagggatcgcaggtaggaaaacacg

SEQ ID NO: 326318 - DNA, 1641 bp, Homo sapiens
cgcgcgcccgccgttcccgcgaggcccacctagagccggaatgcgcaggcgcagtgtccccgggccaagatggctgcgcggtgctccacacgctggttgctggtggttgtggggaccccgcggctgccggctatatcgggtagaggggcccggccgcccagggagggcgtggtgggggcatggctgagccgcaagctgagcgtccccgcctttgcgtcttccctgacctcttgcggcccccgagcgctgctgacattgagacctggtgtcagcctcacaggaacaaaacattaccctttcatttgtactgcctccttccacacgagtgcccctttggccaaagaagattattatcagatattaggagtgcctcgaaatgccagccagaaagagatcaagaaagcctattatcagcttgccaagaagtatcaccctgacacaaataaggatgatcccaaagccaaggagaagttctcccagctggcagaagcctatgaggttttgagtgatgaggtgaagaggaagcagtacgatgcctacggctctgcaggcttcgatcctggggccagcggctcccagcatagctactggaagggaggccccactgtggaccccgaggagctgttcaggaagatctttggcgagttctcatcctcttcatttggagatttccagaccgtgtttgatcagcctcaggaatacttcatggagttgacattcaatcaagctgcaaagggggtcaacaaggagttcaccgtgaacatcatggacacgtgtgagcgctgcaacggcaaggggaacgagcccggcaccaaggtgcagcattgccactactgtggcggctccggcatggaaaccatcaacacaggcccttttgtgatgcgttccacgtgtaggagatgtggtggccgcggctccatcatcatatcgccctgtgtggtctgcaggggagcaggacaagccaagcagaaaaagcgagtgatgatccctgtgcctgcaggagtcgaggatggccagaccgtgaggatgcctgtgggaaaaagggaaattttcattacgttcagggtgcagaaaagccctgtgttccggagggacggcgcagacatccactccgacctctttatttctatagctcaggctcttcttgggggaacagccagagcccagggcctgtacgagacgatcaacgtgacgatcccccctgggactcagacagaccagaagattcggatgggtgggaaaggcatcccccggattaacagctacggctacggagaccactacatccacatcaagatacgagttccaaagaggctaacgagccggcagcagagcctgatcctgagctacgccgaggacgagacagatgtggaggggacggtgaacggcgtcaccctcaccagctctggtggcagcaccatggatagctccgcaggaagcaaggctaggcgtgaggctggggaggacgaggagggattcctttccaaacttaagaaaatgtttacctcatgatatcccagccgaggatcttcgggctgtcgttagacaggttaatgaagaacacttctcaacagtttcctttttgttttcctttataattcactaaaataaagcatctattagtgtctgatttaggaatgt

SEQ ID NO: 326319 - DNA, 3234 bp, Homo sapiens
agatttaagcaattctcctgcctcagcctcccaagtagctgggactataggcatgtgccgccacgcccagctaatttttgtattttcagtagagacggggtttcaccttgttggccaggatggtctctatctcctgaccttgtgatccgcccaccttggcctcccaaaatgctgggattacaggcatgagccactgcgcctggcctaattagataatttcttacttgcttcacatacacactggtaaaatctgtttcccctcctgtaaactgtatttagcatagccacagtgacacttgtttaaatgacttagtgtagggtgttttaggagcttttctgtacagaagctttgagggcatggtccttaggttctcaccgctgcactggctcagggtgtccgcccctgccaaggttgggtccctctcttcccatgtgctgcgagggtgctggctgcctgtgagttctttccaaagcttcccggcggaagccttggctgctgactctgctcggtccacaggaggctaacgagccggcagcagagcctgatcctgagctacgccgaggacgagacagatgtggaggggacggtgaacggcgtcaccctcaccagctctggaaaaagatccactggaaactaggccgggaagcagcagcccctccaagggccagggcacctgggagacgggaggattccagaacagcagcactgagctcccacccgcagagcctctggacggccttggcaacagcaaaatcatgggacaacacctctctccacggaaaggtcacagtggacagcccgggcagtaggatgcagccccagaggctggtggcagtttcctgtccattggtaggtgacggcccctggctcaggcagagggagatggttagactcttgcagggctaaaactctaatttggaattgaatattgtggatatcttagttaaaggccatgcttacagcttagaaatgaagccttaagctgcatcaagttacgaagtgattaatttccttctcagcaaacctccgggaggttccagaatgagttcttcctgacaggttgtcttcactgggagcgtggggcccccaggccccaccagcaccgtcctcccctaatgaggggccctgccgaggcatcagctgctctgctcagttagtttttattcccggggtaccaagcagctgcacagtcggtgcctgggaggcacgtagaggcccagagagtccctgggggttctgctctgaccgtgtgggtggtgatccttgtcaggatgtacagtccttgctcccaccccatccaggatggccgcctgtccctgactattgagtcctgttgttgtaagccaggcatggagggctcctgcccttctgctgagccacagcccattgcagcactgtgctggccagacttcagctgccttgggaactgaagccctgccactgttgctagtcaggggcttggttctcccacttacactgttgacatctattttctgaagtgtgtttaaattattcagtgctaatcattgttttttcctttgtaaatgttgattcagaaaaggaaagcacaggctaagcagttgaaggttccccaccattcagtgagagcagaacccccattccccagcctctgctggtagcatgtcgcagtttccatgtgtttcaggatcttcgggctgtcgttagacaggttaatgaagaacacttctcaacagtttcctttttgttttcctttataattcactaaaataaagcatctattagtgtctgatttaggaatgtaaaatgattctgtattaatgtaaataagattatctattgcaaaaagatatttcaaacctaaaattgtggtcatttcttctttgaaagaattcagacagcctctgcaggtggcttatgggggttacaggagacttggctggcctcatcctgtgctcacagccacccagagcacatagaggcagatgggtctggggtgccgacagtgctgaccctcacttggattccagagcagggtgcttgccatgacacaacagtcccctgtgagtgaatgttctagaatctggatgtgacttttttcttgggagcccatgctgtgagagctggccaatgtccctgggtccctgcatttcagtctccctcactggattgtttcccttcattctttccagtctttgcatcttttacattcaattttattttattttttttttaaatggagtctcgctgtgtcgcccatactggagtgaagtgataccatctctgctcactgcaacctctgcctcctgggcccaagcgattctcctgtctcaggcttccgagtagctgggactacaggtgcatgccaccacgcctggctaattcttgtatttttagtagagatggggggtttcaccatgttggccaggctggtcttgaacttctgacctcaggtgatccgcccacctcggcctcccaaagtgctgggattacaggtgtgagccaccatgcctggcccgttgcttttcttgttgatgttactagcactgttaggagctggagaggtggcctgggcagagtgctgtgggtacctagggcaggacatgcctgactcccctcgggagcactcatgctttttgttaattagataatttctttttttttttgagatggtgtctagctctgtctctaggtggagttcagtggtgcaatctccacctcccagatttaagcaattctcctgcctcagcctcccaagtagctgggactataggcttgtgccgccacgcccagctaaattttggtattttcagtagagacggggtttcaccttgttggccaggatggtctctatctcctgacttgtgatccgccaccttggctcccaagatgctgggattaccgggcgttggccagtgcgcctggcctattcagatatttcttacttgcttcacataccgcacgtggtaaatctgtccctcttgtaaactgtatttagattaccacagtgacacttgttgaatgactagggagggggtaggagcttttgtcagaagttgagggatgcccttagtgtcacccgtggcaggtcaaggttcgcccttgccaggtgggtccctctccaagtgcggagggtgcgacgaagtttcacaatcacgagaacagtgtgacttccgcaaagattaagcggcacgactatcccgagaaatgggggggccccacagtaacgaagggatcgcaggtaggaaaacacg

SEQ ID NO: 326320 - DNA, 1738 bp, Homo sapiens
ctgtccactgtgacctttccgtggagagaggtgttgtcccatgattttgctgttccaaggccgtccagaggctctgcgggtgggagctcagtgctgctgttctggaatcctcccgtcacccccattccccagcctctgctggtagcatgtcgcagtttccatgtgtttcaggatcttcgggctgtcgttagacaggttaatgaagaacacttctcaacagtttcctttttgttttcctttataattcactaaaataaagcatctattagtgtctgatttaggaatgtaaaatgattctgtattaatgtaaataagattatctattgcaaaaagatatttcaaacctaaaattgtggtcatttcttctttgaaagaattcagacagcctctgcaggtggcttatgggggttacaggagacttggctggcctcatcctgtgctcacagccacccagagcacatagaggcagatgggtctggggtgccgacagtgctgaccctcacttggattccagagcagggtgcttgccatgacacaacagtcccctgtgagtgaatgttctagaatctggatgtgacttttttcttgggagcccatgctgtgagagctggccaatgtccctgggtccctgcatttcagtctccctcactggattgtttcccttcattctttccagtctttgcatcttttacattcaattttattttattttttttttaaatggagtctcgctgtgtcgcccatactggagtgaagtgataccatctctgctcactgcaacctctgcctcctgggcccaagcgattctcctgtctcaggcttccgagtagctgggactacaggtgcatgccaccacgcctggctaattcttgtatttttagtagagatggggggtttcaccatgttggccaggctggtcttgaacttctgacctcaggtgatccgcccacctcggcctcccaaagtgctgggattacaggtgtgagccaccatgcctggcccgttgcttttcttgttgatgttactagcactgttaggagctggagaggtggcctgggcagagtgctgtgggtacctagggcaggacatgcctgactcccctcgggagcactcatgctttttgttaattagataatttctttttttttttgagatggtgtctagctctgtctctaggtggagttcagtggtgcaatctccacctcccagatttaagcaattctcctgcctcagcctcccaagtagctgggactataggcttgtgccgccacgcccagctaaattttggtattttcagtagagacggggtttcaccttgttggccaggatggtctctatctcctgacttgtgatccgccaccttggctcccaagatgctgggattaccgggcgttggccagtgcgcctggcctattcagatatttcttacttgcttcacataccgcacgtggtaaatctgtccctcttgtaaactgtatttagattaccacagtgacacttgttgaatgactagggagggggtaggagcttttgtcagaagttgagggatgcccttagtgtcacccgtggcaggtcaaggttcgcccttgccaggtgggtccctctccaagtgcggagggtgcgacgaagtttcacaatcacgagaacagtgtgacttccgcaaagattaagcggcacgactatcccgagaaatgggggggccccacagtaacgaagggatcgcaggtaggaaaacacg

SEQ ID NO: 326321 - DNA, 975 bp, Homo sapiens
cgcgcgcccgccgttcccgcgaggcccacctagagccggaatgcgcaggcgcagtgtccccgggccaagatggctgcgcggtgctccacacgctggttgctggtggttgtggggaccccgcggctgccggctatatcgggtagaggggcccggccgcccagggagggcgtggtgggggcatggctgagccgcaagctgagcgtccccgcctttgcgtcttccctgacctcttgcggcccccgagcgctgctgacattgagacctggtgtcagcctcacaggaacaaaacattaccctttcatttgtactgcctccttccacacgagtgcccctttggccaaagaagattattatcagatattaggagtgcctcgaaatgccagccagaaagagatcaagaaagcctattatcagcttgccaagaagtatcaccctgacacaaataaggatgatcccaaagccaaggagaagttctcccagctggcagaagcctatgaggtaatatgacttcggtgcatgcggtcactgctgttcagctatgtgtatgaatcaaaggttgcattgctacctgggacagcctggtgtgtcatacagtccagtgtgaaggccatgtccctgcgccaagtaatcttgttaagaaaaataaaaaaaaagagattccaggccaagcatggtggctcactcctgtagtcctagcactttgggaagctgaggcaggaggatcacttgacctcaggagttggcttgaccctaggagtttgagaccagcttgggcaatgtagtaagaccacgtctctacaaaaaaaaaaaaaaaaatcaccaggcgtggtggtggcgcacctgtaaacccagctacttgggaggctgagtcaggttcatcacttgaggggctcaaagctgcagtgacccatgatgccatgattgtgccatagaactatggtctgggcaacagaaaaagaccttctctcaaaaaat

SEQ ID NO: 326322 - DNA, 809 bp, Homo sapiens
ctttctgctgtttgtgcccaggtggcagcaccatggatagctccgcaggaagcaaggctaggcgtgaggctggggaggacgaggagggattcctttccaaacttaagaaaatgtttacctcatgatatcccagccgagccgaggtaggaaaaccctggaggttttttttccctttgttttcctctgtgaactaatcctggttttctcccactttaaccaatattgtgcccccacccccaggagttggaacaggtgccagtccaaggtgtggtaaacctagctccactaggagctggcctctcagcctagggaatagatgacgtggcaatcagcctgtagtgcaggactggctgggctgccgcggccagcctctggctgtgtcttcttcctggggaggtggcgatgctggggctgttgtacagcccccctgcagtggtgggtccggcttgcccatggtcacagagggcgagtcaggcagagccaggcctagaactcagatctcctcacgtcctgcctgcttggaagctgccctcctgcgtggacagcgcagggctgtgcaagcctgggggctgctccaggggtagcgcttgctcgccgtgtcatcttgggacccactttggtttattatgctcatctcagcaagtggggttctcgcccctctcttggcacagctgctttccagggattaacagacgctccccacaggggtgtgttcccttgaaatgttgagtataaggtaacagcctatctctttggctcaggaaaaagatccactggaaactaggccgggaagcagcagcccctccaag

SEQ ID NO: 326323 - DNA, 196 bp, Homo sapiens
tagagacggagtttcactggccaggctaatctcgaactcctgacctcaggtgatctgcccaccttgacttcccaaagtggtgggattacaggtgtgagccagcacgcctggcccgttgcttttcttgttgatgttactagcactgttaggagctggagaggtggcctgggcagagtgctgtgggtacctagggcgg

SEQ ID NO: 326324 - DNA, 4027 bp, Homo sapiens
cgcgcgcccgccgttcccgcgaggcccacctagagccggaatgcgcaggcgcagtgtccccgggccaagatggctgcgcggtgctccacacgctggttgctggtggttgtggggaccccgcggctgccggctatatcgggtagaggggcccggccgcccagggagggcgtggtgggggcatggctgagccgcaagctgagcgtccccgcctttgcgtcttccctgacctcttgcggcccccgagcgctgctgacattgagacctggtgtcagcctcacaggaacaaaacattaccctttcatttgtactgcctccttccacacgagtgcccctttggccaaagaagattattatcagatattaggagtgcctcgaaatgccagccagaaagagatcaagaaagcctattatcagcttgccaagaagtatcaccctgacacaaataaggatgatcccaaagccaaggagaagttctcccagctggcagaagcctatgaggttttgagtgatgaggtgaagaggaagcagtacgatgcctacggctctgcaggcttcgatcctggggccagcggctcccagcatagctactggaagggaggccccactgtggaccccgaggagctgttcaggaagatctttggcgagttctcatcctcttcatttggagatttccagaccgtgtttgatcagcctcaggaatacttcatggagttgacattcaatcaagctgcaaagggggtcaacaaggagttcaccgtgaacatcatggacacgtgtgagcgctgcaacggcaaggggaacgagcccggcaccaaggtgcagcattgccactactgtggcggctccggcatggaaaccatcaacacaggcccttttgtgatgcgttccacgtgtaggagatgtggtggccgcggctccatcatcatatcgccctgtgtggtctgcaggggagcaggacaagccaagcagaaaaagcgagtgatgatccctgtgcctgcaggagtcgaggatggccagaccgtgaggatgcctgtgggaaaaagggaaattttcattacgttcagggtgcagaaaagccctgtgttccggagggacggcgcagacatccactccgacctctttatttctatagctcaggctcttcttgggggaacagccagagcccagggcctgtacgagacgatcaacgtgacgatcccccctgggactcagacagaccagaagattcggatgggtgggaaaggcatcccccggattaacagctacggctacggagaccactacatccacatcaagatacgagttccaaagaggctaacgagccggcagcagagcctgatcctgagctacgccgaggacgagacagatgtggaggggacggtgaacggcgtcaccctcaccagctctggaaaaagatccactggaaactaggccgggaagcagcagcccctccaagggccagggcacctgggagacgggaggattccagaacagcagcactgagctcccacccgcagagcctctggacggccttggcaacagcaaaatcatgggacaacacctctctccacggaaaggtcacagtggacagcccgggcagtaggatgcagccccagaggctggtggcagtttcctgtccattggtaggtgacggcccctggctcaggcagagggagatggttagactcttgcagggctaaaactctaatttggaattgaatattgtggatatcttagttaaaggccatgcttacagcttagaaatgaagccttaagctgcatcaagttacgaagtgattaatttccttctcagcaaacctccgggaggttccagaatgagttcttcctgacaggttgtcttcactgggagcgtggggcccccaggccccaccagcaccgtcctcccctaatgaggggccctgccgaggcatcagctgctctgctcagttagtttttattcccggggtaccaagcagctgcacagtcggtgcctgggaggcacgtagaggcccagagagtccctgggggttctgctctgaccgtgtgggtggtgatccttgtcaggatgtacagtccttgctcccaccccatccaggatggccgcctgtccctgactattgagtcctgttgttgtaagccaggcatggagggctcctgcccttctgctgagccacagcccattgcagcactgtgctggccagacttcagctgccttgggaactgaagccctgccactgttgctagtcaggggcttggttctcccacttacactgttgacatctattttctgaagtgtgtttaaattattcagtgctaatcattgttttttcctttgtaaatgttgattcagaaaaggaaagcacaggctaagcagttgaaggttccccaccattcagtgagagcagaacccccattccccagcctctgctggtagcatgtcgcagtttccatgtgtttcaggatcttcgggctgtcgttagacaggttaatgaagaacacttctcaacagtttcctttttgttttcctttataattcactaaaataaagcatctattagtgtctgatttaggaatgtaaaatgattctgtattaatgtaaataagattatctattgcaaaaagatatttcaaacctaaaattgtggtcatttcttctttgaaagaattcagacagcctctgcaggtggcttatgggggttacaggagacttggctggcctcatcctgtgctcacagccacccagagcacatagaggcagatgggtctggggtgccgacagtgctgaccctcacttggattccagagcagggtgcttgccatgacacaacagtcccctgtgagtgaatgttctagaatctggatgtgacttttttcttgggagcccatgctgtgagagctggccaatgtccctgggtccctgcatttcagtctccctcactggattgtttcccttcattctttccagtctttgcatcttttacattcaattttattttattttttttttaaatggagtctcgctgtgtcgcccatactggagtgaagtgataccatctctgctcactgcaacctctgcctcctgggcccaagcgattctcctgtctcaggcttccgagtagctgggactacaggtgcatgccaccacgcctggctaattcttgtatttttagtagagatggggggtttcaccatgttggccaggctggtcttgaacttctgacctcaggtgatccgcccacctcggcctcccaaagtgctgggattacaggtgtgagccaccatgcctggcccgttgcttttcttgttgatgttactagcactgttaggagctggagaggtggcctgggcagagtgctgtgggtacctagggcaggacatgcctgactcccctcgggagcactcatgctttttgttaattagataatttctttttttttttgagatggtgtctagctctgtctctaggtggagttcagtggtgcaatctccacctcccagatttaagcaattctcctgcctcagcctcccaagtagctgggactataggcttgtgccgccacgcccagctaaattttggtattttcagtagagacggggtttcaccttgttggccaggatggtctctatctcctgacttgtgatccgccaccttggctcccaagatgctgggattaccgggcgttggccagtgcgcctggcctattcagatatttcttacttgcttcacataccgcacgtggtaaatctgtccctcttgtaaactgtatttagattaccacagtgacacttgttgaatgactagggagggggtaggagcttttgtcagaagttgagggatgcccttagtgtcacccgtggcaggtcaaggttcgcccttgccaggtgggtccctctccaagtgcggagggtgcgacgaagtttcacaatcacgagaacagtgtgacttccgcaaagattaagcggcacgactatcccgagaaatgggggggccccacagtaacgaagggatcgcaggtaggaaaacacg

SEQ ID NO: 326325 - DNA, 2576 bp, Homo sapiens
cgcgcgcccgccgttcccgcgaggcccacctagagccggaatgcgcaggcgcagtgtccccgggccaagatggctgcgcggtgctccacacgctggttgctggtggttgtggggaccccgcggctgccggctatatcgggtagaggggcccggccgcccagggagggcgtggtgggggcatggctgagccgcaagctgagcgtccccgcctttgcgtcttccctgacctcttgcggcccccgagcgctgctgacattgagacctggtgtcagcctcacaggaacaaaacattaccctttcatttgtactgcctccttccacacgagtgcccctttggccaaagaagattattatcagatattaggagtgcctcgaaatgccagccagaaagagatcaagaaagcctattatcagcttgccaagaagtatcaccctgacacaaataaggatgatcccaaagccaaggagaagttctcccagctggcagaagcctatgaggttttgagtgatgaggtgaagaggaagcagtacgatgcctacggctctgcaggcttcgatcctggggccagcggctcccagcatagctactggaagggaggccccactgtggaccccgaggagctgttcaggaagatctttggcgagttctcatcctcttcatttggagatttccagaccgtgtttgatcagcctcaggaatacttcatggagttgacattcaatcaagctgcaaagggggtcaacaaggagttcaccgtgaacatcatggacacgtgtgagcgctgcaacggcaaggggaacgagcccggcaccaaggtgcagcattgccactactgtggcggctccggcatggaaaccatcaacacaggcccttttgtgatgcgttccacgtgtaggagatgtggtggccgcggctccatcatcatatcgccctgtgtggtctgcaggggagcaggacaagccaagcagaaaaagcgagtgatgatccctgtgcctgcaggagtcgaggatggccagaccgtgaggatgcctgtgggaaaaagggaaattttcattacgttcagggtgcagaaaagccctgtgttccggagggacggcgcagacatccactccgacctctttatttctatagctcaggctcttcttgggggaacagccagagcccagggcctgtacgagacgatcaacgtgacgatcccccctgggactcagacagaccagaagattcggatgggtgggaaaggcatcccccggattaacagctacggctacggagaccactacatccacatcaagatacgagttccaaagaggctaacgagccggcagcagagcctgatcctgagctacgccgaggacgagacagatgtggaggggacggtgaacggcgtcaccctcaccagctctggaaaaagatccactggaaactaggccgggaagcagcagcccctccaagggccagggcacctgggagacgggaggattccagaacagcagcactgagctcccacccgcagagcctctggacggccttggcaacagcaaaatcatgggacaacacctctctccacggaaaggtcacagtggacagcccgggcagtaggatgcagccccagaggctggtggcagtttcctgtccattggtaggtgacggcccctggctcaggcagagggagatggttagactcttgcagggctaaaactctaatttggaattgaatattgtggatatcttagttaaaggccatgcttacagcttagaaatgaagccttaagctgcatcaagttacgaagtgattaatttccttctcagcaaacctccgggaggttccagaatgagttcttcctgacaggttgtcttcactgggagcgtggggcccccaggccccaccagcaccgtcctcccctaatgaggggccctgccgaggcatcagctgctctgctcagttagtttttattcccggggtaccaagcagctgcacagtcggtgcctgggaggcacgtagaggcccagagagtccctgggggttctgctctgaccgtgtgggtggtgatccttgtcaggatgtacagtccttgctcccaccccatccaggatggccgcctgtccctgactattgagtcctgttgttgtaagccaggcatggagggctcctgcccttctgctgagccacagcccattgcagcactgtgctggccagacttcagctgccttgggaactgaagccctgccactgttgctagtcaggggcttggttctcccacttacactgttgacatctattttctgaagtgtgtttaaattattcagtgctaatcattgttttttcctttgtaaatgttgattcagaaaaggaaagcacaggctaagcagttgaaggttccccaccattcagtgagagcagaacccccattccccagcctctgctggtagcatgtcgcagtttccatgtgtttcaggatcttcgggctgtcgttagacaggttaatgaagaacacttctcaacagtttcctttttgttttcctttataattcactaaaataaagcatctattagtgtctgatttaggaatgt

SEQ ID NO: 326326 - DNA, 3638 bp, Homo sapiens
cgcgcgcccgccgttcccgcgaggcccacctagagccggaatgcgcaggcgcagtgtccccgggccaagatggctgcgcggtgctccacacgctggttgctggtggttgtggggaccccgcggctgccggctatatcgggtagaggggcccggccgcccagggagggcgtggtgggggcatggctgagccgcaagctgagcgtccccgcctttgcgtcttccctgacctcttgcggcccccgagcgctgctgacattgagacctggtgtcagcctcacaggaacaaaacattaccctttcatttgtactgcctccttccacacgagtgcccctttggccaaagaagattattatcagatattaggagtgcctcgaaatgccagccagaaagagatcaagaaagcctattatcagcttgccaagaagtatcaccctgacacaaataaggatgatcccaaagccaaggagaagttctcccagctggcagaagcctatgaggttttgagtgatgaggtgaagaggaagcagtacgatgcctacggctctgcaggcttcgatcctggggccagcggctcccagcatagctactggaagggaggccccactgtggaccccgaggagctgttcaggaagatctttggcgagttctcatcctcttcatttggagatttccagaccgtgtttgatcagcctcaggaatacttcatggagttgacattcaatcaagctgcaaagggggtcaacaaggagttcaccgtgaacatcatggacacgtgtgagcgctgcaacggcaaggggaacgagcccggcaccaaggtgcagcattgccactactgtggcggctccggcatggaaaccatcaacacaggcccttttgtgatgcgttccacgtgtaggagatgtggtggccgcggctccatcatcatatcgccctgtgtggtctgcaggggagcaggacaagccaagcagaaaaagcgagtgatgatccctgtgcctgcaggagtcgaggatggccagaccgtgaggatgcctgtgggaaaaagggaaattttcattacgttcagggtgcagaaaagccctgtgttccggagggacggcgcagacatccactccgacctctttatttctatagctcaggctcttcttgggggaacagccagagcccagggcctgtacgagacgatcaacgtgacgatcccccctgggactcagacagaccagaagattcggatgggtgggaaaggcatcccccggattaacagctacggctacggagaccactacatccacatcaagatacgagttccaaagaggctaacgagccggcagcagagcctgatcctgagctacgccgaggacgagacagatgtggaggggacggtgaacggcgtcaccctcaccagctctggaaaaagatccactggaaactaggccgggaagcagcagcccctccaagggccagggcacctgggagacgggaggattccagaacagcagcactgagctcccacccgcagagcctctggacggccttggcaacagcaaaatcatgggacaacacctctctccacggaaaggtcacagtggacagcccgggcagtaggatgcagccccagaggctggtggcagtttcctgtccattggtaggtgacggcccctggctcaggcagagggagatggttagactcttgcagggctaaaactctaatttggaattgaatattgtggatatcttagttaaaggccatgcttacagcttagaaatgaagccttaagctgcatcaagttacgaagtgattaatttccttctcagcaaacctccgggaggttccagaatgagttcttcctgacaggttgtcttcactgggagcgtggggcccccaggccccaccagcaccgtcctcccctaatgaggggccctgccgaggcatcagctgctctgctcagttagtttttattcccggggtaccaagcagctgcacagtcggtgcctgggaggcacgtagaggcccagagaacccccattccccagcctctgctggtagcatgtcgcagtttccatgtgtttcaggatcttcgggctgtcgttagacaggttaatgaagaacacttctcaacagtttcctttttgttttcctttataattcactaaaataaagcatctattagtgtctgatttaggaatgtaaaatgattctgtattaatgtaaataagattatctattgcaaaaagatatttcaaacctaaaattgtggtcatttcttctttgaaagaattcagacagcctctgcaggtggcttatgggggttacaggagacttggctggcctcatcctgtgctcacagccacccagagcacatagaggcagatgggtctggggtgccgacagtgctgaccctcacttggattccagagcagggtgcttgccatgacacaacagtcccctgtgagtgaatgttctagaatctggatgtgacttttttcttgggagcccatgctgtgagagctggccaatgtccctgggtccctgcatttcagtctccctcactggattgtttcccttcattctttccagtctttgcatcttttacattcaattttattttattttttttttaaatggagtctcgctgtgtcgcccatactggagtgaagtgataccatctctgctcactgcaacctctgcctcctgggcccaagcgattctcctgtctcaggcttccgagtagctgggactacaggtgcatgccaccacgcctggctaattcttgtatttttagtagagatggggggtttcaccatgttggccaggctggtcttgaacttctgacctcaggtgatccgcccacctcggcctcccaaagtgctgggattacaggtgtgagccaccatgcctggcccgttgcttttcttgttgatgttactagcactgttaggagctggagaggtggcctgggcagagtgctgtgggtacctagggcaggacatgcctgactcccctcgggagcactcatgctttttgttaattagataatttctttttttttttgagatggtgtctagctctgtctctaggtggagttcagtggtgcaatctccacctcccagatttaagcaattctcctgcctcagcctcccaagtagctgggactataggcttgtgccgccacgcccagctaaattttggtattttcagtagagacggggtttcaccttgttggccaggatggtctctatctcctgacttgtgatccgccaccttggctcccaagatgctgggattaccgggcgttggccagtgcgcctggcctattcagatatttcttacttgcttcacataccgcacgtggtaaatctgtccctcttgtaaactgtatttagattaccacagtgacacttgttgaatgactagggagggggtaggagcttttgtcagaagttgagggatgcccttagtgtcacccgtggcaggtcaaggttcgcccttgccaggtgggtccctctccaagtgcggagggtgcgacgaagtttcacaatcacgagaacagtgtgacttccgcaaagattaagcggcacgactatcccgagaaatgggggggccccacagtaacgaagggatcgcaggtaggaaaacacg

SEQ ID NO: 326327 - DNA, 3868 bp, Homo sapiens
acagccaaaccttatcagtttgtttgttccttcacagatatagcctggtgggtcatgtactcacagttttcttttgttgagaacattcccagagtgattttctttgttttttcctttttaggaacaaaacattaccctttcatttgtactgcctccttccacacgagtgcccctttggccaaagaagattattatcagatattaggagtgcctcgaaatgccagccagaaagagatcaagaaagcctattatcagcttgccaagaagtatcaccctgacacaaataaggatgatcccaaagccaaggagaagttctcccagctggcagaagcctatgaggttttgagtgatgaggtgaagaggaagcagtacgatgcctacggctctgcaggcttcgatcctggggccagcggctcccagcatagctactggaagggaggccccactgtggaccccgaggagctgttcaggaagatctttggcgagttctcatcctcttcatttggagatttccagaccgtgtttgatcagcctcaggaatacttcatggagttgacattcaatcaagctgcaaagggggtcaacaaggagttcaccgtgaacatcatggacacgtgtgagcgctgcaacggcaaggggaacgagcccggcaccaaggtgcagcattgccactactgtggcggctccggcatggaaaccatcaacacaggcccttttgtgatgcgttccacgtgtaggagatgtggtggccgcggctccatcatcatatcgccctgtgtggtctgcaggggagcaggacaagccaagcagaaaaagcgagtgatgatccctgtgcctgcaggagtcgaggatggccagaccgtgaggatgcctgtgggaaaaagggaaattttcattacgttcagggtgcagaaaagccctgtgttccggagggacggcgcagacatccactccgacctctttatttctatagctcaggctcttcttgggggaacagccagagcccagggcctgtacgagacgatcaacgtgacgatcccccctgggactcagacagaccagaagattcggatgggtgggaaaggcatcccccggattaacagctacggctacggagaccactacatccacatcaagatacgagttccaaagaggctaacgagccggcagcagagcctgatcctgagctacgccgaggacgagacagatgtggaggggacggtgaacggcgtcaccctcaccagctctggaaaaagatccactggaaactaggccgggaagcagcagcccctccaagggccagggcacctgggagacgggaggattccagaacagcagcactgagctcccacccgcagagcctctggacggccttggcaacagcaaaatcatgggacaacacctctctccacggaaaggtcacagtggacagcccgggcagtaggatgcagccccagaggctggtggcagtttcctgtccattggtaggtgacggcccctggctcaggcagagggagatggttagactcttgcagggctaaaactctaatttggaattgaatattgtggatatcttagttaaaggccatgcttacagcttagaaatgaagccttaagctgcatcaagttacgaagtgattaatttccttctcagcaaacctccgggaggttccagaatgagttcttcctgacaggttgtcttcactgggagcgtggggcccccaggccccaccagcaccgtcctcccctaatgaggggccctgccgaggcatcagctgctctgctcagttagtttttattcccggggtaccaagcagctgcacagtcggtgcctgggaggcacgtagaggcccagagagtccctgggggttctgctctgaccgtgtgggtggtgatccttgtcaggatgtacagtccttgctcccaccccatccaggatggccgcctgtccctgactattgagtcctgttgttgtaagccaggcatggagggctcctgcccttctgctgagccacagcccattgcagcactgtgctggccagacttcagctgccttgggaactgaagccctgccactgttgctagtcaggggcttggttctcccacttacactgttgacatctattttctgaagtgtgtttaaattattcagtgctaatcattgttttttcctttgtaaatgttgattcagaaaaggaaagcacaggctaagcagttgaaggttccccaccattcagtgagagcagaacccccattccccagcctctgctggtagcatgtcgcagtttccatgtgtttcaggatcttcgggctgtcgttagacaggttaatgaagaacacttctcaacagtttcctttttgttttcctttataattcactaaaataaagcatctattagtgtctgatttaggaatgtaaaatgattctgtattaatgtaaataagattatctattgcaaaaagatatttcaaacctaaaattgtggtcatttcttctttgaaagaattcagacagcctctgcaggtggcttatgggggttacaggagacttggctggcctcatcctgtgctcacagccacccagagcacatagaggcagatgggtctggggtgccgacagtgctgaccctcacttggattccagagcagggtgcttgccatgacacaacagtcccctgtgagtgaatgttctagaatctggatgtgacttttttcttgggagcccatgctgtgagagctggccaatgtccctgggtccctgcatttcagtctccctcactggattgtttcccttcattctttccagtctttgcatcttttacattcaattttattttattttttttttaaatggagtctcgctgtgtcgcccatactggagtgaagtgataccatctctgctcactgcaacctctgcctcctgggcccaagcgattctcctgtctcaggcttccgagtagctgggactacaggtgcatgccaccacgcctggctaattcttgtatttttagtagagatggggggtttcaccatgttggccaggctggtcttgaacttctgacctcaggtgatccgcccacctcggcctcccaaagtgctgggattacaggtgtgagccaccatgcctggcccgttgcttttcttgttgatgttactagcactgttaggagctggagaggtggcctgggcagagtgctgtgggtacctagggcaggacatgcctgactcccctcgggagcactcatgctttttgttaattagataatttctttttttttttgagatggtgtctagctctgtctctaggtggagttcagtggtgcaatctccacctcccagatttaagcaattctcctgcctcagcctcccaagtagctgggactataggcttgtgccgccacgcccagctaaattttggtattttcagtagagacggggtttcaccttgttggccaggatggtctctatctcctgacttgtgatccgccaccttggctcccaagatgctgggattaccgggcgttggccagtgcgcctggcctattcagatatttcttacttgcttcacataccgcacgtggtaaatctgtccctcttgtaaactgtatttagattaccacagtgacacttgttgaatgactagggagggggtaggagcttttgtcagaagttgagggatgcccttagtgtcacccgtggcaggtcaaggttcgcccttgccaggtgggtccctctccaagtgcggagggtgcgacgaagtttcacaatcacgagaacagtgtgacttccgcaaagattaagcggcacgactatcccgagaaatgggggggccccacagtaacgaagggatcgcaggtaggaaaacacg

SEQ ID NO: 326328 - DNA, 1425 bp, Homo sapiens
cgcgcgcccgccgttcccgcgaggcccacctagagccggaatgcgcaggcgcagtgtccccgggccaagatggctgcgcggtgctccacacgctggttgctggtggttgtggggaccccgcggctgccggctatatcgggtagaggggcccggccgcccagggagggcgtggtgggggcatggctgagccgcaagctgagcgtccccgcctttgcgtcttccctgacctcttgcggcccccgagcgctgctgacattgagacctggtgtcagcctcacaggaacaaaacattaccctttcatttgtactgcctccttccacacgagtgcccctttggccaaagaagattattatcagatattaggagtgcctcgaaatgccagccagaaagagatcaagaaagcctattatcagcttgccaagaagtatcaccctgacacaaataaggatgatcccaaagccaaggagaagttctcccagctggcagaagcctatgaggttttgagtgatgaggtgaagaggaagcagtacgatgcctacggctctgcaggcttcgatcctggggccagcggctcccagcatagctactggaagggaggccccactgtggaccccgaggagctgttcaggaagatctttggcgagttctcatcctcttcatttggagatttccagaccgtgtttgatcagcctcaggaatacttcatggagttgacattcaatcaagctgcaaagggggtcaacaaggagttcaccgtgaacatcatggacacgtgtgagcgctgcaacggcaaggggaacgagcccggcaccaaggtgcagcattgccactactgtggcggctccggcatggtaaggctctgcccgagactccacctcccacggcttgcaccactgactgagaagagctggttgtggcactgctcccagagaacgtatgctgggaattgggggagttggtgaactcagcctggctgtctttcccccgtgaccctgaggagacgagcctgtgctcctctttccctgataccacaggctcagcaaccagagcacagcagctccgggggcggggcgggggattgcatccagttgtcactttcttctttatttttctaacaattgctttggtaattcaaggggaaataatcttttttaaatgtactgttcagctcccaggagtcttcaggtacttctgtagacaggcggtatcatatttttcagtgtcgtgtggtcaagttgatgatctggagtgcagaagtttgtgtgttctagaaaatcagatgaacagattgaggccctgcacctgggttcctaggcagtgtgtttgagtgcacatgcacataaaaaacaagccttaaagagacatttttcttacgcacattgtggtcccagaaccacccatcagtttacctgcgtacttaggtt

SEQ ID NO: 326329 - DNA, 812 bp, Homo sapiens
cgcgcgcccgccgttcccgcgaggcccacctagagccggaatgcgcaggcgcagtgtccccgggccaagatggctgcgcggtgctccacacgctggttgctggtggttgtggggaccccgcggctgccggctatatcgggtagaggggcccggccgcccagggagggcgtggtgggggcatggctgagccgcaagctgagcgtccccgcctttgcgtcttccctgacctcttgcggcccccgagcgctgctgacattgagacctggtgtcagcctcacaggtggagtcttgctctgtcgcccaggctggagtgcaatggcgcgatcttggctcactgcaacctcagcctcccaggttcaaacaattctcatgcctcagcctcccaagtagctgggattacaggcgtgcaccaccatgaccggctaatttttgtatttttagtagagacaagatttcaccatgttggccagcttggtctcgaactcctgacctcaagtgatccacccgcctcggcctcccaaagtgctgggattacaataggcgtgagccaccttgcctggcctagagttgtttctcatgcaaacctaatgggttctttgtttaacatttgcagtggctccctattgctcttaggataaaatccagactccttagcatagctctaaggcccttcctattcctaggccccattaatcgttatcatctctaaccaccactaccaccactgccatctagtttagttataggtataaatctgtatggattcaaagtcctctttagcctatttctgtctctctctcttttttttccat

SEQ ID NO: 326330 - DNA, 2630 bp, Homo sapiens
gagcctttggaaacaacagatgtatacaatagcaaagtttcatttctttaccttgaaacgtgaaagtaaatcagtgagatcagtgttgcttctgcttttaatttttttcacagttcagatttttatgtttttggttcatcactcttttaaaaatgctgtggttcccatcaaacttgttccagacttatattttctaaaacctggagacaaaccacataaatacaaaacaagtctgcttcttcaaaattctgctggtgagagtgtgtgaagactcagatatcagtgatcttattagctttttcacaagccagaacataatggtgacgatgattaatgacagtgactatgtatccgtggctccccatagtgcggctttaaatgtggtgcattcagaaaaggactatgtttttgcagctgttttcaacagtactatggtttattctttacctatattagtgaatatcattagtaactactatctttatcatttaaatgtgactgaaaccatccagatctggagtaccccattctttcaagaaattactgatatagtttttaaaattgagctgtattttcaagcagctttgcttggaatcattgttactgcaatgccaccttactttgccatggaaaatgcagagaatcataagatcaaagcttatactcaacttaaactttcaggtcttttgccatctgcatattggattggacaagctgttgttgatatccccttattttttatcattcttattttgatgctaggaagcttattggcatttcattatggattatatttttatactgtaaagttccttgctgtggttttttgccttattggttatgttccatcagttattctgttcacttatattgcttctttcacctttaagaaaattttaaataccaaagaattttggtcatttatctattctgtggcagcgttggcttgtattgcaatcactgaaataactttctttatgggatacacaattgcaactattcttcattatgccttttgtatcatcattccaatctatccacttctaggttgcctgatttctttcataaagatttcttggaagaatgtacgaaaaaatgtggacacctataatccatgggataggctttcagtagctgttatatcgccttacctgcagtgtgtactgtggattttcctcttacaatactatgagaaaaaatatggaggcagatcaataagaaaagatccctttttcagaaacctttcaacgaagtctaaaaataggaagcttccagaaccaccagacaatgaggatgaagatgaagatgtcaaagctgaaagactaaaggtcaaagagctgatgggttgccagtgttgtgaggagaaaccatccattatggtcagcaatttgcataaagaatatgatgacaagaaagattttcttctttcaagaaaagtaaagaaagtggcaactaaatacatctctttctgtgtgaaaaaaggagagatcttaggactattgggtccaaatggtgctggcaaaagcacaattattaatattctggttggtgatattgaaccaacttcaggccaggtatttttaggagattattcttcagagacaagtgaagatgatgattcactgaagtgtatgggttactgtcctcagataaaccctttgtggccagatactacattgcaggaacattttgaaatttatggagctgtcaaaggaatgagtgcaagtgacatgaaagaagtcataagtcgaataacacatgcacttgatttaaaagaacatcttcagaagactgtaaagaaactacctgcaggaatcaaacgaaagttgtgttttgctctaagtatgctagggaatcctcagattactttgctagatgaaccatctacaggtatggatcccaaagccaaacagcacatgtggcgagcaattcgaactgcatttaaaaacagaaagcgggctgctattctgaccactcactatatggaggaggcagaggctgtctgtgatcgagtagctatcatggtgtctgggcagttaagatgtatcggaacagtacaacatctaaagagtaaatttggaaaaggctactttttggaaattaaattgaaggactggatagaaaacctagaagtagaccgccttcaaagagaaattcagtatattttcccaaatgcaagccgtcaggaaagtttttcttctattttggcttataaaattcctaaggaagatgttcagtccctttcacaatctttttttaagctggaagaagctaaacatgcttttgccattgaagaatatagcttttctcaagcaacattggaacaggtttttgtagaactcactaaagaacaagaggaggaagataatagttgtggaactttaaacagcacactttggtgggaacgaacacaagaagatagagtagtattttgaatttgtattgttcggtctgcttactgggacttctttctttttcacttaattttaactttggtttaaaaagttttttattggaatggtaactggagaaccaagaacgcacttgaaatttttctaagctccttaattgaaatgctgtggttgtgtgttttgcttttctttaaataaaacgtatgtataattaagtga

SEQ ID NO: 326331 - DNA, 1596 bp, Homo sapiens
agttagcttttgatagattgacttggaagtatgttgagttttttaaaaatatggctgtctactttgaatttgaattcacttaatatttcaataacttggaatattatttttaggcatagtacttgttatttcaaaaaattgttatatattggattaattatgtaacacaaatatgaaataaacatatgagtttctacttacataaataaataattgagtaaagaaatgtgtcagagaagaggtacatcttccttacagaacaattccaaataataatatatgtagataatacccacttcaagggaggaggcttaatctcctatcccccaagtttggacgggacttagccagtttcttgtaaaaaatgaacgacagaaggagaaaaatagtaactttacagttgagaaagctggcaaatactaccttaactaaacgatgttgtgcagatatcatgtattcactgatatgatatgatggaaaaagtactacagctgtgtaatattctctccaaaacccataacccaagtgtagtcatgagaaaaatatcagactaacccaaattgagggaccttctaacacacacctgaccagtacttctcaaaactgtcaaaatcatgaaaaagacagaaagagtaagaaactgtcacccacagttagagactaaggtgacgtgacagccaagaacactacggtatcctggatagaacctggaataaacaaaggacactaatagaaaattggtgaaatctaaataaagtatggagttcagtgacaaggaatgtaccaatgtcggtgtctcagttgtgaggaatttaccatggtaatataagatgataagattagggaaactgaaaccggataaagagtgtatggggatgctgtattttctttgtaatttttctctaaatataaaggtatatttttttaaaatgtagttatatgtgtgagagattattctttgaagctgtcattttatatctgagctttcttttaaaaaattacttcagatgtatcggaacagtacaacatctaaagagtaaatttggaaaaggctactttttggaaattaaattgaaggactggatagaaaacctagaagtagaccgccttcaaagagaaattcagtatattttcccaaatgcaagccgtcaggaaagtttttcttctattttggcttataaaattcctaaggaagatgttcagtccctttcacaatctttttttaagctggaagaagctaaacatgcttttgccattgaagaatatagcttttctcaagcaacattggaacaggtttttgtagaactcactaaagaacaagaggaggaagataatagttgtggaactttaaacagcacactttggtgggaacgaacacaagaagatagagtagtattttgaatttgtattgttcggtctgcttactgggacttctttctttttcacttaattttaactttggtttaaaaagttttttattggaatggtaactggagaaccaagaacgcacttgaaatttttctaagctccttaattgaaatgctgtggttgtgtgttttgcttttctttaaataaaacgtatgtataattaagtga

SEQ ID NO: 326332 - DNA, 2574 bp, Homo sapiens
gagcctttggaaacaacagatgtatacaatagcaaagtttcatttctttaccttgaaacgtgaaagtaaatcagtgagatcagtgttgcttctgcttttaatttttttcacagttcagatttttatgtttttggttcatcactcttttaaaaatgctgtggttcccatcaaacttgttccagacttatattttctaaaacctggagacaaaccacataaatacaaaacaagtctgcttcttcaaaattctgctggtgagagtgtgtgaagactcagatatcagtgatcttattagctttttcacaagccagaacataatggtgacgatgattaatgacagtgactatgtatccgtggctccccatagtgcggctttaaatgtggtgcattcagaaaaggactatgtttttgcagctgttttcaacagtactatggtttattctttacctatattagtgaatatcattagtaactactatctttatcatttaaatgtgactgaaaccatccagatctggagtaccccattctttcaagaaattactgatatagtttttaaaattgagctgtattttcaagcagctttgcttggaatcattgttactgcaatgccaccttactttgccatggaaaatgcagagaatcataagatcaaagcttatactcaacttaaactttcaggtcttttgccatctgcatattggattggacaagctgttgttgatatccccttattttttatcattcttattttgatgctaggaagcttattggcatttcattatggattatatttttatactgtaaagttccttgctgtggttttttgccttattggttatgttccatcagttattctgttcacttatattgcttctttcacctttaagaaaattttaaataccaaagaattttggtcatttatctattctgtggcagcgttggcttgtattgcaatcactgaaataactttctttatgggatacacaattgcaactattcttcattatgccttttgtatcatcattccaatctatccacttctaggttgcctgatttctttcataaagatttcttggaagaatgtacgaaaaaatgtggacacctataatccatgggataggctttcagtagctgttatatcgccttacctgcagtgtgtactgtggattttcctcttacaatactatgagaaaaaatatggaggcagatcaataagaaaagatccctttttcagaaacctttcaacgaagtctaaaaataggaagcttccagaaccaccagacaatgaggatgaagatgaagatgtcaaagctgaaagactaaaggtcaaagagctgatgggttgccagtgttgtgaggagaaaccatccattatggtcagcaatttgcataaagaatatgatgacaagaaagattttcttctttcaagaaaagtaaagaaagtggcaactaaatacatctctttctgtgtgaaaaaaggagagatcttaggactattgggtccaaatggtgctggcaaaagcacaattattaatattctggttggtgatattgaaccaacttcaggccaggtatttttaggagattattcttcagagacaagtgaagatgatgattcactgaagtgtatgggttactgtcctcagataaaccctttgtggccagatactacattgcaggaacattttgaaatttatggagctgtcaaaggaatgagtgcaagtgacatgaaagaagtcataagtcgaataacacatgcacttgatttaaaagaacatcttcagaagactgtaaagaaactacctgcaggaatcaaacgaaagttgtgttttgctctaagtatgctagggaatcctcagattactttgctagatgaaccatctacaggtatggatcccaaagccaaacagcacatgtggcgagcaattcgaactgcatttaaaaacagaaagcgggctgctattctgaccactcactatatggaggaggcagaggctgtctgtgatcgagtagctatcatggtgtctgggcagttaagatgtatcggaacagtacaacatctaaagagtaaatttggaaaaggctactttttggaaattaaattgaaggactggatagaaaacctagaagtagaccgccttcaaagagaaattcagtatattttcccaaatgcaagccgtcaggaaagtttttcttctattttggcttataaaattcctaaggaagatgttcagtccctttcacaatctttttttaagctggaagaaggtttttgtagaactcactaaagaacaagaggaggaagataatagttgtggaactttaaacagcacactttggtgggaacgaacacaagaagatagagtagtattttgaatttgtattgttcggtctgcttactgggacttctttctttttcacttaattttaactttggtttaaaaagttttttattggaatggtaactggagaaccaagaacgcacttgaaatttttctaagctccttaattgaaatgctgtggttgtgtgttttgcttttctttaaataaaacgtatgtataattaagtga

SEQ ID NO: 326333 - DNA, 488 bp, Homo sapiens
atctaaaatagtattcatctttgcatgtaacttttgaaaataatctgtttgaataatgttaatgttaataaatctcttgatacttgttgatataactagatatagccttgtaccatttctgatttagttaaaagttctttgaggtacttgagatacagcatactgtattcatttatttcttttcacctaggtttttgtagaactcactaaagaacaagaggaggaagataatagttgtggaactttaaacagcacactttggtgggaacgaacacaagaagatagagtagtattttgaatttgtattgttcggtctgcttactgggacttctttctttttcacttaattttaactttggtttaaaaagttttttattggaatggtaactggagaaccaagaacgcacttgaaatttttctaagctccttaattgaaatgctgtggttgtgtgttttgcttttctttaaataaaacgtatgtataatta

SEQ ID NO: 326334 - DNA, 369 bp, Homo sapiens
aaaccacataaatacaaaacaagtctgcttcttcaaaattctgctggtgagagtgtgtgaaggtctgtgaacgagtgttggcatggagcatggggttgaggggtggataaaggtctggattttaaaactatatttaaggtaaaggcatggtctgtctgcatgaaatctaaattatagttcaatacgtatcttattgatgctgaagaatatattacagtaaattttggtttacaaataaatgacagttttggccaggtgcgatggctcccacctgtaatcccagcactttgggaggccaaggcgggtggatcacctgaggtcaggggatcgagaccatcctggctaacacggtgaaaccccgtctctact

SEQ ID NO: 326335 - DNA, 3464 bp, Homo sapiens
gagcctttggaaacaacagatgtatacaatagcaaagtttcatttctttaccttgaaacgtgaaagtaaatcagtgagatcagtgttgcttctgcttttaatttttttcacagttcagatttttatgtttttggttcatcactcttttaaaaatgctgtggttcccatcaaacttgttccagacttatattttctaaaacctggagacaaaccacataaatacaaaacaagtctgcttcttcaaaattctgctggtgagagtgtgtgaagactcagatatcagtgatcttattagctttttcacaagccagaacataatggtgacgatgattaatgacagtgactatgtatccgtggctccccatagtgcggctttaaatgtggtgcattcagaaaaggactatgtttttgcagctgttttcaacagtactatggtttattctttacctatattagtgaatatcattagtaactactatctttatcatttaaatgtgactgaaaccatccagatctggagtaccccattctttcaagaaattactgatatagtttttaaaattgagctgtattttcaagcagctttgcttggaatcattgttactgcaatgccaccttactttgccatggaaaatgcagagaatcataagatcaaagcttatactcaacttaaactttcaggtcttttgccatctgcatattggattggacaagctgttgttgatatccccttattttttatcattcttattttgatgctaggaagcttattggcatttcattatggattatatttttatactgtaaagttccttgctgtggttttttgccttattggttatgttccatcagttattctgttcacttatattgcttctttcacctttaagaaaattttaaataccaaagaattttggtcatttatctattctgtggcagcgttggcttgtattgcaatcactgaaataactttctttatgggatacacaattgcaactattcttcattatgccttttgtatcatcattccaatctatccacttctaggttgcctgatttctttcataaagatttcttggaagaatgtacgaaaaaatgtggacacctataatccatgggataggctttcagtagctgttatatcgccttacctgcagtgtgtactgtggattttcctcttacaatactatgagaaaaaatatggaggcagatcaataagaaaagatccctttttcagaaacctttcaacgaagtctaaaaataggaagcttccagaaccaccagacaatgaggatgaagatgaagatgtcaaagctgaaagactaaaggtcaaagagctgatgggttgccagtgttgtgaggagaaaccatccattatggtcagcaatttgcataaagaatatgatgacaagaaagattttcttctttcaagaaaagtaaagaaagtggcaactaaatacatctctttctgtgtgaaaaaaggagagatcttaggactattgggtccaaatggtgctggcaaaagcacaattattaatattctggttggtgatattgaaccaacttcaggccaggtatttttaggagattattcttcagagacaagtgaagatgatgattcactgaagtgtatgggttactgtcctcagataaaccctttgtggccagatactacattgcaggaacattttgaaatttatggagctgtcaaaggaatgagtgcaagtgacatgaaagaagtcataagtcgaataacacatgcacttgatttaaaagaacatcttcagaagactgtaaagaaactacctgcaggaatcaaacgaaagttgtgttttgctctaagtatgctagggaatcctcagattactttgctagatgaaccatctacaggtatggatcccaaagccaaacagcacatgtggcgagcaattcgaactgcatttaaaaacagaaagcgggctgctattctgaccactcactatatggaggaggcagaggctgtctgtgatcgagtagctatcatggtgtctgggcagttaagatgtatcggaacagtacaacatctaaagagtaaatttggaaaaggctactttttggaaattaaattgaaggactggatagaaaacctagaagtagaccgccttcaaagagaaattcagtatattttcccaaatgcaagccgtcaggaaagtttttcttctattttggcttataaaattcctaaggaagatgttcagtccctttcacaatctttttttaagctggaagaagctaaacatgcttttgccattgaagaatatagcttttctcaagcaacattggaacaggtttttgtagaactcactaaagaacaagaggaggaagataatagttgtggaactttaaacagcacactttggtgggaacgaacacaagaagatagagtagtattttgaatttgtattgttcggtctgcttactgggacttctttctttttcacttaattttaactttggtttaaaaagttttttattggaatggtaactggagaaccaagaacgcacttgaaatttttctaagctccttaattgaaatgctgtggttgtgtgttttgcttttctttaaataaaacgtatgtataattaagtgaagctgcatgtttgtattgaagtatattgaactatatagtttgtatgtcatctttttcaccattcagaaacagtgcttctgaatttgtgatttaaaggaattgtaatagaatagttttatttttaagttatctttaagtttatgccatcttcttaaataagtacgtaatgttccaatctaaataaaaaactaattcataactaatgcatagaaaagatacataaagcaatgtgaaagtttcttgcttctcctttttaatttctaaaaaagccactttgaatggaagttgtcatccgtaaaagctgaagtgtaagcactaggaaatctcaatatagagatttgaggaaagttatatccactaggtggcagtcattgatcataataagtgaaatgagcccttgttctagtacatgattttaggcttaggtaattaggtatgtgaaattacatttctttaatttaaagtaaaattcagaaggttttagttattataattaaaggaagactgtgtgtagaatcttacgtaatagtctgattctttgactctgtggctagaatgacagttatctatggaggtggtagaattaagccataccttttccttcatcactcttggaacatataaattttttgtcatcttccttgcaaagggcacatttaattttgttcttgaataaaatattttattgggtatttgtttttattggtaaactttagtgaatctcttctataaaattgtaagtagatcagtgtgtagatttatttagtaacttacctcattgactttggaacatggtaggatatgaataaactctttcaagggttaaattaaaaa

SEQ ID NO: 326336 - DNA, 1827 bp, Homo sapiens
  misc_feature (1690)..(1690): n is a, c, g, or t
gagcctttggaaacaacagatgtatacaatagcaaagtttcatttctttaccttgaaacgtgaaagtaaatcagtgagatcagtgttgcttctgcttttaatttttttcacagttcagatttttatgtttttggttcatcactcttttaaaaatgctgtggttcccatcaaacttgttccagacttatattttctaaaacctggagacaaaccacataaatacaaaacaagtctgcttcttcaaaattctgctggtgagagtgtgtgaagactcagatatcagtgatcttattagctttttcacaagccagaacataatggtgacgatgattaatgacagtgactatgtatccgtggctccccatagtgcggctttaaatgtggtgcattcagaaaaggactatgtttttgcagctgttttcaacagtactatggtttattctttacctatattagtgaatatcattagtaactactatctttatcatttaaatgtgactgaaaccatccagatctggagtaccccattctttcaagaaattactgatatagtttttaaaattgagctgtattttcaagcagctttgcttggaatcattgttactgcaatgccaccttactttgccatggaaaatgcagagaatcataagatcaaagcttatactcaacttaaactttcaggtcttttgccatctgcatattggattggacaagctgttgttgatatccccttattttttatcattcttattttgatgctaggaagcttattggcatttcattatggattatatttttatactgtaaagttccttgctgtggttttttgccttattggttatgttccatcagttattctgttcacttatattgcttctttcacctttaagaaaattttaaataccaaagaattttggtcatttatctattctgtggcagcgttggcttgtattgcaatcactgaaataactttctttatgggatacacaattgcaactattcttcattatgccttttgtatcatcattccaatctatccacttctaggttgcctgatttctttcataaagatttcttggaagaatgtacgaaaaaatgtggacacctataatccatgggataggctttcagtagctgttatatcgccttacctgcagtgtgtactgtggattttcctcttacaatactatgagaaaaaatatggaggcagatcaataagaaaagatccctttttcagaaacctttcaacgaagtctaaaaataggaagcttccagaaccaccagacaatgaggatgaagatgaagatgtcaaagctgaaagactaaaggtcaaagagctgatgggttgccagtgttgtgaggagaaaccatccattatggtcagcaatttgcataaagaatatgatgacaagaaagattttcttctttcaagaaaagtaaagaaagtggcaactaaatacatctctttctgtgtgaaaaaaggagagatcttaggactattgggtccaaatggtgctggcaaaagcacaattattaatattctggttggtgatattgaaccaacttcaggccaggtatttttaggagattacttaatgggtacagtgtacattgttgggtgatactctcagatacctgattcaccattgtatagtcttacgcatgtaacaaaactgcatttgtacccctnaatttacatgcacacacaaaagaataaaaataaacttaaaaacttagaaatgaaacaaatctttagtattaatgtttgtgatactgtttgtgtatttagtataagtatttgtaacatttaagacaattttgcctatt

SEQ ID NO: 326337 - DNA, 846 bp, Homo sapiens
ctctgccgtgggcctgcgagaatcgaggcactcgctggcgtacccatgtatcgaaatgagttcacggcctggtaccggcggatgtcggtggtctacgggatcggcacctggtctgtgttgggctcactgctttactatagccggacaatggcgaagtcgtcagaccaaaaggatggctcagcaagtgaagtacccagtgaactctctgaacgcccaaaaggattttatgtggaaacagttgtcacatataaagaagattttgttccaaatacagaaaagatcctcaactattggaaatcatggactggtggccctggtacagaaccatgactggctgctgaattctgaaaaccaggacttggttcaacatttaaatttgatagttgccctgattcccattttgggtttgtgaaaagtgtatgtatttaaatttgctgtaaaacataatcactaataatatgcaataaatattttcttgaaggaaaaaaaaaaaaaaaaaaaaaaaaaaaaacacacaaacaccacaaacacacggggggggcgcgggccaaaaggattcccgcgggggcgccaagacaggggcgccacggttctgggacaacggggggcccaaagggagcaccaaactaaacgcaacacagcggccacgcgtaaacaaggcggcacggggacaacggaaatgggagacccgggaggggcacccccacccggggggcggacaccgtggcccacacccccacggaataaaacgcaacgggggaaacacaaacctacagcggcaacggggccacaccccgccatatgtggccgcgggaaaaacggccacaggagatgacatgcacgctt

SEQ ID NO: 326338 - DNA, 616 bp, Homo sapiens
  misc_feature (521)..(521): n is a, c, g, or t
  misc_feature (523)..(523): n is a, c, g, or t
ctctgccgtgggcctgcgagaatcgaggcactcgctggcgtacccatgtatcgaaatgagttcacggcctggtaccggcggatgtcggtggtctacgggatcggcacctggtctgtgttgggctcactgctttactatagccggacaatggcgaagtcgtcagaccaaaaggatggctcagcaagtgaagtacccagtgaactctctgaacgcccaaaaggattttatgtggaaacagttgtcacatataaagaagattttgttccaaatacagaaaagatcctcaactattggaaatcatggactggtggccctggtacagaaccatgactggctgctgaattctgaaaaccaggacttggttcaacatttaaatttgatagttgccctgattcccattttgggtttgtgaaaagtgtatgtatttaaatttgctgtaaaacataatcactaataatatgcaataaatattttcttgaaggaaaaaaaaaaaaaaaaaaaaaaaaaaaatttgggggggncngggccggaaaaagttttaaaaacattggtggggggggggggcctgtgtgggaagtgggaaagggggccaaggaaaacggggcaggacaagggg

SEQ ID NO: 326339 - DNA, 596 bp, Homo sapiens
tggggtttcactacgttggcgaggctggtctcaaacacctgacctcaggtggtccacctgcctcggcccccacaaagtgagattgggattacaggcgtgagccaccgcacccagcttttcttttcccttccttttcattccttccttcattattggggttggagagagtggatgtaattcttaccttagttaatttctaagactttaatgactgctttctaagttaataattcaggtgttcttttttttttttctcttaatggtgataaagtagaccaaaaggatggctcagcaagtgaagtacccagtgaactctctgaacgcccaaaaggattttatgtggaaacagttgtcacatataaagaagattttgttccaaatacagaaaagatcctcaactattggaaatcatggactggtggccctggtacagaaccatgactggctgctgaattctgaaaaccaggacttggttcaacatttaaatttgatagttgccctgattcccattttgggtttgtgaaaagtgtatgtatttaaatttgctgtaaaacataatcactaataatatgcaataaatattttcttgaaggaaa

SEQ ID NO: 326340 - DNA, 485 bp, Homo sapiens
ctctgccgtgggcctgcgagaatcgaggcactcgctggcgtacccatgtatcgaaatgagttcacggcctggtaccggcggatgtcggtggtctacgggatcggcacctggtctgtgttgggctcactgctttactatagccggacaatggcgaagtcgtcagaccaaaaggatggctcagcaagtgaagtacccagtgaactctctgaacgcccaaaaggattttatgtggaaacagttgtcacatataaagaagattttgttccaaatacagaaaagatcctcaactattggaaatcatggactggtggccctggtacagaaccatgactggctgctgaattctgaaaaccaggacttggttcaacatttaaatttgatagttgccctgattcccattttgggtttgtgaaaagtgtatgtatttaaatttgctgtaaaacataatcactaataatatgcaataaatattttcttgaaggaaa

SEQ ID NO: 326341 - DNA, 718 bp, Homo sapiens
gctggagtgcaatggcgcgatcttggctcctgcaacctccgcctccgggattcaagcgattctcctgcctcagccttcggagtagctgggattacaggcatgtgccaccacgccctgctaattttgtatttttagtagagatgggatttctccatgttggccacgtttgtctcgaactcccgacctcagatgatccagcctccttggcctcccaaagtgctgggattacaggcgtgagccactgtgcctggcgaaacttatatttttagcgctacactccttgtgtctagattagcacatgccaatataaaagtcttcattatttgttgatagttgttaagtgaattggggttagtaataaaggaaatgttagttacataaattactatgactgattaagtcactgcttatattttataaaatttattttccagaagttacattttcttaagaataaaaaaagaaacaaaaaatgtaatgtaatcttcacattttataaataaaaataatctaagaattttgtattgtgaaaagttcactccattgttttctgtcttccaataaacctggcttaaataaataatttttaaaatataaagtttgcttaaatccacagtaggaaccgcgaaccataaatgacaatattaaattgcaataaaatatttgtaagtatataataaagaataatataactgagaataaaacataatatattaat

SEQ ID NO: 326342 - DNA, 908 bp, Homo sapiens
  misc_feature (729)..(729): n is a, c, g, or t
  misc_feature (779)..(779): n is a, c, g, or t
  misc_feature (790)..(790): n is a, c, g, or t
  misc_feature (825)..(825): n is a, c, g, or t
  misc_feature (841)..(841): n is a, c, g, or t
  misc_feature (855)..(855): n is a, c, g, or t
  misc_feature (863)..(863): n is a, c, g, or t
  misc_feature (867)..(867): n is a, c, g, or t
  misc_feature (869)..(869): n is a, c, g, or t
gctggagtgcaatggcgcgatcttggctcctgcaacctccgcctccgggattcaagcgattctcctgcctcagccttcggagtagctgggattacaggcatgtgccaccacgccctgctaattttgtatttttagtagagatgggatttctccatgttggccacgtttgtctcgaactcccgacctcagatgatccagcctccttggcctcccaaagtgctgggattacaggcgtgagccactgtgcctggcgaaacttatatttttagcgctacactccttgtgtctagattagcacatgccaatataaaagtcttcattatttgttgatagttgttaagtgaattggggttagtaataaaggaaatgttagttacataaattactatgactgattaagtcactgcttatattttataaaatttattttccagaagttacattttcttaagaataaaaaaagaaacaaaaaatgtaatgtaatcttcacattttataaataaaaataatctaagaattttgtattgtgaaaagttcactccattgttttctgtcttccaataaacctggcttaaataaataatttttaaaatataaagtttgcttaaatccacagtaggaaccgcgaaccataaatgacaatattaaattgcaataaaatatttgtaagtatataataaagaataatataactgagaataaaacataatatattaataaaaaaaaaanaaaaatggccttgttgccttagcgggggagctctcgcggccttcccttanggaggtaaatnatgaccccgctactgactcgtgcctcggcgttggntgcgggagcggttcantcactaaggcggantcggtttnccanantcggggataaccacgagaacctgtggaccaagccgcaag

SEQ ID NO: 326343 - DNA, 476 bp, Homo sapiens
gctggagtgcaatggcgcgatcttggctcctgcaacctccgcctccgggattcaagcgattctcctgcctcagccttcggagtagctgggattacaggcatgtgccaccacgccctgctaattttgtatttttagtagagatgggatttctccatgttggccacgtttgtctcgaactcccgacctcagatgatccagcctccttggcctcccaaagtgctgggattacaggcgtgagccactgtgcctggcgaaacttatatttttagcgctacactccttgtgtctagattagcacatgccaatataaaagtcttcattatttgttgatagttgttaagtgaattggggttagtaataaaggaaatgttagttacataaattactatgactgattaagtcactgcttatattttataaaatttattttccagaagttacattttcttaagaataaaaaaagaaacaaaaaatgt

SEQ ID NO: 326344 - DNA, 3365 bp, Homo sapiens
agctgctacgcccaaccagcccagcggcggccattcgcggaaaaagaggcagagcctgtgccagctacagcctcctccgagccaccgcggcggcggaccggcctctcctcccgcctcgcccccacccccacccacctctatcccagtgtctccgtctgagggtttgtcctgttaatgcgggatgagcgatcagaagaaggaggaggaggaggaggcggcagcggcagcggcgatggctacagaaggagggaaaacctctgagccagagaataacaataaaaaacccaaaacctcaggctcccaggactctcagccctctcctctggctttactggcagctacttgcagcaaaatagggactcctggtgaaaatcaagcaactggacaacaacaaattattatagatccaagtcaaggattggtgcaacttcaaaatcaaccacaacagctagaactggtaacaacgcaacttgctggaaacgcttggcaacttgttgcctccactcctcctgcttcaaaagagaataacgtttctcaaccagcctctagttcgtctagttcttccagcagtaataacgggagtgcatctcctacaaaaactaaatcaggtaattcttccacccctggtcaatttcaagtcatacaagtacaaaatccaagtggtagtgtacagtaccaagtaattccacaacttcagacagtggaaggtcaacaaattcaaatcaatccaactagtagttcatctctacaggatttgcagggtcaaattaagctcatttctgcaggtaataatcaagctatactcacagctgctaacaggacagcttctgggaatattcttgctcaaaacctggcaaatcagacagttccggtccaaattagacctggtgtttcaataccactgcagttacagactcttcctggtactcaggctcaagttgtaacaaccctaccaattaacattggaggagtgactctagctttgccagtgataaacaacgtggctgccggaggagggactgggcaggttggccagcctgctgctactgctgatagtgggacttccaatgggaatcaattagtttccacacccaccaacaccactacttctgccagtactatgccagaatctccctcctcctccactacctgcacaaccactgcttcaacgtctttgacaagcagtgacacattagtgagctcagcagatactggccagtatgcaagcacatcagccagtagttctgaacgcaccattgaagaatctcaaacacctgctgctactgagtctgaagcccagagctccagtcagcttcacgctaatggaatgcagaatcagcaggatcaatcaaattctcttcagcaggtgcaaattgtaggccaacctatcttacagcagatccagatccaacagcctcagcaacagatcattcaggctattccaccacagtcgtttcaactccagtcagggcagacgattcagaccatccagcagcagcctttacagaatgttcaacttcaagcagtaaatccgactcaggtgcttatcagggctccaactttaacaccttcagggcaaatcagttggcaaactgtacaggttcagaatattcagagtctttcaaatttgcaagttcagaatgctgggttatcccaacaattaaccatcaccccagtgtcttcaagtggtggcacaactcttgctcagattgctcctgtggctgttgctggtgccccaataactttgaatactgcccagcttgcatcagtgcctaaccttcagacagtgagcgttgccaacctgggtgctgcaggtgttcaagtgcagggagttcccgttacaatcactagtgttgcaggtcagcagcaaggacaagatggagtaaaagtccagcaagctactatagctcctgtaactgtagcagttggaggaattgctaatgccacgataggtgctgttagtcctgaccaactcacacaagtgcatttgcagcaaggccagcagacttctgatcaagaggtacaacctggcaagaggcttcgaagagttgcctgttcctgtcctaattgtagggaaggagaaggaagaggcagtaatgaaccaggaaaaaagaagcagcatatctgtcatattgaaggatgtggtaaagtttatggcaaaacatctcatttacgagcacatcttcgctggcatactggagaaagaccttttatatgcaactggatgttttgtggcaaaagattcacacggagtgatgagctccagagacatagaagaacccatacaggtgaaaagagatttgaatgcccggaatgttctaaaaggtttatgcggagtgatcatctctccaaacatgtcaaaacgcaccagaataaaaaaggtggtgggacagctcttgccattgttacctcgggagaactggactcatctgttacagaggtgcttggctccccaagaattgtcacagttgcagccatttctcaagattcgaatccagcaactcccaatgtttcaaccaacatggaagaattctgaaaagttatttataacagagacctctagtgctgcacttgtttacacacctttgaaaatctggaaatgggctggtcaagtggattacagagtaggaaattatgttttcattcttggcttctttaagtattccagggtttggggtcaacacgtgaagtgttgaattttaaaaaatacaaaaagcaaactgatgtactggaaacagaaaagtatttcctccatactataagttgtagttgtttggaaatatatcacataacctttatacagaatcttcccatctcttaatatcatgtgttaacatgtttaaaaagaccttagtagtttgcaggctggaccttaattggacttattttctttgaaagtactttgttataaattcagtcagtaataatttacgtgtattctttttctctatagcacagaaaacagatagttaactgatgatagcgctaatactgtatttccttagcttgatttttggaaaatcaaccgaaaatagtttggccgtcttttctaaatgttagaaattcttcaacagttgaattaggtaagttccaaaacagtaatctgagatgcatctcagatctttattaccactacattatagtagtgtgtatgcagacaatcagtgaagtccaattactttctccatttggagacacaagaggaacatagagttaaatcttaggttaaattttaggttgacaccttaggaaaatgctgggaaaaaaatggttaaaacaaaactcatcatagcttcagaaaaataaaatgaggcatcttaacatgcaatgttctaaagttaggattgattatattcctaacccta

SEQ ID NO: 326345 - DNA, 410 bp, Homo sapiens
agctgctacgcccaaccagcccagcggcggccattcgcggaaaaagaggcagagcctgtgccagctacagcctcctccgagccaccgcggcggcggaccggcctctcctcccgcctcgcccccacccccacccacctctatcccagtgtctccgtctgagggtttgtcctgttaatgcgggatgagcgatcagaagaaggaggaggaggaggaggcggcagcggcagcggcgatggctacagaaggagggaaaacctctgagccagagaataacaataaaaaacccaaaacctcaggctcccaggtaaaagcaaacaaattaaaaaaattcatcacgacacattaggagagagagggagttatgccctttgaatgtccagaagtaacagaataaaatgtttatccactca

SEQ ID NO: 326346 - DNA, 528 bp, Homo sapiens
gaatactgcccagcttgcatcagtgcctaaccttcagacagtgagcgttgccaacctgggtgctgcaggtgttcaagtgcagggagttcccgttacaatcactagtgttgcaggtaagttctgacatctttttaagtaccttttaaatagtttttcataacaattattgcttttctctcctaattctaaggtttgacgtagacctctgaagtaaacacacaatcataaggaaccagaaatagcaatattatactaacaaacatagctctgtagtaatcaatgtgacatgttcacttttgtagattttataataatgtgttaaatttgttagttttttaaaaagtattgttttatgggacagagctttctgattagaatcataattgccttctgtaatttagtggtcttatttgagtacattccagctcttcagaaagaaccctagtcgaaatgatatttatctcttctttgagggaaagtagttttaaactgaattggtatatataattgtgagtctgttgaactttt

SEQ ID NO: 326347 - DNA, 702 bp, Homo sapiens
cctagaaccacagagtctgtttcttggctcatgctggaaagccctgctcccagcaggtctgtcctggccttggttcttgtggcatgtggcatgtactcattatctgttgggagcctttgtattcgagccacgaatccagctcttctcccaggaggtgatgtgaaaggaaggagtaaagagcagcttcaaagccccttcttcccctcccgttttccctgttagatttgcagccccgtgttggccaggcctgggaattgggtcattcatagttacagctcagattccccgagcacgtttccaccccacgcacacctcagcttcagacactccataaagcttttggagctgaaacattttcttttctttttacttttgtgaattaggtcattttgagtgtgaagtattatgtttttccttttttctccttccccccagaagtcctgtggttgaaaagttacggacatagaatctatatccgtgactatgacattattcaactggaagagtgattttcagggagaaacgacctaaaactctgagaagaagagaattactgacacattaggcttttagctgatccacgtttagggaccaaggtgacgatagacaaaaacccaaccagatgtttaattgtaattggctgtgctgataaacggcttgagaccagcctgggcaacatagcaagaccctgtctctaaaaaa

SEQ ID NO: 326348 - DNA, 698 bp, Homo sapiens
ttttaggacagattcatatgaacaaataattttaccagattgtaaaaaatgtagaggaatttggactccttagattggtggtccaaatgaaaggctgataaattctgcttgggggccttgattcagagaagacttcaaatagaaaatgcttgaaaggagcaaattagataataaggaaatctttacatactctattgctgttcttattgttgttgtcattagctgtttaagcgtatgcatatgacttatcacatctaagatgcttgaatagttttggatagcatatattcataagaacatttgttaacattaaagtaaacttctagcctggagaagggtagactcaggggtatgcatgatagcatgtttaaataatctgaaggaatgctgtagggtgggtggggtgacaggtttaaactgctccagaatacagaatcaggatcaatgaataaaggttatgagaaggctgatttaccctcactacaaagaagaacctttcaataattaaagcacagcctgggaggaatcttaattgacaaagagaaagtgcagctttgaaagcaaatgcagagagagcttcacagaaaagagagcatggaaaaatcaagccctgaataatgtaatatcatgtgttggtattcagaagccaaaggaagatggtaaaatggtagcagtgacagtggtcctgggagagagat

SEQ ID NO: 326349 - DNA, 1134 bp, Homo sapiens
aaaaaatgcaggattgaggccaggtgtggtggctcacacctgtacttggagcactttaggaggccgaggtgggcggatcacttaaggtcaggagtttgagacgagcctgggcaacaaggtgaaaccctgtctctactaaaaatacaaaaattagctggacgtggtggtgcatgcctgtaatcccagctacttaggaggctaaagcacaagaatcacttgaacctgggaggcggaagttgcagtgagccaagatctcagcctaggtgaaagaatgagactccgtctcaaaaagaagaagaaaaaaatgcagattagtttgggagaaattatcttttcagacctctttgctagaatgcataaatgccattaaaaaaaggattgtattataaccctaacaccagcatatgtacttaaacatgctcctaaaataggtgagtgtgtggttgttggtgactggcataggctttcatagggtaacatacatctacatgcttgcctattcctagactggttagtgacaatatttgggtcctacccctatctctttccttttctttttttctttttttgtaactttcttaccttattttctcttcatttctcagagtcaattctttctcttatctctccaagacctcaccttaaatagttaaggctaacttctgttcctttctcttcctcccaagagaactgtgaattaggtggaaatagcattgaactagcaagagaagcggatcctgtacatgttctcccgtggagttgctgcatgagactcgggcaagtcactcagactcttgggaactgtgaaacaaatccctctcaactcaaatccaattccttctgttccagctcctctatgtgtccctcctggggatcagagggctttctagctcccactctgatgagctgtcattcttaaaacatctctgtagtgcccaccagaaccagtgagccaagatctttggcgagtgtacagctgctcagagcctcaagctttacctctgtaaaatgggttcagcacattgtcaagagatcaaatgggcagatatgtatatatatgctatatatatgttatatacaaactatgatataatatacaatgattatataatatatataagctatacatagctt

SEQ ID NO: 326350 - DNA, 1130 bp, Homo sapiens
aggggtctccgcccggcgccacccaggtccccaggcgggaagcggctcaactgggaaagcagccggcgcccgtggtctccgggccggccgcccgcgttcttccggccagccccccgcggaggggaggggcgccgacgccgcgttctcggggccccgcagccggcggaagggccgcgcatcgcggaagcgcggcggcagctgaggatcagctgctggaggaggcggagaggcagagggaggagcctcggggggaaggagagggaggggaccgtcaggaagccgcgaacgccgccgagtgtctgcacacctcgctctgcctgccatggctggttaaagaaccatccggatcgcagcgcggggggagggccgggtggggggagcagcggccgcgcgtgaggccgagggaggggcggcggcgcgagcggcggcggcggcggttccagcatgaagaggagagctggcctggggggcagcatgaggaggagatgaccgccgggttctgctatggcacatggaacaagccatccactccagggtcaagcccatacagctgaaaggagagcaccattccaacattttttgcctggctttcaacagtgggaacactaaagtgttctctggaggcaatgatgagcaagttatcctccatgatgttgaaaggtaaatagattggtggtgtgtgaaggtgattgactttgtttttcatatatgaagaggcaaatatctctttagactaaaatagtttttgttttttgaaaaaaacaacatgaaaccagctgttcttttctaaaaaaattcctacaatagtttgaaataaataaagttttgatttaaaaaggaaaaaaaaaaaaaaaaaaaaaaattgggggggggcttggcgcccacgaagaaaggtttttctaaaaccctcttgcggtgtggggccggggggccccttttgttctgtgtaccctttgggccacaacgcggtcccaaggagagaccccggccatgcacttagcgggctgggttttcccaccaattaaaaagcgcgcgggggacacggcgtgcttggaaccaaatcccgagggggttcgggggcatagggtctttcacaggggtcccagaactcgtatacgccccgggtaggg

SEQ ID NO: 326351 - DNA, 5892 bp, Homo sapiens
aggggtctccgcccggcgccacccaggtccccaggcgggaagcggctcaactgggaaagcagccggcgcccgtggtctccgggccggccgcccgcgttcttccggccagccccccgcggaggggaggggcgccgacgccgcgttctcggggccccgcagccggcggaagggccgcgcatcgcggaagcgcggcggcagctgaggatcagctgctggaggaggcggagaggcagagggaggagcctcggggggaaggagagggaggggaccgtcaggaagccgcgaacgccgccgagtgtctgcacacctcgctctgcctgccatggctggttaaagaaccatccggatcgcagcgcggggggagggccgggtggggggagcagcggccgcgcgtgaggccgagggaggggcggcggcgcgagcggcggcggcggcggttccagcatgaagaggagagctggcctggggggcagcatgaggcaatgatgagcaagttatcctccatgatgttgaaagcagtgagacattggacgtgtttgctcatgaagatgcagtatatggcttgtctgtgagcccagtgaatgacaacatttttgccagttcctcagatgatggccgggttctcatttgggacattcgggaatccccccatggagagcccttctgcctggcaaactatccatcagcctttcatagtgtcatgtttaaccctgtggagcccaggttgttggccacagccaattcaaaggaaggagtgggactctgggacattcgaaaacctcagagttctctcctgcgctatggtggaaacctgtccctccaaagtgccatgagtgtacgattcaacagcaacgggacccagctcctggccctgaggcgacgcctgccccctgtgctctatgacatccattcccgcctgcctgtgtttcagtttgacaatcagggttacttcaactcatgcaccatgaaaagctgctgttttgcaggagatcgtgaccagtatatcctttcgggctctgatgacttcaacctgtacatgtggagaattcctgcagatccagaagcaggtggcattggtagggtggtcaacggagccttcatggtgctgaaagggcatcgatctattgttaaccaagtccgatttaatccccacacctacatgatctgctcttctggtgtagaaaagattatcaagatctggagcccatacaagcagccaggatgtactggagacctcgacggtcggattgaggacgattcccgctgcctctatacccatgaagagtacatcagccttgtgctgaacagtgggagtggcctgtcgcatgactacgccaaccagtcggtccaggaagacccccggatgatggccttctttgactcactggtacgccgagagatcgagggctggagctctgactcagacagtgacctcagtgagagtactatcctccaactgcacgctggggtcagcgagcgctcaggctacactgactcagagtcttcggcctcattgcctcgctccccgcctcccacagtagatgagtctgccgacaacgccttccacctggggcccctgcgggtcaccaccacaaacacagtagcctcaactccaccaacacccacgtgtgaggatgcagcctctcgccagcagcgtctgtctgctctgcggcgctaccaagacaaacgcctcctggccctttccaatgagtccgattctgaggagaatgtctgtgaggtggaactagacacagatctctttccccggccacggtcacccagccccgaagatgaatccagcagttccagcagctctagcagctctgaggatgaggaggagctgaatgaacgccgagcctctacctggcagcggaatgccatgcggcgccgacagaagacaacccgagaagacaagcccagtgccccaatcaagcccaccaacacttacattggagaagacaactatgattacccccagatcaaagtggatgacctctcctcctccccaacctcgtcccctgagcggagcacttccacgctagagattcaaccaagccgggcatcaccaacttctgacatagaatcagttgagcgaaaaatttataaagcttacaagtggctccgctactcttatatctcctactcaaataacaaagatggagagacctccttggtgaccggggaggcagatgaagggagagcaggaaccagccacaaagacaacccagccccttcttccagtaaggaagcctgtctaaacatagcaatggcccagaggaaccaggacctgccacctgaaggctgcagcaaggacacttttaaagaagagactcctagaactcccagcaatggcccaggccatgagcacagcagccatgcttgggcagaggtgccagagggtacctctcaggacactggcaatagcggctctgtagagcacccttttgaaaccaagaagctcaatggaaaggccctgagcagtcgggctgaggagccgccttctcctcctgtccccaaggcatctggctccactctcaacagcgggtctggcaactgtcccaggacccagtctgatgacagtgaggagaggagcctcgaaaccatctgtgccaaccacaacaatggacgcttacaccctcgtccccctcaccctcacaataacgggcagaacttgggggagctggaggtggtggcctactcttccccaggacactcagacactgaccgtgataactcgtccctgacagggacactcctacacaaagattgttgcgggtctgaaatggcctgtgagacccccaatgctggaacaagagaggaccccactgacaccccagccacagatagtagcagggctgttcatggccacagtggcctcaaaaggcaacgaattgaattggaagatacagattcagagaattcctcctcagagaagaaattaaaaacatgataaatacaaagggaaaacaaaaagctacaaaagtagccttacaaaaaaaaaaaattgtttagtgaatacagaggaaaggaaaaacaagtattaaaggcacatgaaaccagggcctgaaattttgtgtctgatgctgctcccttctatccaacattcaacaacgggtctgaatgtctagctggccattggcttgtgctgtgttaagaaaggggaaaaaaaaataacccaagtgactcctttctagtgagacgtgagcgtagtgtgccgcgcaaggctctgtggaagtaaatctttgttgagacgttcgacttgttcttgtgtacgcacaatggcacgtgtgcgcttattgtctcataagaccttccttttagttctccatcagaaaggacctatgaatttgtactttttgccatctcaccctgtttacatgccataggtgttctggtctggatgatgggtgcctgttaaatcaggttgtgctgccagtgagttgtagatttatgctggaagaatggagaatggaaacaggccttcagcccattggctgcgctggagaggaaagcatggttcctttcttaaagaaatcttccatgttttctctaagtaacacttctttattgagcatttaatgtggacatactataaaaaagaatttttaatgctaatgagaggtttagcacttaagatcagattcaagagaatatagattcctgataaatttcactgtttgcaaattgagcagtgctgcaacatgtactgtatgaaggccataaaatagagctagtcatggataacagactttaaccagttaggtgctagatcctaagaggcactcacaaggccagcaggtgcttccttggctcccatgatcgatcgaggcatagtgaaagaagggcaaagacagctttccagagctttgtgctcaggctactaaagtagttgttataggtgtgttaacgaagaagcttagtgaggagcagaatgtggtactatattcatttaactcaacccagaaccattggtcagaattggtgggactggcatcttccctcagacttgcagttgatagaggctgtggtgttctcactagactttgcagagcagtaggcatctcaaggtaacagattcttattgagtaggtctattaggagtcagaaggtgttggggaggagtctctggcttatgactcctggttcccattagtcttaagtcttctggttcccataaaagactcagttttattgaggtagatacaggtttagaagagaaaagagcaacagattttcagcgttgcagtcactcggttatctatgaagggttgtgcaaaacaggaaggtctgggaatgaccagatatcttgttggcataaatgttatgaaaaggcagaatactggcaagaaatgaggaagagagagaaaaacaatataactttcttgagtgcaaaggtgctagacaactaggagcccagctgggattggtgtagggagggccgaacgctgactagtgtggcctcactgccccaggcttcctttcagaggaaggcctgtcctgctggaactggagccaaggggaggctgcctatgaaggcagaagatgtggatgaattcaggcactgggggtgggggggttatttataaacacaaggtggttggtttaagccaaaaggagataccatcctgataagctctgtgaaagagaagatgtgcctggtgtgtgtaatgcggctggggtatgaaaacactgagaaggagatgaaggagtgtgtgtagcatgggggtgtgtacaacttaacacctggacttttactgggggagtgggaaagtgattctgtaaccaacattagaattactttggatttgtaatcagattggttctatgatttgtctttgactattcacagataattgtaaatgctggttttataagcccaagtcattttacatttgcttttccaaaatgtattaaattggaattttttaatcctttatatacaaaaaaaatacgatcactcagtgtgtgtttctcttccccttcttagtcagcacacccagtcctttattttattctattctatttattttattttaataagtacttagcctcttctgacttctcaaaggacaatcggatacatatcttcctgaaaagaagtagttaaagttcccttgggaactagctacttggtagttacaattcccaaatgcagaacttggtcttttcatgttaaaagccttaatctcatttgggtactcaaaagagaaatcagagtttattctggttaacttgagaagccaagaaagatcatttttagcaagtatgccttccatccttggcagaggcttcccagcatcctaggctcagcttaccgggtgataggccccataagacacacacatgagcagggtgagaaatgcttgctttatagctgctccaccctcatctccagagattttgtgtctatggttgtgggtctggaaacctggcaggaaccacttctagagtacctttgcctaaactcttttagaattgaggccccaactttgatggcacatttaatacccaatttcttccataatagatatttttaatagcaggacagatggcactgattagatcaagaactatttggaagtgcctcttatgtttttttcctgcattctgtacataaagttttaagtggcaggtccagatatgtaaaatcatttctctctattttccagctggttttgttaatgattctctaggacagcaggtaaatgagttaagttgttggcttggggcaagtgaagtttgtgactatgcttgatttaataagctgagagtctcttgtttgtctgtcaaggtgccttcctctgctgaagccttacctccttctcacccagtaacggttaactcttctcttgtgtatatgcaaataaacctattattcacttaaaaaaaatt

SEQ ID NO: 326352 - DNA, 5265 bp, Homo sapiens
aggggtctccgcccggcgccacccaggtccccaggcgggaagcggctcaactgggaaagcagccggcgcccgtggtctccgggccggccgcccgcgttcttccggccagccccccgcggaggggaggggcgccgacgccgcgttctcggggccccgcagccggcggaagggccgcgcatcgcggaagcgcggcggcagctgaggatcagctgctggaggaggcggagaggcagagggaggagcctcggggggaaggagagggaggggaccgtcaggaagccgcgaacgccgccgagtgtctgcacacctcgctctgcctgccatggctggttaaagaaccatccggatcgcagcgcggggggagggccgggtggggggagcagcggccgcgcgtgaggccgagggaggggcggcggcgcgagcggcggcggcggcggttccagcatgaagaggagagctggcctggggggcagcatgaggtcagtggtgggcttcttgtcccagcggggcttgcatggggaccccctgctcactcaggactttcagaggagacgcctgcggggctgcagaaacctctacaagaaggacctcctcggccacttcggctgtgtcaatgccattgaattctccaacaatggaggccagtggctggtctcaggaggagatgaccgccgggttctgctatggcacatggaacaagccatccactccagggtcaagcccatacagctgaaaggagagcaccattccaacattttttgcctggctttcaacagtgggaacactaaagtgttctctggaggcaatgatgagcaagttatcctccatgatgttgaaagcagtgagacattggacgtgtttgctcatgaagatgcagtatatggcttgtctgtgagcccagtgaatgacaacatttttgccagttcctcagatgatggccgggttctcatttgggacattcgggaatccccccatggagagcccttctgcctggcaaactatccatcagcctttcatagtgtcatgtttaaccctgtggagcccaggttgttggccacagccaattcaaaggaaggagtgggactctgggacattcgaaaacctcagagttctctcctgcgctatggtggaaacctgtccctccaaagtgccatgagtgtacgattcaacagcaacgggacccagctcctggccctgaggcgacgcctgccccctgtgctctatgacatccattcccgcctgcctgtgtttcagtttgacaatcagggttacttcaactcatgcaccatgaaaagctgctgttttgcaggagatcgtgaccagtatatcctttcgggctctgatgacttcaacctgtacatgtggagaattcctgcagatccagaagcaggtggcattggtagggtggtcaacggagccttcatggtgctgaaagggcatcgatctattgttaaccaagtccgatttaatccccacacctacatgatctgctcttctggtgtagaaaagattatcaagatctggagcccatacaagcagccaggatgtactggagacctcgacggtcggattgaggacgattcccgctgcctctatacccatgaagagtacatcagccttgtgctgaacagtgggagtggcctgtcgcatgactacgccaaccagtcggtccaggaagacccccggatgatggccttctttgactcactggtacgccgagagatcgagggctggagctctgactcagacagtgacctcagtgagagtactatcctccaactgcacgctggggtcagcgagcgctcaggctacactgactcagagtcttcggcctcattgcctcgctccccgcctcccacagtagatgagtctgccgacaacgccttccacctggggcccctgcgggtcaccaccacaaacacagtagcctcaactccaccaacacccacgtgtgaggatgcagcctctcgccagcagcgtctgtctgctctgcggcgctaccaagacaaacgcctcctggccctttccaatgagtccgattctgaggagaatgtctgtgaggtggaactagacacagatctctttccccggccacggtcacccagccccgaagatgaatccagcagttccagcagctctagcagctctgaggatgaggaggagctgaatgaacgccgagcctctacctggcagcggaatgccatgcggcgccgacagaagacaacccgagaagacaagcccagtgccccaatcaagcccaccaacacttacattggagaagacaactatgattacccccagatcaaagtggatgacctctcctcctccccaacctcgtcccctgagcggagcacttccacgctagagattcaaccaagccgggcatcaccaacttctgacatagaatcagttgagcgaaaaatttataaagcttacaagtggctccgctactcttatatctcctactcaaataacaaagatggagagacctccttggtgaccggggaggcagatgaagggagagcaggaaccagccacaaagacaacccagccccttcttccagtaaggaagcctgtctaaacatagcaatggcccagaggaaccaggacctgccacctgaaggctgcagcaaggacacttttaaagaagagactcctagaactcccagcaatggcccaggccatgagcacagcagccatgcttgggcagaggtgccagagggtacctctcaggacactggcaatagcggctctgtagagcacccttttgaaaccaagaagctcaatggaaaggccctgagcagtcgggctgaggagccgccttctcctcctgtccccaaggcatctggctccactctcaacagcgggtctggcaactgtcccaggacccagtctgatgacagtgaggagaggagcctcgaaaccatctgtgccaaccacaacaatggacgcttacaccctcgtccccctcaccctcacaataacgggcagaacttgggggagctggaggtggtggcctactcttccccaggacactcagacactgaccgtgataactcgtccctgacagggacactcctacacaaagattgttgcgggtctgaaatggcctgtgagacccccaatgctggaacaagagaggaccccactgacaccccagccacagatagtagcagggctgttcatggccacagtggcctcaaaaggcaacgaattgaattggaagatacagattcagagaattcctcctcagagaagaaattaaaaacatgataaatacaaagggaaaacaaaaagctacaaaagtagccttacaaaaaaaaaaaattgtttagtgaatacagaggaaaggaaaaacaagtattaaaggcacatgaaaccagggcctgaaattttgtgtctgatgctgctcccttctatccaacattcaacaacgggtctgaatgtctagctggccattggcttgtgctgtgttaagaaaggggaaaaaaaaataacccaagtgactcctttctagtgagacgtgagcgtagtgtgccgcgcaaggctctgtggaagtaaatctttgttgagacgttcgacttgttcttgtgtacgcacaatggcacgtgtgcgcttattgtctcataagaccttccttttagttctccatcagaaaggacctatgaatttgtactttttgccatctcaccctgtttacatgccataggtgttctggtctggatgatgggtgcctgttaaatcaggttgtgctgccagtgagttgtagatttatgctggaagaatggagaatggaaacaggccttcagcccattggctgcgctggagaggaaagcatggttcctttcttaaagaaatcttccatgttttctctaagtaacacttctttattgagcatttaatgtggacatactataaaaaagaatttttaatgctaatgagaggtttagcacttaagatcagattcaagagaatatagattcctgataaatttcactgtttgcaaattgagcagtgctgcaacatgtactgtatgaaggccataaaatagagctagtcatggataacagactttaaccagttaggtgctagatcctaagaggcactcacaaggccagcaggtgcttccttggctcccatgatcgatcgaggcatagtgaaagaagggcaaagacagctttccagagctttgtgctcaggctactaaagtagttgttataggtgtgttaacgaagaagcttagtgaggagcagaatgtggtactatattcatttaactcaacccagaaccattggtcagaattggtgggactggcatcttccctcagacttgcagttgatagaggctgtggtgttctcactagactttgcagagcagtaggcatctcaaggtaacagattcttattgagtaggtctattaggagtcagaaggtgttggggaggagtctctggcttatgactcctggttcccattagtcttaagtcttctggttcccataaaagactcagttttattgaggtagatacaggtttagaagagaaaagagcaacagattttcagcgttgcagtcactcggttatctatgaagggttgtgcaaaacaggaaggtctgggaatgaccagatatcttgttggcataaatgttatgaaaaggcagaatactggcaagaaatgaggaagagagagaaaaacaatataactttcttgagtgcaaaggtgctagacaactaggagcccagctgggattggtgtagggagggccgaacgctgactagtgtggcctcactgccccaggcttcctttcagaggaaggcctgtcctgctggaactggagccaaggggaggctgcctatgaaggcagaagatgtggatgaattcaggcactgggggtgggggggttatttataaacacaaggtggttggtttaagccaaaaggagataccatcctgataagctctgtgaaagagaagatgtgcctggtgtgtgtaatgcggctggggtatgaaaacactgagaaggagatgaaggagtgtgtgtagcatgggggtgtgtacaacttaacacctggacttttactgggggagtgggaaagtgattctgtaaccaacattagaattactttggatttgtaatcagattggttctatgatttgtctttgactattcacagataattgtaaatgctggttttataagcccaagtcattttacatttgcttttccaaaatgtattaaattggaattttttaatcctttatataca

SEQ ID NO: 326353 - DNA, 4886 bp, Homo sapiens
acctcagttttcatacataacccacatgatccagtctggtaaagaacttatttttaagttggttagcaagtcctagttaaattacagggagagtctggggaagttctgccttggtgttctttatcaccaccagtgaaagaatactttccagttactccttgttgcttttgtttttcattttctgttcagatctggagcccatacaagcagccaggatgtactggagacctcgacggtcggattgaggacgattcccgctgcctctatacccatgaagagtacatcagccttgtgctgaacagtgggagtggcctgtcgcatgactacgccaaccagtcggtccaggaagacccccggatgatggccttctttgactcactggtacgccgagagatcgagggctggagctctgactcagacagtgacctcagtgagagtactatcctccaactgcacgctggggtcagcgagcgctcaggctacactgactcagagtcttcggcctcattgcctcgctccccgcctcccacagtagatgagtctgccgacaacgccttccacctggggcccctgcgggtcaccaccacaaacacagtagcctcaactccaccaacacccacgtgtgaggatgcagcctctcgccagcagcgtctgtctgctctgcggcgctaccaagacaaacgcctcctggccctttccaatgagtccgattctgaggagaatgtctgtgaggtggaactagacacagatctctttccccggccacggtcacccagccccgaagatgaatccagcagttccagcagctctagcagctctgaggatgaggaggagctgaatgaacgccgagcctctacctggcagcggaatgccatgcggcgccgacagaagacaacccgagaagacaagcccagtgccccaatcaagcccaccaacacttacattggagaagacaactatgattacccccagatcaaagtggatgacctctcctcctccccaacctcgtcccctgagcggagcacttccacgctagagattcaaccaagccgggcatcaccaacttctgacatagaatcagttgagcgaaaaatttataaagcttacaagtggctccgctactcttatatctcctactcaaataacaaagatggagagacctccttggtgaccggggaggcagatgaagggagagcaggaaccagccacaaagacaacccagccccttcttccagtaaggaagcctgtctaaacatagcaatggcccagaggaaccaggacctgccacctgaaggctgcagcaaggacacttttaaagaagagactcctagaactcccagcaatggcccaggccatgagcacagcagccatgcttgggcagaggtgccagagggtacctctcaggacactggcaatagcggctctgtagagcacccttttgaaaccaagaagctcaatggaaaggccctgagcagtcgggctgaggagccgccttctcctcctgtccccaaggcatctggctccactctcaacagcgggtctggcaactgtcccaggacccagtctgatgacagtgaggagaggagcctcgaaaccatctgtgccaaccacaacaatggacgcttacaccctcgtccccctcaccctcacaataacgggcagaacttgggggagctggaggtggtggcctactcttccccaggacactcagacactgaccgtgataactcgtccctgacagggacactcctacacaaagattgttgcgggtctgaaatggcctgtgagacccccaatgctggaacaagagaggaccccactgacaccccagccacagatagtagcagggctgttcatggccacagtggcctcaaaaggcaacgaattgaattggaagatacagattcagagaattcctcctcagagaagaaattaaaaacatgataaatacaaagggaaaacaaaaagctacaaaagtagccttacaaaaaaaaaaaattgtttagtgaatacagaggaaaggaaaaacaagtattaaaggcacatgaaaccagggcctgaaattttgtgtctgatgctgctcccttctatccaacattcaacaacgggtctgaatgtctagctggccattggcttgtgctgtgttaagaaaggggaaaaaaaaataacccaagtgactcctttctagtgagacgtgagcgtagtgtgccgcgcaaggctctgtggaagtaaatctttgttgagacgttcgacttgttcttgtgtacgcacaatggcacgtgtgcgcttattgtctcataagaccttccttttagttctccatcagaaaggacctatgaatttgtactttttgccatctcaccctgtttacatgccataggtgttctggtctggatgatgggtgcctgttaaatcaggttgtgctgccagtgagttgtagatttatgctggaagaatggagaatggaaacaggccttcagcccattggctgcgctggagaggaaagcatggttcctttcttaaagaaatcttccatgttttctctaagtaacacttctttattgagcatttaatgtggacatactataaaaaagaatttttaatgctaatgagaggtttagcacttaagatcagattcaagagaatatagattcctgataaatttcactgtttgcaaattgagcagtgctgcaacatgtactgtatgaaggccataaaatagagctagtcatggataacagactttaaccagttaggtgctagatcctaagaggcactcacaaggccagcaggtgcttccttggctcccatgatcgatcgaggcatagtgaaagaagggcaaagacagctttccagagctttgtgctcaggctactaaagtagttgttataggtgtgttaacgaagaagcttagtgaggagcagaatgtggtactatattcatttaactcaacccagaaccattggtcagaattggtgggactggcatcttccctcagacttgcagttgatagaggctgtggtgttctcactagactttgcagagcagtaggcatctcaaggtaacagattcttattgagtaggtctattaggagtcagaaggtgttggggaggagtctctggcttatgactcctggttcccattagtcttaagtcttctggttcccataaaagactcagttttattgaggtagatacaggtttagaagagaaaagagcaacagattttcagcgttgcagtcactcggttatctatgaagggttgtgcaaaacaggaaggtctgggaatgaccagatatcttgttggcataaatgttatgaaaaggcagaatactggcaagaaatgaggaagagagagaaaaacaatataactttcttgagtgcaaaggtgctagacaactaggagcccagctgggattggtgtagggagggccgaacgctgactagtgtggcctcactgccccaggcttcctttcagaggaaggcctgtcctgctggaactggagccaaggggaggctgcctatgaaggcagaagatgtggatgaattcaggcactgggggtgggggggttatttataaacacaaggtggttggtttaagccaaaaggagataccatcctgataagctctgtgaaagagaagatgtgcctggtgtgtgtaatgcggctggggtatgaaaacactgagaaggagatgaaggagtgtgtgtagcatgggggtgtgtacaacttaacacctggacttttactgggggagtgggaaagtgattctgtaaccaacattagaattactttggatttgtaatcagattggttctatgatttgtctttgactattcacagataattgtaaatgctggttttataagcccaagtcattttacatttgcttttccaaaatgtattaaattggaattttttaatcctttatatacaaaaaaaatacgatcactcagtgtgtgtttctcttccccttcttagtcagcacacccagtcctttattttattctattctatttattttattttaataagtacttagcctcttctgacttctcaaaggacaatcggatacatatcttcctgaaaagaagtagttaaagttcccttgggaactagctacttggtagttacaattcccaaatgcagaacttggtcttttcatgttaaaagccttaatctcatttgggtactcaaaagagaaatcagagtttattctggttaacttgagaagccaagaaagatcatttttagcaagtatgccttccatccttggcagaggcttcccagcatcctaggctcagcttaccgggtgataggccccataagacacacacatgagcagggtgagaaatgcttgctttatagctgctccaccctcatctccagagattttgtgtctatggttgtgggtctggaaacctggcaggaaccacttctagagtacctttgcctaaactcttttagaattgaggccccaactttgatggcacatttaatacccaatttcttccataatagatatttttaatagcaggacagatggcactgattagatcaagaactatttggaagtgcctcttatgtttttttcctgcattctgtacataaagttttaagtggcaggtccagatatgtaaaatcatttctctctattttccagctggttttgttaatgattctctaggacagcaggtaaatgagttaagttgttggcttggggcaagtgaagtttgtgactatgcttgatttaataagctgagagtctcttgtttgtctgtcaaggtgccttcctctgctgaagccttacctccttctcacccagtaacggttaactcttctcttgtgtatatgcaaataaacctattattcacttaaaaaaaatt

SEQ ID NO: 326354 - DNA, 4657 bp, Homo sapiens
aggggtctccgcccggcgccacccaggtccccaggcgggaagcggctcaactgggaaagcagccggcgcccgtggtctccgggccggccgcccgcgttcttccggccagccccccgcggaggggaggggcgccgacgccgcgttctcggggccccgcagccggcggaagggccgcgcatcgcggaagcgcggcggcagctgaggatcagctgctggaggaggcggagaggcagagggaggagcctcggggggaaggagagggaggggaccgtcaggaagccgcgaacgccgccgagtgtctgcacacctcgctctgcctgccatggctggttaaagaaccatccggatcgcagcgcggggggagggccgggtggggggagcagcggccgcgcgtgaggccgagggaggggcggcggcgcgagcggcggcggcggcggttccagcatgaagaggagagctggcctggggggcagcatgaggtcagtggtgggcttcttgtcccagcggggcttgcatggggaccccctgctcactcaggactttcagaggagacgcctgcggggctgcagaaacctctacaagaaggacctcctcggccacttcggctgtgtcaatgccattgaattctccaacaatggaggccagtggctggtctcaggaggagatgaccgccgggttctgctatggcacatggaacaagccatccactccagggtcaagcccatacagctgaaaggagagcaccattccaacattttttgcctggctttcaacagtgggaacactaaagtgttctctggaggcaatgatgagcaagttatcctccatgatgttgaaagcagtgagacattggacgtgtttgctcatgaagatgcagtatatggcttgtctgtgagcccagtgaatgacaacatttttgccagttcctcagatgatggccgggttctcatttgggacattcgggaatccccccatggagagcccttctgcctggcaaactatccatcagcctttcatagtgtcatgtttaaccctgtggagcccaggttgttggccacagccaattcaaaggaaggagtgggactctgggacattcgaaaacctcagagttctctcctgcgctatggtggaaacctgtccctccaaagtgccatgagtgtacgattcaacagcaacgggacccagctcctggccctgaggcgacgcctgccccctgtgctctatgacatccattcccgcctgcctgtgtttcagtttgacaatcagggttacttcaactcatgcaccatgaaaagctgctgttttgcaggagatcgtgaccagtatatcctttcgggctctgatgacttcaacctgtacatgtggagaattcctgcagatccagaagcaggtggcattggtagggtggtcaacggagccttcatggtgctgaaagggcatcgatctattgttaaccaagtccgatttaatccccacacctacatgatctgctcttctggtgtagaaaagattatcaagatctggagcccatacaagcagccaggatgtactggagacctcgacggtcggattgaggacgattcccgctgcctctatacccatgaagagtacatcagccttgtgctgaacagtgggagtggcctgtcgcatgactacgccaaccagtcggtccaggaagacccccggatgatggccttctttgactcactggtacgccgagagatcgagggctggagctctgactcagacagtgacctcagtgagagtactatcctccaactgcacgctggggtcagcgagcgctcaggctacactgactcagagtcttcggcctcattgcctcgctccccgctcccttctatccaacattcaacaacgggtctgaatgtctagctggccattggcttgtgctgtgttaagaaaggggaaaaaaaaataacccaagtgactcctttctagtgagacgtgagcgtagtgtgccgcgcaaggctctgtggaagtaaatctttgttgagacgttcgacttgttcttgtgtacgcacaatggcacgtgtgcgcttattgtctcataagaccttccttttagttctccatcagaaaggacctatgaatttgtactttttgccatctcaccctgtttacatgccataggtgttctggtctggatgatgggtgcctgttaaatcaggttgtgctgccagtgagttgtagatttatgctggaagaatggagaatggaaacaggccttcagcccattggctgcgctggagaggaaagcatggttcctttcttaaagaaatcttccatgttttctctaagtaacacttctttattgagcatttaatgtggacatactataaaaaagaatttttaatgctaatgagaggtttagcacttaagatcagattcaagagaatatagattcctgataaatttcactgtttgcaaattgagcagtgctgcaacatgtactgtatgaaggccataaaatagagctagtcatggataacagactttaaccagttaggtgctagatcctaagaggcactcacaaggccagcaggtgcttccttggctcccatgatcgatcgaggcatagtgaaagaagggcaaagacagctttccagagctttgtgctcaggctactaaagtagttgttataggtgtgttaacgaagaagcttagtgaggagcagaatgtggtactatattcatttaactcaacccagaaccattggtcagaattggtgggactggcatcttccctcagacttgcagttgatagaggctgtggtgttctcactagactttgcagagcagtaggcatctcaaggtaacagattcttattgagtaggtctattaggagtcagaaggtgttggggaggagtctctggcttatgactcctggttcccattagtcttaagtcttctggttcccataaaagactcagttttattgaggtagatacaggtttagaagagaaaagagcaacagattttcagcgttgcagtcactcggttatctatgaagggttgtgcaaaacaggaaggtctgggaatgaccagatatcttgttggcataaatgttatgaaaaggcagaatactggcaagaaatgaggaagagagagaaaaacaatataactttcttgagtgcaaaggtgctagacaactaggagcccagctgggattggtgtagggagggccgaacgctgactagtgtggcctcactgccccaggcttcctttcagaggaaggcctgtcctgctggaactggagccaaggggaggctgcctatgaaggcagaagatgtggatgaattcaggcactgggggtgggggggttatttataaacacaaggtggttggtttaagccaaaaggagataccatcctgataagctctgtgaaagagaagatgtgcctggtgtgtgtaatgcggctggggtatgaaaacactgagaaggagatgaaggagtgtgtgtagcatgggggtgtgtacaacttaacacctggacttttactgggggagtgggaaagtgattctgtaaccaacattagaattactttggatttgtaatcagattggttctatgatttgtctttgactattcacagataattgtaaatgctggttttataagcccaagtcattttacatttgcttttccaaaatgtattaaattggaattttttaatcctttatatacaaaaaaaatacgatcactcagtgtgtgtttctcttccccttcttagtcagcacacccagtcctttattttattctattctatttattttattttaataagtacttagcctcttctgacttctcaaaggacaatcggatacatatcttcctgaaaagaagtagttaaagttcccttgggaactagctacttggtagttacaattcccaaatgcagaacttggtcttttcatgttaaaagccttaatctcatttgggtactcaaaagagaaatcagagtttattctggttaacttgagaagccaagaaagatcatttttagcaagtatgccttccatccttggcagaggcttcccagcatcctaggctcagcttaccgggtgataggccccataagacacacacatgagcagggtgagaaatgcttgctttatagctgctccaccctcatctccagagattttgtgtctatggttgtgggtctggaaacctggcaggaaccacttctagagtacctttgcctaaactcttttagaattgaggccccaactttgatggcacatttaatacccaatttcttccataatagatatttttaatagcaggacagatggcactgattagatcaagaactatttggaagtgcctcttatgtttttttcctgcattctgtacataaagttttaagtggcaggtccagatatgtaaaatcatttctctctattttccagctggttttgttaatgattctctaggacagcaggtaaatgagttaagttgttggcttggggcaagtgaagtttgtgactatgcttgatttaataagctgagagtctcttgtttgtctgtcaaggtgccttcctctgctgaagccttacctccttctcacccagtaacggttaactcttctcttgtgtatatgcaaataaacctattattcacttaaaaaaaatt

SEQ ID NO: 326355 - DNA, 2954 bp, Homo sapiens
gtgagacgtgagcgtagtgtgccgcgcaaggctctgtggaagtaaatctttgttgagacgttcgacttgtttttcctttcctctgtattcactaaacaagtattaaaggcacatgaaaccagggcctgaaattttgtgtctgatgctgctcccttctatccaacattcaacaacgggtctgaatgtctagctggccattggcttgtgctgtgttaagaaaggggaaaaaaaaataacccaagtgactcctttctagtgagacgtgagcgtagtgtgccgcgcaaggctctgtggaagtaaatctttgttgagacgttcgacttgttcttgtgtacgcacaatggcacgtgtgcgcttattgtctcataagaccttccttttagttctccatcagaaaggacctatgaatttgtactttttgccatctcaccctgtttacatgccataggtgttctggtctggatgatgggtgcctgttaaatcaggttgtgctgccagtgagttgtagatttatgctggaagaatggagaatggaaacaggccttcagcccattggctgcgctggagaggaaagcatggttcctttcttaaagaaatcttccatgttttctctaagtaacacttctttattgagcatttaatgtggacatactataaaaaagaatttttaatgctaatgagaggtttagcacttaagatcagattcaagagaatatagattcctgataaatttcactgtttgcaaattgagcagtgctgcaacatgtactgtatgaaggccataaaatagagctagtcatggataacagactttaaccagttaggtgctagatcctaagaggcactcacaaggccagcaggtgcttccttggctcccatgatcgatcgaggcatagtgaaagaagggcaaagacagctttccagagctttgtgctcaggctactaaagtagttgttataggtgtgttaacgaagaagcttagtgaggagcagaatgtggtactatattcatttaactcaacccagaaccattggtcagaattggtgggactggcatcttccctcagacttgcagttgatagaggctgtggtgttctcactagactttgcagagcagtaggcatctcaaggtaacagattcttattgagtaggtctattaggagtcagaaggtgttggggaggagtctctggcttatgactcctggttcccattagtcttaagtcttctggttcccataaaagactcagttttattgaggtagatacaggtttagaagagaaaagagcaacagattttcagcgttgcagtcactcggttatctatgaagggttgtgcaaaacaggaaggtctgggaatgaccagatatcttgttggcataaatgttatgaaaaggcagaatactggcaagaaatgaggaagagagagaaaaacaatataactttcttgagtgcaaaggtgctagacaactaggagcccagctgggattggtgtagggagggccgaacgctgactagtgtggcctcactgccccaggcttcctttcagaggaaggcctgtcctgctggaactggagccaaggggaggctgcctatgaaggcagaagatgtggatgaattcaggcactgggggtgggggggttatttataaacacaaggtggttggtttaagccaaaaggagataccatcctgataagctctgtgaaagagaagatgtgcctggtgtgtgtaatgcggctggggtatgaaaacactgagaaggagatgaaggagtgtgtgtagcatgggggtgtgtacaacttaacacctggacttttactgggggagtgggaaagtgattctgtaaccaacattagaattactttggatttgtaatcagattggttctatgatttgtctttgactattcacagataattgtaaatgctggttttataagcccaagtcattttacatttgcttttccaaaatgtattaaattggaattttttaatcctttatatacaaaaaaaatacgatcactcagtgtgtgtttctcttccccttcttagtcagcacacccagtcctttattttattctattctatttattttattttaataagtacttagcctcttctgacttctcaaaggacaatcggatacatatcttcctgaaaagaagtagttaaagttcccttgggaactagctacttggtagttacaattcccaaatgcagaacttggtcttttcatgttaaaagccttaatctcatttgggtactcaaaagagaaatcagagtttattctggttaacttgagaagccaagaaagatcatttttagcaagtatgccttccatccttggcagaggcttcccagcatcctaggctcagcttaccgggtgataggccccataagacacacacatgagcagggtgagaaatgcttgctttatagctgctccaccctcatctccagagattttgtgtctatggttgtgggtctggaaacctggcaggaaccacttctagagtacctttgcctaaactcttttagaattgaggccccaactttgatggcacatttaatacccaatttcttccataatagatatttttaatagcaggacagatggcactgattagatcaagaactatttggaagtgcctcttatgtttttttcctgcattctgtacataaagttttaagtggcaggtccagatatgtaaaatcatttctctctattttccagctggttttgttaatgattctctaggacagcaggtaaatgagttaagttgttggcttggggcaagtgaagtttgtgactatgcttgatttaataagctgagagtctcttgtttgtctgtcaaggtgccttcctctgctgaagccttacctccttctcacccagtaacggttaactcttctcttgtgtatatgcaaataaacctattattcacttaaaaaaaatt

SEQ ID NO: 326356 - DNA, 1737 bp, Homo sapiens
aggggtctccgcccggcgccacccaggtccccaggcgggaagcggctcaactgggaaagcagccggcgcccgtggtctccgggccggccgcccgcgttcttccggccagccccccgcggaggggaggggcgccgacgccgcgttctcggggccccgcagccggcggaagggccgcgcatcgcggaagcgcggcggcagctgaggatcagctgctggaggaggcggagaggcagagggaggagcctcggggggaaggagagggaggggaccgtcaggaagccgcgaacgccgccgagtgtctgcacacctcgctctgcctgccatggctggttaaagaaccatccggatcgcagcgcggggggagggccgggtggggggagcagcggccgcgcgtgaggccgagggaggggcggcggcgcgagcggcggcggcggcggttccagcatgaagaggagagctggcctggggggcagcatgaggtcagtggtgggcttcttgtcccagcggggcttgcatggggaccccctgctcactcaggactttcagaggagacgcctgcggggctgcagaaacctctacaagaaggacctcctcggccacttcggctgtgtcaatgccattgaattctccaacaatggaggccagtggctggtctcaggaggagatgaccgccgggttctgctatggcacatggaacaagccatccactccagggtcaagcccatacagctgaaaggagagcaccattccaacattttttgcctggctttcaacagtgggaacactaaagtgttctctggaggcaatgatgagcaagttatcctccatgatgttgaaagcagtgagacattggacgtgtttgctcatgaagatgcagtatatggcttgtctgtgagcccagtgaatgacaacatttttgccagttcctcagatgatggccgggttctcatttgggacattcgggaatccccccatggagagcccttctgcctggcaaactatccatcagcctttcatagtgtcatgtttaaccctgtggagcccaggttgttggccacagccaattcaaaggaaggagtgggactctgggacattcgaaaacctcagagttctctcctgcgctatggtggaaacctgtccctccaaagtgccatgagtgtacgattcaacagcaacgggacccagctcctggccctgaggcgacgcctgccccctgtgctctatgacatccattcccgcctgcctgtgtttcagtttgacaatcagggttacttcaactcatgcaccatgaaaagctgctgttttgcaggagatcgtgaccagcatcacaactggaaatggagagcccaagctgtgagtttccagccttttctgagtctcaccaggaatggagatgctgatgttgacttaaagctggcagtttaagaatatacttggccttcttgcacctttctgtcttaaccatagaagttctgaagtgtcagtgaccagttgggctaatctgggtcaccaagccgaggaaagacaaatgggaagaaagacaaatctaaggaaagactgatcaaataaacaaatagaattttttattctcaaagcacaacaaatcttattgctatttcacatatagattgggaaaaagaaaaaccttagtctctcgctaatgtttagtgttcttatctttgggtcaactatgtcaaattttgacttaaaattcttatatgctgtaccccacctctt

SEQ ID NO: 326357 - DNA, 6215 bp, Homo sapiens
aggggtctccgcccggcgccacccaggtccccaggcgggaagcggctcaactgggaaagcagccggcgcccgtggtctccgggccggccgcccgcgttcttccggccagccccccgcggaggggaggggcgccgacgccgcgttctcggggccccgcagccggcggaagggccgcgcatcgcggaagcgcggcggcagctgaggatcagctgctggaggaggcggagaggcagagggaggagcctcggggggaaggagagggaggggaccgtcaggaagccgcgaacgccgccgagtgtctgcacacctcgctctgcctgccatggctggttaaagaaccatccggatcgcagcgcggggggagggccgggtggggggagcagcggccgcgcgtgaggccgagggaggggcggcggcgcgagcggcggcggcggcggttccagcatgaagaggagagctggcctggggggcagcatgaggtcagtggtgggcttcttgtcccagcggggcttgcatggggaccccctgctcactcaggactttcagaggagacgcctgcggggctgcagaaacctctacaagaaggacctcctcggccacttcggctgtgtcaatgccattgaattctccaacaatggaggccagtggctggtctcaggaggagatgaccgccgggttctgctatggcacatggaacaagccatccactccagggtcaagcccatacagctgaaaggagagcaccattccaacattttttgcctggctttcaacagtgggaacactaaagtgttctctggaggcaatgatgagcaagttatcctccatgatgttgaaagcagtgagacattggacgtgtttgctcatgaagatgcagtatatggcttgtctgtgagcccagtgaatgacaacatttttgccagttcctcagatgatggccgggttctcatttgggacattcgggaatccccccatggagagcccttctgcctggcaaactatccatcagcctttcatagtgtcatgtttaaccctgtggagcccaggttgttggccacagccaattcaaaggaaggagtgggactctgggacattcgaaaacctcagagttctctcctgcgctatggtggaaacctgtccctccaaagtgccatgagtgtacgattcaacagcaacgggacccagctcctggccctgaggcgacgcctgccccctgtgctctatgacatccattcccgcctgcctgtgtttcagtttgacaatcagggttacttcaactcatgcaccatgaaaagctgctgttttgcaggagatcgtgaccagtatatcctttcgggctctgatgacttcaacctgtacatgtggagaattcctgcagatccagaagcaggtggcattggtagggtggtcaacggagccttcatggtgctgaaagggcatcgatctattgttaaccaagtccgatttaatccccacacctacatgatctgctcttctggtgtagaaaagattatcaagatctggagcccatacaagcagccaggatgtactggagacctcgacggtcggattgaggacgattcccgctgcctctatacccatgaagagtacatcagccttgtgctgaacagtgggagtggcctgtcgcatgactacgccaaccagtcggtccaggaagacccccggatgatggccttctttgactcactggtacgccgagagatcgagggctggagctctgactcagacagtgacctcagtgagagtactatcctccaactgcacgctggggtcagcgagcgctcaggctacactgactcagagtcttcggcctcattgcctcgctccccgcctcccacagtagatgagtctgccgacaacgccttccacctggggcccctgcgggtcaccaccacaaacacagtagcctcaactccaccaacacccacgtgtgaggatgcagcctctcgccagcagcgtctgtctgctctgcggcgctaccaagacaaacgcctcctggccctttccaatgagtccgattctgaggagaatgtctgtgaggtggaactagacacagatctctttccccggccacggtcacccagccccgaagatgaatccagcagttccagcagctctagcagctctgaggatgaggaggagctgaatgaacgccgagcctctacctggcagcggaatgccatgcggcgccgacagaagacaacccgagaagacaagcccagtgccccaatcaagcccaccaacacttacattggagaagacaactatgattacccccagatcaaagtggatgacctctcctcctccccaacctcgtcccctgagcggagcacttccacgctagagattcaaccaagccgggcatcaccaacttctgacatagaatcagttgagcgaaaaatttataaagcttacaagtggctccgctactcttatatctcctactcaaataacaaagatggagagacctccttggtgaccggggaggcagatgaagggagagcaggaaccagccacaaagacaacccagccccttcttccagtaaggaagcctgtctaaacatagcaatggcccagaggaaccaggacctgccacctgaaggctgcagcaaggacacttttaaagaagagactcctagaactcccagcaatggcccaggccatgagcacagcagccatgcttgggcagaggtgccagagggtacctctcaggacactggcaatagcggctctgtagagcacccttttgaaaccaagaagctcaatggaaaggccctgagcagtcgggctgaggagccgccttctcctcctgtccccaaggcatctggctccactctcaacagcgggtctggcaactgtcccaggacccagtctgatgacagtgaggagaggagcctcgaaaccatctgtgccaaccacaacaatggacgcttacaccctcgtccccctcaccctcacaataacgggcagaacttgggggagctggaggtggtggcctactcttccccaggacactcagacactgaccgtgataactcgtccctgacagggacactcctacacaaagattgttgcgggtctgaaatggcctgtgagacccccaatgctggaacaagagaggaccccactgacaccccagccacagatagtagcagggctgttcatggccacagtggcctcaaaaggcaacgaattgaattggaagatacagattcagagaattcctcctcagagaagaaattaaaaacatgataaatacaaagggaaaacaaaaagctacaaaagtagccttacaaaaaaaaaaaattgtttagtgaatacagaggaaaggaaaaacaagtattaaaggcacatgaaaccagggcctgaaattttgtgtctgatgctgctcccttctatccaacattcaacaacgggtctgaatgtctagctggccattggcttgtgctgtgttaagaaaggggaaaaaaaaataacccaagtgactcctttctagtgagacgtgagcgtagtgtgccgcgcaaggctctgtggaagtaaatctttgttgagacgttcgacttgttcttgtgtacgcacaatggcacgtgtgcgcttattgtctcataagaccttccttttagttctccatcagaaaggacctatgaatttgtactttttgccatctcaccctgtttacatgccataggtgttctggtctggatgatgggtgcctgttaaatcaggttgtgctgccagtgagttgtagatttatgctggaagaatggagaatggaaacaggccttcagcccattggctgcgctggagaggaaagcatggttcctttcttaaagaaatcttccatgttttctctaagtaacacttctttattgagcatttaatgtggacatactataaaaaagaatttttaatgctaatgagaggtttagcacttaagatcagattcaagagaatatagattcctgataaatttcactgtttgcaaattgagcagtgctgcaacatgtactgtatgaaggccataaaatagagctagtcatggataacagactttaaccagttaggtgctagatcctaagaggcactcacaaggccagcaggtgcttccttggctcccatgatcgatcgaggcatagtgaaagaagggcaaagacagctttccagagctttgtgctcaggctactaaagtagttgttataggtgtgttaacgaagaagcttagtgaggagcagaatgtggtactatattcatttaactcaacccagaaccattggtcagaattggtgggactggcatcttccctcagacttgcagttgatagaggctgtggtgttctcactagactttgcagagcagtaggcatctcaaggtaacagattcttattgagtaggtctattaggagtcagaaggtgttggggaggagtctctggcttatgactcctggttcccattagtcttaagtcttctggttcccataaaagactcagttttattgaggtagatacaggtttagaagagaaaagagcaacagattttcagcgttgcagtcactcggttatctatgaagggttgtgcaaaacaggaaggtctgggaatgaccagatatcttgttggcataaatgttatgaaaaggcagaatactggcaagaaatgaggaagagagagaaaaacaatataactttcttgagtgcaaaggtgctagacaactaggagcccagctgggattggtgtagggagggccgaacgctgactagtgtggcctcactgccccaggcttcctttcagaggaaggcctgtcctgctggaactggagccaaggggaggctgcctatgaaggcagaagatgtggatgaattcaggcactgggggtgggggggttatttataaacacaaggtggttggtttaagccaaaaggagataccatcctgataagctctgtgaaagagaagatgtgcctggtgtgtgtaatgcggctggggtatgaaaacactgagaaggagatgaaggagtgtgtgtagcatgggggtgtgtacaacttaacacctggacttttactgggggagtgggaaagtgattctgtaaccaacattagaattactttggatttgtaatcagattggttctatgatttgtctttgactattcacagataattgtaaatgctggttttataagcccaagtcattttacatttgcttttccaaaatgtattaaattggaattttttaatcctttatatacaaaaaaaatacgatcactcagtgtgtgtttctcttccccttcttagtcagcacacccagtcctttattttattctattctatttattttattttaataagtacttagcctcttctgacttctcaaaggacaatcggatacatatcttcctgaaaagaagtagttaaagttcccttgggaactagctacttggtagttacaattcccaaatgcagaacttggtcttttcatgttaaaagccttaatctcatttgggtactcaaaagagaaatcagagtttattctggttaacttgagaagccaagaaagatcatttttagcaagtatgccttccatccttggcagaggcttcccagcatcctaggctcagcttaccgggtgataggccccataagacacacacatgagcagggtgagaaatgcttgctttatagctgctccaccctcatctccagagattttgtgtctatggttgtgggtctggaaacctggcaggaaccacttctagagtacctttgcctaaactcttttagaattgaggccccaactttgatggcacatttaatacccaatttcttccataatagatatttttaatagcaggacagatggcactgattagatcaagaactatttggaagtgcctcttatgtttttttcctgcattctgtacataaagttttaagtggcaggtccagatatgtaaaatcatttctctctattttccagctggttttgttaatgattctctaggacagcaggtaaatgagttaagttgttggcttggggcaagtgaagtttgtgactatgcttgatttaataagctgagagtctcttgtttgtctgtcaaggtgccttcctctgctgaagccttacctccttctcacccagtaacggttaactcttctcttgtgtatatgcaaataaacctattattcacttaaaaaaaatt

SEQ ID NO: 326358 - DNA, 6036 bp, Homo sapiens
aggggtctccgcccggcgccacccaggtccccaggcgggaagcggctcaactgggaaagcagccggcgcccgtggtctccgggccggccgcccgcgttcttccggccagccccccgcggaggggaggggcgccgacgccgcgttctcggggccccgcagccggcggaagggccgcgcatcgcggaagcgcggcggcagctgaggatcagctgctggaggaggcggagaggcagagggaggagcctcggggggaaggagagggaggggaccgtcaggaagccgcgaacgccgccgagtgtctgcacacctcgctctgcctgccatggctggttaaagaaccatccggatcgcagcgcggggggagggccgggtggggggagcagcggccgcgcgtgaggccgagggaggggcggcggcgcgagcggcggcggcggcggttccagcatgaagaggagagctggcctggggggcagcatgaggaggagatgaccgccgggttctgctatggcacatggaacaagccatccactccagggtcaagcccatacagctgaaaggagagcaccattccaacattttttgcctggctttcaacagtgggaacactaaagtgttctctggaggcaatgatgagcaagttatcctccatgatgttgaaagcagtgagacattggacgtgtttgctcatgaagatgcagtatatggcttgtctgtgagcccagtgaatgacaacatttttgccagttcctcagatgatggccgggttctcatttgggacattcgggaatccccccatggagagcccttctgcctggcaaactatccatcagcctttcatagtgtcatgtttaaccctgtggagcccaggttgttggccacagccaattcaaaggaaggagtgggactctgggacattcgaaaacctcagagttctctcctgcgctatggtggaaacctgtccctccaaagtgccatgagtgtacgattcaacagcaacgggacccagctcctggccctgaggcgacgcctgccccctgtgctctatgacatccattcccgcctgcctgtgtttcagtttgacaatcagggttacttcaactcatgcaccatgaaaagctgctgttttgcaggagatcgtgaccagtatatcctttcgggctctgatgacttcaacctgtacatgtggagaattcctgcagatccagaagcaggtggcattggtagggtggtcaacggagccttcatggtgctgaaagggcatcgatctattgttaaccaagtccgatttaatccccacacctacatgatctgctcttctggtgtagaaaagattatcaagatctggagcccatacaagcagccaggatgtactggagacctcgacggtcggattgaggacgattcccgctgcctctatacccatgaagagtacatcagccttgtgctgaacagtgggagtggcctgtcgcatgactacgccaaccagtcggtccaggaagacccccggatgatggccttctttgactcactggtacgccgagagatcgagggctggagctctgactcagacagtgacctcagtgagagtactatcctccaactgcacgctggggtcagcgagcgctcaggctacactgactcagagtcttcggcctcattgcctcgctccccgcctcccacagtagatgagtctgccgacaacgccttccacctggggcccctgcgggtcaccaccacaaacacagtagcctcaactccaccaacacccacgtgtgaggatgcagcctctcgccagcagcgtctgtctgctctgcggcgctaccaagacaaacgcctcctggccctttccaatgagtccgattctgaggagaatgtctgtgaggtggaactagacacagatctctttccccggccacggtcacccagccccgaagatgaatccagcagttccagcagctctagcagctctgaggatgaggaggagctgaatgaacgccgagcctctacctggcagcggaatgccatgcggcgccgacagaagacaacccgagaagacaagcccagtgccccaatcaagcccaccaacacttacattggagaagacaactatgattacccccagatcaaagtggatgacctctcctcctccccaacctcgtcccctgagcggagcacttccacgctagagattcaaccaagccgggcatcaccaacttctgacatagaatcagttgagcgaaaaatttataaagcttacaagtggctccgctactcttatatctcctactcaaataacaaagatggagagacctccttggtgaccggggaggcagatgaagggagagcaggaaccagccacaaagacaacccagccccttcttccagtaaggaagcctgtctaaacatagcaatggcccagaggaaccaggacctgccacctgaaggctgcagcaaggacacttttaaagaagagactcctagaactcccagcaatggcccaggccatgagcacagcagccatgcttgggcagaggtgccagagggtacctctcaggacactggcaatagcggctctgtagagcacccttttgaaaccaagaagctcaatggaaaggccctgagcagtcgggctgaggagccgccttctcctcctgtccccaaggcatctggctccactctcaacagcgggtctggcaactgtcccaggacccagtctgatgacagtgaggagaggagcctcgaaaccatctgtgccaaccacaacaatggacgcttacaccctcgtccccctcaccctcacaataacgggcagaacttgggggagctggaggtggtggcctactcttccccaggacactcagacactgaccgtgataactcgtccctgacagggacactcctacacaaagattgttgcgggtctgaaatggcctgtgagacccccaatgctggaacaagagaggaccccactgacaccccagccacagatagtagcagggctgttcatggccacagtggcctcaaaaggcaacgaattgaattggaagatacagattcagagaattcctcctcagagaagaaattaaaaacatgataaatacaaagggaaaacaaaaagctacaaaagtagccttacaaaaaaaaaaaattgtttagtgaatacagaggaaaggaaaaacaagtattaaaggcacatgaaaccagggcctgaaattttgtgtctgatgctgctcccttctatccaacattcaacaacgggtctgaatgtctagctggccattggcttgtgctgtgttaagaaaggggaaaaaaaaataacccaagtgactcctttctagtgagacgtgagcgtagtgtgccgcgcaaggctctgtggaagtaaatctttgttgagacgttcgacttgttcttgtgtacgcacaatggcacgtgtgcgcttattgtctcataagaccttccttttagttctccatcagaaaggacctatgaatttgtactttttgccatctcaccctgtttacatgccataggtgttctggtctggatgatgggtgcctgttaaatcaggttgtgctgccagtgagttgtagatttatgctggaagaatggagaatggaaacaggccttcagcccattggctgcgctggagaggaaagcatggttcctttcttaaagaaatcttccatgttttctctaagtaacacttctttattgagcatttaatgtggacatactataaaaaagaatttttaatgctaatgagaggtttagcacttaagatcagattcaagagaatatagattcctgataaatttcactgtttgcaaattgagcagtgctgcaacatgtactgtatgaaggccataaaatagagctagtcatggataacagactttaaccagttaggtgctagatcctaagaggcactcacaaggccagcaggtgcttccttggctcccatgatcgatcgaggcatagtgaaagaagggcaaagacagctttccagagctttgtgctcaggctactaaagtagttgttataggtgtgttaacgaagaagcttagtgaggagcagaatgtggtactatattcatttaactcaacccagaaccattggtcagaattggtgggactggcatcttccctcagacttgcagttgatagaggctgtggtgttctcactagactttgcagagcagtaggcatctcaaggtaacagattcttattgagtaggtctattaggagtcagaaggtgttggggaggagtctctggcttatgactcctggttcccattagtcttaagtcttctggttcccataaaagactcagttttattgaggtagatacaggtttagaagagaaaagagcaacagattttcagcgttgcagtcactcggttatctatgaagggttgtgcaaaacaggaaggtctgggaatgaccagatatcttgttggcataaatgttatgaaaaggcagaatactggcaagaaatgaggaagagagagaaaaacaatataactttcttgagtgcaaaggtgctagacaactaggagcccagctgggattggtgtagggagggccgaacgctgactagtgtggcctcactgccccaggcttcctttcagaggaaggcctgtcctgctggaactggagccaaggggaggctgcctatgaaggcagaagatgtggatgaattcaggcactgggggtgggggggttatttataaacacaaggtggttggtttaagccaaaaggagataccatcctgataagctctgtgaaagagaagatgtgcctggtgtgtgtaatgcggctggggtatgaaaacactgagaaggagatgaaggagtgtgtgtagcatgggggtgtgtacaacttaacacctggacttttactgggggagtgggaaagtgattctgtaaccaacattagaattactttggatttgtaatcagattggttctatgatttgtctttgactattcacagataattgtaaatgctggttttataagcccaagtcattttacatttgcttttccaaaatgtattaaattggaattttttaatcctttatatacaaaaaaaatacgatcactcagtgtgtgtttctcttccccttcttagtcagcacacccagtcctttattttattctattctatttattttattttaataagtacttagcctcttctgacttctcaaaggacaatcggatacatatcttcctgaaaagaagtagttaaagttcccttgggaactagctacttggtagttacaattcccaaatgcagaacttggtcttttcatgttaaaagccttaatctcatttgggtactcaaaagagaaatcagagtttattctggttaacttgagaagccaagaaagatcatttttagcaagtatgccttccatccttggcagaggcttcccagcatcctaggctcagcttaccgggtgataggccccataagacacacacatgagcagggtgagaaatgcttgctttatagctgctccaccctcatctccagagattttgtgtctatggttgtgggtctggaaacctggcaggaaccacttctagagtacctttgcctaaactcttttagaattgaggccccaactttgatggcacatttaatacccaatttcttccataatagatatttttaatagcaggacagatggcactgattagatcaagaactatttggaagtgcctcttatgtttttttcctgcattctgtacataaagttttaagtggcaggtccagatatgtaaaatcatttctctctattttccagctggttttgttaatgattctctaggacagcaggtaaatgagttaagttgttggcttggggcaagtgaagtttgtgactatgcttgatttaataagctgagagtctcttgtttgtctgtcaaggtgccttcctctgctgaagccttacctccttctcacccagtaacggttaactcttctcttgtgtatatgcaaataaacctattattcacttaaaaaaaatt

SEQ ID NO: 326359 - DNA, 6087 bp, Homo sapiens
aggggtctccgcccggcgccacccaggtccccaggcgggaagcggctcaactgggaaagcagccggcgcccgtggtctccgggccggccgcccgcgttcttccggccagccccccgcggaggggaggggcgccgacgccgcgttctcggggccccgcagccggcggaagggccgcgcatcgcggaagcgcggcggcagctgaggatcagctgctggaggaggcggagaggcagagggaggagcctcggggggaaggagagggaggggaccgtcaggaagccgcgaacgccgccgagtgtctgcacacctcgctctgcctgccatggctggttaaagaaccatccggatcgcagcgcggggggagggccgggtggggggagcagcggccgcgcgtgaggccgagggaggggcggcggcgcgagcggcggcggcggcggttccagcatgaagaggagagctggcctggggggcagcatgaggtcagtggtgggcttcttgtcccagcggggcttgcatggggaccccctgctcactcaggactttcagaggagacgcctgcggggctgcagaaacctctacaagaaggacctcctcggccacttcggctgtgtcaatgccattgaattctccaacaatggaggccagtggctggtctcaggaggagatgaccgccgggttctgctatggcacatggaacaagccatccactccagggtcaagcccatacagctgaaaggagagcaccattccaacattttttgcctggctttcaacagtgggaacactaaagtgttctctggaggcaatgatgagcaagttatcctccatgatgttgaaagcagtgagacattggacgtgtttgctcatgaagatgcagtatatggcttgtctgtgagcccagtgaatgacaacatttttgccagttcctcagatgatggccgggttctcatttgggacattcgggaatccccccatggagagcccttctgcctggcaaactatccatcagcctttcatagtgtcatgtttaaccctgtggagcccaggttgttggccacagccaattcaaaggaaggagtgggactctgggacattcgaaaacctcagagttctctcctgcgctatggtggaaacctgtccctccaaagtgccatgagtgtacgattcaacagcaacgggacccagctcctggccctgaggcgacgcctgccccctgtgctctatgacatccattcccgcctgcctgtgtttcagtttgacaatcagggttacttcaactcatgcaccatgaaaagctgctgttttgcaggagatcgtgaccagtatatcctttcgggctctgatgacttcaacctgtacatgtggagaattcctgcagatccagaagcagatctggagcccatacaagcagccaggatgtactggagacctcgacggtcggattgaggacgattcccgctgcctctatacccatgaagagtacatcagccttgtgctgaacagtgggagtggcctgtcgcatgactacgccaaccagtcggtccaggaagacccccggatgatggccttctttgactcactggtacgccgagagatcgagggctggagctctgactcagacagtgacctcagtgagagtactatcctccaactgcacgctggggtcagcgagcgctcaggctacactgactcagagtcttcggcctcattgcctcgctccccgcctcccacagtagatgagtctgccgacaacgccttccacctggggcccctgcgggtcaccaccacaaacacagtagcctcaactccaccaacacccacgtgtgaggatgcagcctctcgccagcagcgtctgtctgctctgcggcgctaccaagacaaacgcctcctggccctttccaatgagtccgattctgaggagaatgtctgtgaggtggaactagacacagatctctttccccggccacggtcacccagccccgaagatgaatccagcagttccagcagctctagcagctctgaggatgaggaggagctgaatgaacgccgagcctctacctggcagcggaatgccatgcggcgccgacagaagacaacccgagaagacaagcccagtgccccaatcaagcccaccaacacttacattggagaagacaactatgattacccccagatcaaagtggatgacctctcctcctccccaacctcgtcccctgagcggagcacttccacgctagagattcaaccaagccgggcatcaccaacttctgacatagaatcagttgagcgaaaaatttataaagcttacaagtggctccgctactcttatatctcctactcaaataacaaagatggagagacctccttggtgaccggggaggcagatgaagggagagcaggaaccagccacaaagacaacccagccccttcttccagtaaggaagcctgtctaaacatagcaatggcccagaggaaccaggacctgccacctgaaggctgcagcaaggacacttttaaagaagagactcctagaactcccagcaatggcccaggccatgagcacagcagccatgcttgggcagaggtgccagagggtacctctcaggacactggcaatagcggctctgtagagcacccttttgaaaccaagaagctcaatggaaaggccctgagcagtcgggctgaggagccgccttctcctcctgtccccaaggcatctggctccactctcaacagcgggtctggcaactgtcccaggacccagtctgatgacagtgaggagaggagcctcgaaaccatctgtgccaaccacaacaatggacgcttacaccctcgtccccctcaccctcacaataacgggcagaacttgggggagctggaggtggtggcctactcttccccaggacactcagacactgaccgtgataactcgtccctgacagggacactcctacacaaagattgttgcgggtctgaaatggcctgtgagacccccaatgctggaacaagagaggaccccactgacaccccagccacagatagtagcagggctgttcatggccacagtggcctcaaaaggcaacgaattgaattggaagatacagattcagagaattcctcctcagagaagaaattaaaaacatgataaatacaaagggaaaacaaaaagctacaaaagtagccttacaaaaaaaaaaaattgtttagtgaatacagaggaaaggaaaaacaagtattaaaggcacatgaaaccagggcctgaaattttgtgtctgatgctgctcccttctatccaacattcaacaacgggtctgaatgtctagctggccattggcttgtgctgtgttaagaaaggggaaaaaaaaataacccaagtgactcctttctagtgagacgtgagcgtagtgtgccgcgcaaggctctgtggaagtaaatctttgttgagacgttcgacttgttcttgtgtacgcacaatggcacgtgtgcgcttattgtctcataagaccttccttttagttctccatcagaaaggacctatgaatttgtactttttgccatctcaccctgtttacatgccataggtgttctggtctggatgatgggtgcctgttaaatcaggttgtgctgccagtgagttgtagatttatgctggaagaatggagaatggaaacaggccttcagcccattggctgcgctggagaggaaagcatggttcctttcttaaagaaatcttccatgttttctctaagtaacacttctttattgagcatttaatgtggacatactataaaaaagaatttttaatgctaatgagaggtttagcacttaagatcagattcaagagaatatagattcctgataaatttcactgtttgcaaattgagcagtgctgcaacatgtactgtatgaaggccataaaatagagctagtcatggataacagactttaaccagttaggtgctagatcctaagaggcactcacaaggccagcaggtgcttccttggctcccatgatcgatcgaggcatagtgaaagaagggcaaagacagctttccagagctttgtgctcaggctactaaagtagttgttataggtgtgttaacgaagaagcttagtgaggagcagaatgtggtactatattcatttaactcaacccagaaccattggtcagaattggtgggactggcatcttccctcagacttgcagttgatagaggctgtggtgttctcactagactttgcagagcagtaggcatctcaaggtaacagattcttattgagtaggtctattaggagtcagaaggtgttggggaggagtctctggcttatgactcctggttcccattagtcttaagtcttctggttcccataaaagactcagttttattgaggtagatacaggtttagaagagaaaagagcaacagattttcagcgttgcagtcactcggttatctatgaagggttgtgcaaaacaggaaggtctgggaatgaccagatatcttgttggcataaatgttatgaaaaggcagaatactggcaagaaatgaggaagagagagaaaaacaatataactttcttgagtgcaaaggtgctagacaactaggagcccagctgggattggtgtagggagggccgaacgctgactagtgtggcctcactgccccaggcttcctttcagaggaaggcctgtcctgctggaactggagccaaggggaggctgcctatgaaggcagaagatgtggatgaattcaggcactgggggtgggggggttatttataaacacaaggtggttggtttaagccaaaaggagataccatcctgataagctctgtgaaagagaagatgtgcctggtgtgtgtaatgcggctggggtatgaaaacactgagaaggagatgaaggagtgtgtgtagcatgggggtgtgtacaacttaacacctggacttttactgggggagtgggaaagtgattctgtaaccaacattagaattactttggatttgtaatcagattggttctatgatttgtctttgactattcacagataattgtaaatgctggttttataagcccaagtcattttacatttgcttttccaaaatgtattaaattggaattttttaatcctttatatacaaaaaaaatacgatcactcagtgtgtgtttctcttccccttcttagtcagcacacccagtcctttattttattctattctatttattttattttaataagtacttagcctcttctgacttctcaaaggacaatcggatacatatcttcctgaaaagaagtagttaaagttcccttgggaactagctacttggtagttacaattcccaaatgcagaacttggtcttttcatgttaaaagccttaatctcatttgggtactcaaaagagaaatcagagtttattctggttaacttgagaagccaagaaagatcatttttagcaagtatgccttccatccttggcagaggcttcccagcatcctaggctcagcttaccgggtgataggccccataagacacacacatgagcagggtgagaaatgcttgctttatagctgctccaccctcatctccagagattttgtgtctatggttgtgggtctggaaacctggcaggaaccacttctagagtacctttgcctaaactcttttagaattgaggccccaactttgatggcacatttaatacccaatttcttccataatagatatttttaatagcaggacagatggcactgattagatcaagaactatttggaagtgcctcttatgtttttttcctgcattctgtacataaagttttaagtggcaggtccagatatgtaaaatcatttctctctattttccagctggttttgttaatgattctctaggacagcaggtaaatgagttaagttgttggcttggggcaagtgaagtttgtgactatgcttgatttaataagctgagagtctcttgtttgtctgtcaaggtgccttcctctgctgaagccttacctccttctcacccagtaacggttaactcttctcttgtgtatatgcaaataaacctattattcacttaaaaaaaatt

SEQ ID NO: 326360 - DNA, 4887 bp, Homo sapiens
aggggtctccgcccggcgccacccaggtccccaggcgggaagcggctcaactgggaaagcagccggcgcccgtggtctccgggccggccgcccgcgttcttccggccagccccccgcggaggggaggggcgccgacgccgcgttctcggggccccgcagccggcggaagggccgcgcatcgcggaagcgcggcggcagctgaggatcagctgctggaggaggcggagaggcagagggaggagcctcggggggaaggagagggaggggaccgtcaggaagccgcgaacgccgccgagtgtctgcacacctcgctctgcctgccatggctggttaaagaaccatccggatcgcagcgcggggggagggccgggtggggggagcagcggccgcgcgtgaggccgagggaggggcggcggcgcgagcggcggcggcggcggttccagcatgaagaggagagctggcctggggggcagcatgaggtcagtggtgggcttcttgtcccagcggggcttgcatggggaccccctgctcactcaggactttcagaggagacgcctgcggggctgcagaaacctctacaagaaggacctcctcggccacttcggctgtgtcaatgccattgaattctccaacaatggaggccagtggctggtctcaggaggagatgaccgccgggttctgctatggcacatggaacaagccatccactccagggtcaagcccatacagctgaaaggagagcaccattccaacattttttgcctggctttcaacagtgggaacactaaagtgttctctggaggcaatgatgagcaagttatcctccatgatgttgaaagcagtgagacattggacgtgtttgctcatgaagatgcagtatatggcttgtctgtgagcccagtgaatgacaacatttttgccagttcctcagatgatggccgggttctcatttgggacattcgggaatccccccatggagagcccttctgcctggcaaactatccatcagcctttcatagtgtcatgtttaaccctgtggagcccaggttgttggccacagccaattcaaaggaaggagtgggactctgggacattcgaaaacctcagagttctctcctgcgctatggtggaaacctgtccctccaaagtgccatgagtgtacgattcaacagcaacgggacccagctcctggccctgaggcgacgcctgccccctgtgctctatgacatccattcccgcctgcctgtgtttcagtttgacaatcagggttacttcaactcatgcaccatgaaaagctgctgttttgcaggagatcgtgaccagtatatcctttcgggctctgatgacttcaacctgtacatgtggagaattcctgcagatccagaagcaggtggcattggtagggtggtcaacggagccttcatggtgctgaaagggcatcgatctattgttaaccaagtccgatttaatccccacacctacatgatctgctcttctggtgtagaaaagattatcaagatctggagcccatacaagcagccaggatgtactggagacctcgacggtcggattgaggacgattcccgctgcctctatacccatgaagagtacatcagccttgtgctgaacagtgggagtggcctgtcgcatgactacgccaaccagtcggtccaggaagacccccggatgatggccttctttgactcactggtacgccgagagatcgagggctggagctctgactcagacagtgacctcagtgagagtactatcctccaactgcacgctggggtcagcgagcgctcaggctacactgactcagagtcttcggcctcattgcctcgctccccgcctcccacagtagatgagtctgccgacaacgccttccacctggggcccctgcgggtcaccaccacaaacacagtagcctcaactccaccaacacccacgtgtgaggatgcagcctctcgccagcagcgtctgtctgctctgcggcgctaccaagacaaacgcctcctggccctttccaatgagtccgattctgaggagaatgtctgtgaggtggaactagacacagatctctttccccggccacggtcacccagccccgaagatgaatccagcagttccagcagctctagcagctctgaggatgaggaggagctgaatgaacgccgagcctctacctggcagcggaatgccatgcggcgccgacagaagacaacccgagaagacaagcccagtgccccaatcaagcccaccaacacttacattggagaagacaactatgattacccccagatcaaagtggatgacctctcctcctccccaacctcgtcccctgagcggagcacttccacgctagagattcaaccaagccgggcatcaccaacttctgacatagaatcagttgagcgaaaaatttataaagcttacaagtggctccgctactcttatatctcctactcaaataacaaagatggagagacctccttggtgaccggggaggcagatgaagggagagcaggaaccagccacaaagacaacccagccccttcttccagtaaggaagcctgtctaaacatagcaatggcccagaggaaccaggacctgccacctgaaggctgcagcaaggacacttttaaagaagagactcctagaactcccagcaatggcccaggccatgagcacagcagccatgcttgggcagaggtgccagagggtacctctcaggacactggcaatagcggctctgtagagcacccttttgaaaccaagaagctcaatggaaaggccctgagcagtcgggctgaggagccgccttctcctcctgtccccaaggcatctggctccactctcaacagcgggtctggcaactgtcccaggacccagtctgatgacagtgaggagaggagcctcgaaaccatctgtgccaaccacaacaatggacgcttacaccctcgtccccctcaccctcacaataacgggcagaacttgggggagctggaggtggtggcctactcttccccaggacactcagacactgaccgtgataactcgtccctgacagggacactcctacacaaagattgttgcgggtctgaaatggcctgtgagacccccaatgctggaacaagagaggaccccactgacaccccagccacagatagtagcagggctgttcatggccacagtggcctcaaaaggcaacgaattgaattggaagatacagattcagagaattcctcctcagagaagaaattaaaaacatgataaatacaaagggaaaacaaaaagctacaaaagtagccttacaaaaaaaaaaaattgtttagtgaatacagaggaaaggaaaaacaagtattaaaggcacatgaaaccagggcctgaaattttgtgtctgatgctgctcccttctatccaacattcaacaacgggtctgaatgtctagctggccattggcttgtgctgtgttaagaaaggggaaaaaaaaataacccaagtgactcctttctagtgagacgtgagcgtagtgtgccgcgcaaggctctgtggaagtaaatctttgttgagacgttcgacttgttcttgtgtacgcacaatggcacgtgtgcgcttattgtctcataagaccttccttttagttctccatcagaaaggacctatgaatttgtactttttgccatctcaccctgtttacatgccataggtgttctggtctggatgatgggtgcctgttaaatcaggttgtgctgccagtgagttgtagatttatgctggaagaatggagaatggaaacaggccttcagcccattggctgcgctggagaggaaagcatggttcctttcttaaagaaatcttccatgttttctctaagtaacacttctttattgagcatttaatgtggacatactataaaaaagaatttttaatgctaatgagaggtttagcacttaagatcagattcaagagaatatagattcctgataaatttcactgtttgcaaattgagcagtgctgcaacatgtactgtatgaaggccataaaatagagctagtcatggataacagactttaaccagttaggtgctagatcctaagaggcactcacaaggccagcaggtgcttccttggctcccatgatcgatcgaggcatagtgaaagaagggcaaagacagctttccagagctttgtgctcaggctactaaagtagttgttataggtgtgttaacgaagaagcttagtgaggagcagaatgtggtactatattcatttaactcaacccagaaccattggtcagaattggtgggactggcatcttccctcagacttgcagttgatagaggctgtggtgttctcactagactttgcagagcagtaggcatctcaaggtaacagattcttattgagtaggtctattaggagtcagaaggtgttggggaggagtctctggcttatgactcctggttcccattagtcttaagtcttctggttcccataaaagactcagttttattgaggtagatacaggtttagaagagaaaagagcaacagattttcagcgttgcagtcactcggttatctatgaagggttgtgcaaaacaggaaggtctgggaatgaccagatatcttgttggcataaatgttatgaaaaggcagaatacttacaaaaaaaagaaaaattgtttagtgaatacagaggaaaggaaaaacaagtattaaaggcacatgaaaccagggcctgaaattttgtgtctgatgctgctcccttctatccaacattcaacaacgggtctgaatgtctagctggccattggcttgtgctgtgttaagaaagggaaaaaaaaaactcgacgcggccgcgaatttagtagtagtaggcgaccgc

SEQ ID NO: 326361 - DNA, 1839 bp, Homo sapiens
aggggtctccgcccggcgccacccaggtccccaggcgggaagcggctcaactgggaaagcagccggcgcccgtggtctccgggccggccgcccgcgttcttccggccagccccccgcggaggggaggggcgccgacgccgcgttctcggggccccgcagccggcggaagggccgcgcatcgcggaagcgcggcggcagctgaggatcagctgctggaggaggcggagaggcagagggaggagcctcggggggaaggagagggaggggaccgtcaggaagccgcgaacgccgccgagtgtctgcacacctcgctctgcctgccatggctggttaaagaaccatccggatcgcagcgcggggggagggccgggtggggggagcagcggccgcgcgtgaggccgagggaggggcggcggcgcgagcggcggcggcggcggttccagcatgaagaggagagctggcctggggggcagcatgaggtcagtggtgggcttcttgtcccagcggggcttgcatggggaccccctgctcactcaggactttcagaggagacgcctgcggggctgcagaaacctctacaagaaggacctcctcggccacttcggctgtgtcaatgccattgaattctccaacaatggaggccagtggctggtctcaggaggagatgaccgccgggttctgctatggcacatggaacaagccatccactccagggtcaagcccatacagctgaaaggagagcaccattccaacattttttgcctggctttcaacagtgggaacactaaagtgttctctggaggcaatgatgagcaagttatcctccatgatgttgaaagcagtgagacattggacgtgtttgctcatgaagatgcagtatatggcttgtctgtgagcccagtgaatgacaacatttttgccagttcctcagatgatggccgggttctcatttgggacattcgggaatccccccatggagagcccttctgcctggcaaactatccatcagcctttcatagtgtcatgtttaaccctgtggagcccaggttgttggccacagccaattcaaaggaaggagtgggactctgggacattcgaaaacctcagagttctctcctgcgctatggtggaaacctgtccctccaaagtgccatgagtgtacgattcaacagcaacgggacccagctcctggccctgaggcgacgcctgccccctgtgctctatgacatccattcccgcctgcctgtgtttcagtttgacaatcagggttacttcaactcatgcaccatgaaaagctgctgttttgcaggagatcgtgaccagtatatcctttcgggctctgatgacttcaacctgtacatgtggagaattcctgcagatccagaagcaggtggcattggtagggtggtcaacggagccttcatggtgctgaaagggcatcgatctattgttaaccaagtccgatttaatccccacacctacatgatctgctcttctggtgtagaaaagattatcaaggtgaggcaccttccccttctgtccttttagagaaattctcacaatttataattagaagaaactagaacaatttatgtaggacctcatatttaaacatactaaaggtctatcagaattctcagattttaacatattacaaaatattagaaagctgatattaaaaagtgatgccaggcatagtgacagtacctgtagtcccagctacttgggaggctgaggcaggaggatcacttcagcctaagagtttgaggccagcctggagaacatagcaagacatcatcttaaaaaataaaataaaaaataaaaataaataaattttaa

SEQ ID NO: 326362 - DNA, 1550 bp, Homo sapiens
aggggtctccgcccggcgccacccaggtccccaggcgggaagcggctcaactgggaaagcagccggcgcccgtggtctccgggccggccgcccgcgttcttccggccagccccccgcggaggggaggggcgccgacgccgcgttctcggggccccgcagccggcggaagggccgcgcatcgcggaagcgcggcggcagctgaggatcagctgctggaggaggcggagaggcagagggaggagcctcggggggaaggagagggaggggaccgtcaggaagccgcgaacgccgccgagtgtctgcacacctcgctctgcctgccatggctggttaaagaaccatccggatcgcagcgcggggggagggccgggtggggggagcagcggccgcgcgtgaggccgagggaggggcggcggcgcgagcggcggcggcggcggttccagcatgaagaggagagctggcctggggggcagcatgaggtcagtggtgggcttcttgtcccagcggggcttgcatggggaccccctgctcactcaggactttcagaggagacgcctgcggggctgcagaaacctctacaagaaggacctcctcggccacttcggctgtgtcaatgccattgaattctccaacaatggaggccagtggctggtctcaggaggagatgaccgccgggttctgctatggcacatggaacaagccatccactccagggtcaagcccatacagctgaaaggagagcaccattccaacattttttgcctggctttcaacagtgggaacactaaagtgttctctggaggcaatgatgagcaagttatcctccatgatgttgaaagcagtgagacattggacgtgtttgctcatgaagatgcagtatatggcttgtctgtgagcccagtgaatgacaacatttttgccagttcctcagatgatggccgggttctcatttgggacattcgggaatccccccatggagagcccttctgcctggcaaactatccatcagcctttcatagtgtcatgtttaaccctgtggagcccaggttgttggccacagccaattcaaaggaaggagtgggactctgggacattcgaaaacctcagagttctctcctgcgctatggtggaaacctgtccctccaaagtgccatgagtgtacgattcaacagcaacgggacccagctcctggccctgaggcgacgcctgccccctgtgctctatgacatccattcccgcctgcctgtgtttcagtttgacaatcagggttacttcaactcatgcaccatgaaaagctgctgttttgcaggagatcgtgaccagtatatcctttcgggctctgatgacttcaacctgtacatgtggagaattcctgcagatccagaagcaggcaagtatatccttcacatgaatgtactgctattgctggctctgttgacctttggcatgctgtgccctgaggggacagatctttagcagtagaggacaacatttctaacataagctgtgaccaaaggaaatttaaaaataaaaattataaaccagattaa

SEQ ID NO: 326363 - DNA, 280 bp, Homo sapiens
gctggagaggagatcaggggtcttgcaggataaggcgaagaggctggacttttttctaagatcagttgtaggggggacactggaggatctgaggcaggagaagacgagacctgacctatattggggatcgacccctggtcttggggggagaatgggtgcagatgcagggaaggcaaggaagaggctgcacagctgcccagcagagacgacagggcctggactaatgggcagtacaggagctggaggggagggagaggcaccccagagtcaggattgactg

SEQ ID NO: 326364 - DNA, 213 bp, Homo sapiens
ccaaaacaaacaaaaaaatattactactactacgattgctattgttttcgttaaaaagtcttgggacctagaaagcactgaaatttgaatctcttataaaatggctctaaatgggtcaccttaaaatgtagctactgctgggcatggtggctcatgcctgtaatcccagcagtttgggaggccaaggcaggcagattgcttgagcttgggatt

SEQ ID NO: 326365 - DNA, 123 bp, Homo sapiens
ccccaggggaaggaaagaaaaatggcaaaagtggaggttagggcagaaaggaaacagatgcctgtgacctgggcacccaatcagagggagctccctccaagcatattgagggagttgctgtgg

SEQ ID NO: 326366 - DNA, 1996 bp, Homo sapiens
  misc_feature (8)..(8): n is a, c, g, or t
  misc_feature (17)..(17): n is a, c, g, or t
  misc_feature (24)..(25): n is a, c, g, or t
  misc_feature (1879)..(1879): n is a, c, g, or t
  misc_feature (1885)..(1887): n is a, c, g, or t
  misc_feature (1919)..(1919): n is a, c, g, or t
  misc_feature (1950)..(1950): n is a, c, g, or t
  misc_feature (1954)..(1954): n is a, c, g, or t
  misc_feature (1959)..(1959): n is a, c, g, or t
  misc_feature (1967)..(1967): n is a, c, g, or t
gggggttncccggtcgnctggtgnnggacagcgagagattccatcacgctactcagaagggcacaccatttgagacttaaaattctttatttctggaattgttctattttgttagttactgttggtaatctcttactgtgcctaatttataaattaaactttagatatgtatgtacaggaaaaaatgtagtatatagtatcgtatatatgtacaggaaaaaaacgtactatctgtggtttcaggtatccactgcgggtcttcgaacgtacccccctcaggtgagaggggactgctgtacaaagaatataggaaggcctctagactacatccattccttcctcaacaggaggaaaattcctggtacagtttaacgtaaggcttcactgatcactgttgtttttgtttttgtttttgtttttttgagacagagtctcactcttgcccaggctggagtgcagtggcacggtcttggctcactgcaacctccacctcccaggttccagcaattctcctgcctcagcctccccagtagctgggattacagacatgcaccaccacacctggctaatttttgtatttttagtagagacagttttcaccatgttgtccaggctggtctcaactcctgacctcaggtgatccacccaccttgccctcccaaagtgctaggattacaggcgtgagccactgcacctagcccactgatcactcttctgcttacagaatatcagaagtcattctagaggcaaatttgaagagtggaaaaatcactttttctgaatgatcttgtttttggtgtagatgtttttattgtgtgggttagtttaatgaatacataaagactaccagtaccattctgtctttactccgtggcatctgtggaataaccctgctaatgtaacacgtgagaaagcctttggtcatgccacccactctaccagttgtccccaccatcccccgccctcctccctgtgagacactgggccaaaggctcactacccctgtgcgttgtccagcacacagacactatgtgcattatttgtacataaggataatcacatctacctgagactgctatcatggaaattaaatgtttggtacatgtaaagtctttgaaagtgtaactggaatattgtgtaattttaataaataataactattgttgtttttatgatcattactaccatttgtgttgccattagtgaatttttacaagaaaactccctgtgggtgcaatgagtctggaaaagaccattgagtcttctagaagaaaacattaagagattattggcacagccgtgggttacgcaatgatttcttagtacacaaaacacagcaaacataaaaagttgttacacttcatcaaaagtacaaagttctgttcatcaaatgatgctgttaagatagggaaaagacaagaaacaggactggaagaagatgtttgctctaaggtacacctgacaaaggaactctcatagaaaatataaagaatccctcaagttgaaaaaaaaatcaatttaaaggggagaaaacttcagcacgtctcaacagaagaccaccaaatggccaataagtaagtgaaaatgtattcaatgtcattgctcctcaaggaactgtagagtaaaaccacaatgtgctgtcactctagacagtcaccaggatgattaaatttaaatcacaataacaaggctgatttcagatgtctcaccacaaagaaggaggataagggagcgaggtgatggatatgttaattagcttgatttaatccttccacattgtatacatgtatcagaacatcacattgtactccatcaatataatacaattattatttgtcaatcaaatattaataaaatcaaagatgaaaaaaaaaaaatncaaaannnaaaataaagtatggcgatagaaattgaacctngcgcaatagatatagtaccgcaaggggatgntatnaccangcataatntagcaaggctcccctatacctcttgcatg

SEQ ID NO: 326367 - DNA, 1453 bp, Homo sapiens
  misc_feature (1336)..(1336): n is a, c, g, or t
  misc_feature (1342)..(1344): n is a, c, g, or t
  misc_feature (1376)..(1376): n is a, c, g, or t
  misc_feature (1407)..(1407): n is a, c, g, or t
  misc_feature (1411)..(1411): n is a, c, g, or t
  misc_feature (1416)..(1416): n is a, c, g, or t
  misc_feature (1424)..(1424): n is a, c, g, or t
ccaatctgaagtgggagcggccgtaatttttgtatttttagtagagacagttttcaccatgttgtccaggctggtctcaactcctgacctcaggtgatccacccaccttgccctcccaaagtgctaggattacaggcgtgagccactgcacctagcccactgatcactcttctgcttacagaatatcagaagtcattctagaggcaaatttgaagagtggaaaaatcactttttctgaatgatcttgtttttggtgtagatgtttttattgtgtgggttagtttaatgaatacataaagactaccagtaccattctgtctttactccgtggcatctgtggaataaccctgctaatgtaacacgtgagaaagcctttggtcatgccacccactctaccagttgtccccaccatcccccgccctcctccctgtgagacactgggccaaaggctcactacccctgtgcgttgtccagcacacagacactatgtgcattatttgtacataaggataatcacatctacctgagactgctatcatggaaattaaatgtttggtacatgtaaagtctttgaaagtgtaactggaatattgtgtaattttaataaataataactattgttgtttttatgatcattactaccatttgtgttgccattagtgaatttttacaagaaaactccctgtgggtgcaatgagtctggaaaagaccattgagtcttctagaagaaaacattaagagattattggcacagccgtgggttacgcaatgatttcttagtacacaaaacacagcaaacataaaaagttgttacacttcatcaaaagtacaaagttctgttcatcaaatgatgctgttaagatagggaaaagacaagaaacaggactggaagaagatgtttgctctaaggtacacctgacaaaggaactctcatagaaaatataaagaatccctcaagttgaaaaaaaaatcaatttaaaggggagaaaacttcagcacgtctcaacagaagaccaccaaatggccaataagtaagtgaaaatgtattcaatgtcattgctcctcaaggaactgtagagtaaaaccacaatgtgctgtcactctagacagtcaccaggatgattaaatttaaatcacaataacaaggctgatttcagatgtctcaccacaaagaaggaggataagggagcgaggtgatggatatgttaattagcttgatttaatccttccacattgtatacatgtatcagaacatcacattgtactccatcaatataatacaattattatttgtcaatcaaatattaataaaatcaaagatgaaaaaaaaaaaatncaaaannnaaaataaagtatggcgatagaaattgaacctngcgcaatagatatagtaccgcaaggggatgntatnaccangcataatntagcaaggctcccctatacctcttgcatg

SEQ ID NO: 326368 - DNA, 1942 bp, Homo sapiens
  misc_feature (8)..(8): n is a, c, g, or t
  misc_feature (17)..(17): n is a, c, g, or t
  misc_feature (24)..(25): n is a, c, g, or t
  misc_feature (1825)..(1825): n is a, c, g, or t
  misc_feature (1831)..(1833): n is a, c, g, or t
  misc_feature (1865)..(1865): n is a, c, g, or t
  misc_feature (1896)..(1896): n is a, c, g, or t
  misc_feature (1900)..(1900): n is a, c, g, or t
  misc_feature (1905)..(1905): n is a, c, g, or t
  misc_feature (1913)..(1913): n is a, c, g, or t
gggggttncccggtcgnctggtgnnggacagcgagagattccatcacgctactcagaagggcacaccatttgagacttaaaattctttatttctggaattgttctattttgttagttactgttggtaatctcttactgtgcctaatttataaattaaactttagatatgtatgtacaggaaaaaatgtagtatatagtatcgtatatatgtacaggaaaaaaacgtactatctgtggtttcaggtatccactgcgggtcttcgaacgtacccccctcaggtgagaggggactgctgtacaaagaatataggaaggcctctagactacatccattccttcctcaacaggaggaaaattcctggtacagtttaacgtaaggcttcactgatcactgttgtttttgtttttgtttttgtttttttgagacagagtctcactcttgcccaggctggagtgcagtggcacggtcttggctcactgcaacctccacctcccaggttccagcaattctcctgcctcagcctccccagtagctgggattacagacatgcaccaccacacctggctaatttttgtatttttagtagagacagttttcaccatgttgtccaggctggtctcaactcctgacctcaggtgatccacccaccttgccctcccaaagtgctaggattacaggcgtgagccactgcacctagcccactgatcactcttctgcttacagaatatcagaagtcattctagaggcaaatttgaagagtggaggttagtttaatgaatacataaagactaccagtaccattctgtctttactccgtggcatctgtggaataaccctgctaatgtaacacgtgagaaagcctttggtcatgccacccactctaccagttgtccccaccatcccccgccctcctccctgtgagacactgggccaaaggctcactacccctgtgcgttgtccagcacacagacactatgtgcattatttgtacataaggataatcacatctacctgagactgctatcatggaaattaaatgtttggtacatgtaaagtctttgaaagtgtaactggaatattgtgtaattttaataaataataactattgttgtttttatgatcattactaccatttgtgttgccattagtgaatttttacaagaaaactccctgtgggtgcaatgagtctggaaaagaccattgagtcttctagaagaaaacattaagagattattggcacagccgtgggttacgcaatgatttcttagtacacaaaacacagcaaacataaaaagttgttacacttcatcaaaagtacaaagttctgttcatcaaatgatgctgttaagatagggaaaagacaagaaacaggactggaagaagatgtttgctctaaggtacacctgacaaaggaactctcatagaaaatataaagaatccctcaagttgaaaaaaaaatcaatttaaaggggagaaaacttcagcacgtctcaacagaagaccaccaaatggccaataagtaagtgaaaatgtattcaatgtcattgctcctcaaggaactgtagagtaaaaccacaatgtgctgtcactctagacagtcaccaggatgattaaatttaaatcacaataacaaggctgatttcagatgtctcaccacaaagaaggaggataagggagcgaggtgatggatatgttaattagcttgatttaatccttccacattgtatacatgtatcagaacatcacattgtactccatcaatataatacaattattatttgtcaatcaaatattaataaaatcaaagatgaaaaaaaaaaaatncaaaannnaaaataaagtatggcgatagaaattgaacctngcgcaatagatatagtaccgcaaggggatgntatnaccangcataatntagcaaggctcccctatacctcttgcatg

SEQ ID NO: 326369 - DNA, 856 bp, Homo sapiens
  misc_feature (739)..(739): n is a, c, g, or t
  misc_feature (745)..(747): n is a, c, g, or t
  misc_feature (779)..(779): n is a, c, g, or t
  misc_feature (810)..(810): n is a, c, g, or t
  misc_feature (814)..(814): n is a, c, g, or t
  misc_feature (819)..(819): n is a, c, g, or t
  misc_feature (827)..(827): n is a, c, g, or t
actatagacgatccccgagtacgctacttttatgatcattactaccatttgtgttgccattagtgaatttttacaagaaaactccctgtgggtgcaatgagtctggaaaagaccattgagtcttctagaagaaaacattaagagattattggcacagccgtgggttacgcaatgatttcttagtacacaaaacacagcaaacataaaaagttgttacacttcatcaaaagtacaaagttctgttcatcaaatgatgctgttaagatagggaaaagacaagaaacaggactggaagaagatgtttgctctaaggtacacctgacaaaggaactctcatagaaaatataaagaatccctcaagttgaaaaaaaaatcaatttaaaggggagaaaacttcagcacgtctcaacagaagaccaccaaatggccaataagtaagtgaaaatgtattcaatgtcattgctcctcaaggaactgtagagtaaaaccacaatgtgctgtcactctagacagtcaccaggatgattaaatttaaatcacaataacaaggctgatttcagatgtctcaccacaaagaaggaggataagggagcgaggtgatggatatgttaattagcttgatttaatccttccacattgtatacatgtatcagaacatcacattgtactccatcaatataatacaattattatttgtcaatcaaatattaataaaatcaaagatgaaaaaaaaaaaatncaaaannnaaaataaagtatggcgatagaaattgaacctngcgcaatagatatagtaccgcaaggggatgntatnaccangcataatntagcaaggctcccctatacctcttgcatg

SEQ ID NO: 326370 - DNA, 984 bp, Homo sapiens
  misc_feature (896)..(896): n is a, c, g, or t
  misc_feature (900)..(900): n is a, c, g, or t
  misc_feature (902)..(902): n is a, c, g, or t
  misc_feature (905)..(905): n is a, c, g, or t
gcatttccggagcgccagggaagagggaagtcgtggtggtcgcgagggagccggaaagatggtggttaccagatctgcacgggctaaggccagcatccaagccgcgtcggctgaaagttccgggcaaaagagttttgctgctaatgggattcaagcgcatccagaaagtagtactggatctgatgcccgaactactgctgaatcacagaccactgggaagcaaagtttaatccctagaactcctaaagctagaaagaggaagagcagaactacaggctcactaccaaaggggactgaaccatctacggatggagagacctctgaggcagagtcaaattattctgtgtctgagcaccatgataccattttaagggtaactaggagaaggcagatcttaattgcatgctccccagtgtccagtgttaggaaaaagccgaaagtaactccaacaaaggagtcttacactgaagaaatagtgtctgaagcagaatctcatgtttcaggtatttctagaattgtgcttcctacagaaaaaactacaggagccagaagaagtaaggctaaatctctgacagatccaagccaagaatctcatacagaagctatatctgatgctgagacatcaagctcagacatttcattctctggaattgcaactagaagaaccaggagtatgcagaggaaattaaaggcacaaactgaaaagaaagatagtaagattgtaccaggaaatgagaaacagatcgtgggtacacctgtgaattcagaggattcagataccagacaaacttcccatttacaagcaagatctctttctgagataaataagccaaatttctataataatgactttgatgatgatttctcccacagaagttcagaaatttttaccgggncganangcnaggtgaaccctaagaacaccgacggcaggaattggagaaaagccacgacacacagtatggcaacaactacggaagactc

SEQ ID NO: 326371 - DNA, 930 bp, Homo sapiens
tactataaactactgaagaaacataatagcaccactatgctacttttttttttttgctttaaataaatggcaaaatttacattactattagtgtaatgtaagcttgttctttccattcctttctctaaatataattagagctacactgaagtatgaaagcatcttggcactcaatgcatgacttatttcaatcaattgttcacagattggaaccattgttgacaatccagctgatttctaccattcacgaattcccaagaagcaaaggaaaagaactattgtggaagaactgctggctgattctgaattcagaagatacaaccgaaggaagtactcagagatcatggctgaaaaagcagcaaatgcagcaggaaaaaagttccgaaagaagaagaaatttcgcaattaagatttaccaagcaaactgcaacattttacattgctcctttatttacttattaaagacgtttggaaaactaacaccatcatctaaattaatttaccatagactggccctgttcatacaggaatttgtatttggaaaaagttgatttgagaatcgattacatgcccttagaaaataggggtgtctaaaagacccaccctggtgtagactctttatgggaaaaaaggaaaaaaaatctcaaccattttaagataactgatggtttgtaaagttttcaatgcttagttatttaaagaaaatttaattaaaagataggaagtataaagtttgctaacatgttcaaagaactttaaaaaatgatcaaagatatataaacattattgtaattaataggtagttttatgtgtgtatgtgtgtgtgtgtctgtgtaggggacgggagatggtagagaggcaatgccctatagttagctataaaattcagatccagaaagttgggatacaaagatatgaagaatatgacct

SEQ ID NO: 326372 - DNA, 479 bp, Homo sapiens
tactataaactactgaagaaacataatagcaccactatgctacttttttttttttgctttaaataaatggcaaaatttacattactattagtgtaatgtaagcttgttctttccattcctttctctaaatataattagagctacactgaagtatgaaagcatcttggcactcaatgcatgacttatttcaatcaattgttcacagattggaaccattgttgacaatccagctgatttctaccattcacgaattcccaagaagcaaaggaaaagaactattgtggaagaactgctggctgattctgaattcagaagatacaaccgaaggaagtactcagagatcatggctgaaaaagcagcaaatgcagcaggaaaaaagttccgaaagaagaagaaatttcgcaattaagatttaccaagcaaactgcaacattttacattgctcctttatttacttattaaagacgtttggaaaacta

SEQ ID NO: 326373 - DNA, 398 bp, Homo sapiens
tgtgctgtggtgatctagaggatcccagtggggaacaatcacttgaacatcacttgaacaatcacttgaacaatcacttgaacaatcacttgaacaatcacttgaacaatcacttgaacaatcacttgaacaatcacttgaactaagtgattgttccccgcgtgggtacctgagctctgaattctgtaatctatgtgtcatatgcttgttgaaaatgaagatgagtttagtgatgaagaagacttcctaaatagcacaaaggctaaactgtaagtttttcctttatttttataagtttttgatacatgtatttcaagtggttaatttaccataaaaatatgaaatgttagcctggggaatgagaaaatcactgccttgggttcttcatggaatggctc

SEQ ID NO: 326374 - DNA, 2892 bp, Homo sapiens
  misc_feature (1996)..(1996): n is a, c, g, or t
  misc_feature (2002)..(2002): n is a, c, g, or t
gcatttccggagcgccagggaagagggaagtcgtggtggtcgcgagggagccggaaagatggtggttaccagatctgcacgggctaaggccagcatccaagccgcgtcggctgaaagttccgggcaaaagagttttgctgctaatgggattcaagcgcatccagaaagtagtactggatctgatgcccgaactactgctgaatcacagaccactgggaagcaaagtttaatccctagaactcctaaagctagaaagaggaagagcagaactacaggctcactaccaaaggggactgaaccatctacggatggagagacctctgaggcagagtcaaattattctgtgtctgagcaccatgataccattttaagggtaactaggagaaggcagatcttaattgcatgctccccagtgtccagtgttaggaaaaagccgaaagtaactccaacaaaggagtcttacactgaagaaatagtgtctgaagcagaatctcatgtttcaggtatttctagaattgtgcttcctacagaaaaaactacaggagccagaagaagtaaggctaaatctctgacagatccaagccaagaatctcatacagaagctatatctgatgctgagacatcaagctcagacatttcattctctggaattgcaactagaagaaccaggagtatgcagaggaaattaaaggcacaaactgaaaagaaagatagtaagattgtaccaggaaatgagaaacagatcgtgggtacacctgtgaattcagaggattcagataccagacaaacttcccatttacaagcaagatctctttctgagataaataagccaaatttctataataatgactttgatgatgatttctcccacagaagttcagaaaatatattaacagtgcacgaacaggccaatgttgaatctcttaaagaaacaaaacagaattgtaaggatttggatgaagatgccaatggaataacagatgaggggaaagaaattaatgagaaaagttctcagctgaagaatctttctgaacttcaggacactagccttcaacagttagtttctcagagacattcaaccccccaaaataaaaatgctgtatcagtgcactctaatctgaactctgaggctgtaatgaaatcattaactcaaacatttgcaactgtggaagtaggcagatggaataacaacaaaaagagccccataaaagcaagtgacttgacaaagtttggtgattgtggtggtagtgatgatgaagaagagtccacagttataagtgtcagtgaagacatgaacagtgaagggaatgtagattttgaatgtgataccaaactatacacgtctgcgcccaacacatctcagggtaaagataattctgtcttactagttctcagcagtgatgaaagccaacagtctgaaaacagtgagaatgaagaggatactttatgttttgttgaaaatagtggccaaagggagtcattaagtggagacacaggaagtctgtcatgtgacaatgcattgtttgtaattgacacaactcctggaatgagtgctgataaaaatttttacttggaagaggaagacaaggcaagtgaggttgccattgaggaagaaaaagaagaggaagaggatgaaaaaagtgaagaagattcatcagaccatgacgaaaatgaagatgagtttagtgatgaagaagacttcctaaatagcacaaaggctaaacttctgaagttgacaagcagcagcatagaccctggtctgagtatcaagcagttgggtggtttgtatattaattttaatgcagataaactacagtctaacaagagaaccctaacacagatcaaggagaaaaagaaaaatgagcttctgcagaaagccgtcattacacctgattttgaaaaaaaccactgtgttccaccatatagtgaatcaaagtatcaacttcagaaaaaacgcagacgcccaaaaaaggggaaaaaaaaaaaaaaagggaanaccggnaaagaacgacaaaaaacagcaggggatggctggtttggtatgaaagctccagaaatgacaaatgaactgaaaaatgatctcaaagcactgaagatgagagccagcatggacccgaaaagattttacaagaaaaatgatagagatggcttccccaagtacttccagattggaaccattgttgacaatccagctgatttctaccattcacgaattcccaagaagcaaaggaaaagaactattgtggaagaactgctggctgattctgaattcagaagatacaaccgaaggaagtactcagagatcatggctgaaaaagcagcaaatgcagcaggaaaaaagttccgaaagaagaagaaatttcgcaattaagatttaccaagcaaactgcaacattttacattgctcctttatttacttattaaagacgtttggaaaactaacaccatcatctaaattaatttaccatagactggccctgttcatacaggaatttgtatttggaaaaagttgatttgagaatcgattacatgcccttagaaaataggggtgtctaaaagacccaccctggtgtagactctttatgggaaaaaaggaaaaaaaatctcaaccattttaagataactgatggtttgtaaagttttcaatgcttagttatttaaagaaaatttaattaaaagataggaagtataaagtttgctaacatgttcaaagaactttaaaaaatgatcaaagatatataaacattattgtaattaataggtagttttatgtgtgtatgtgtgtgtgtgtctgtgtaggggacgggagatggtagagaggcaatgccctatagttagctataaaattcagatccagaaagttgggatacaaagatatgaagaatatgacct

SEQ ID NO: 326375 - DNA, 2420 bp, Homo sapiens
gcatttccggagcgccagggaagagggaagtcgtggtggtcgcgagggagccggaaagatggtggttaccagatctgcacgggctaaggccagcatccaagccgcgtcggctgaaagttccgggcaaaagtgtgttttctctggtttgcagagttttgctgctaatgggattcaagcgcatccagaaagtagtactggatctgatgcccgaactactgctgaatcacagaccactgggaagcaaagtttaatccctagaactcctaaagctagaaagaggaagagcagaactacaggctcactaccaaaggggactgaaccatctacggatggagagacctctgaggcagagtcaaattattctgtgtctgagcaccatgataccattttaagggtaactaggagaaggcagatcttaattgcatgctccccagtgtccagtgttaggaaaaagccgaaagtaactccaacaaaggagtcttacactgaagaaatagtgtctgaagcagaatctcatgtttcaggtatttctagaattgtgcttcctacagaaaaaactacaggagccagaagaagtaaggctaaatctctgacagatccaagccaagaatctcatacagaagctatatctgatgctgagacatcaagctcagacatttcattctctggaattgcaactagaagaaccaggagtatgcagaggaaattaaaggcacaaactgaaaagaaagatagtaagattgtaccaggaaatgagaaacagatcgtgggtacacctgtgaattcagaggattcagataccagacaaacttcccatttacaagcaagatctctttctgagataaataagccaaatttctataataatgactttgatgatgatttctcccacagaagttcagaaaatatattaacagtgcacgaacaggccaatgttgaatctcttaaagaaacaaaacagaattgtaaggatttggatgaagatgccaatggaataacagatgaggggaaagaaattaatgagaaaagttctcagctgaagaatctttctgaacttcaggacactagccttcaacagttagtttctcagagacattcaaccccccaaaataaaaatgctgtatcagtgcactctaatctgaactctgaggctgtaatgaaatcattaactcaaacatttgcaactgtggaagtaggcagatggaataacaacaaaaagagccccataaaagcaagtgacttgacaaagtttggtgattgtggtggtagtgatgatgaagaagagtccacagttataagtgtcagtgaagacatgaacagtgaagggaatgtagattttgaatgtgataccaaactatacacgtctgcgcccaacacatctcagggtaaagataattctgtcttactagttctcagcagtgatgaaagccaacagtctgaaaacagtgagaatgaagaggatactttatgttttgttgaaaatagtggccaaagggagtcattaagtggagacacaggaagtctgtcatgtgacaatgcattgtttgtaattgacacaactcctggaatgagtgctgataaaaatttttacttggaagaggaagacaaggcaagtgaggttgccattgaggaagaaaaagaagaggaagaggatgaaaaaagtgaagaagattcatcagaccatgacgaaaatgaagatgagtttagtgatgaagaagacttcctaaatagcacaaaggctaaacttctgaagttgacaagcagcagcatagaccctggtctgagtatcaagcagttgggtggtttgtatattaattttaatgcagataaactacagtctaacaagagaaccctaacacagatcaaggagaaaaagaaaaatgagcttctgcagaaagccgtcattacacctgattttgaaaaaaaccactgtgttccaccatatagtgaatcaaagtatcaacttcagaaaaaacgcagaaaagaacgacaaaaaacagcaggggatggctggtttggtatgaaagctccagaaatgacaaatgaactgaaaaatgatctcaaagcactgaagatgagagccagcatggacccgaaaagattttacaagaaaaatgatagagatggcttccccaagtacttccagattggaaccattgttgacaatccagctgatttctaccattcacgaattcccaagaagcaaaggaaaagaactattgtggaagaactgctggctgattctgaattcagaagatacaaccgaaggaagtactcagagatcatggctgaaaaagcagcaaatgcagcaggaaaaaagttccgaaagaagaagaaatttcgcaattaagatttaccaagcaaactgcaacattttacattgctcctttatttacttattaaagacgtttggaaaacta

SEQ ID NO: 326376 - DNA, 689 bp, Homo sapiens
cctcctcccttggcctcctcaaagcactaggattataggtgtgagccactttgccaggctgactaaaaattttaaaacttacagaagtttaaactgttgaaaaacttatataacattctgacattattttaaaaccaattttatgtttttatagcttctgcagaaagccgtcattacacctgattttgaaaaaaaccactgtgttccaccatatagtgaatcaaagtatcaacttcagaaaaaacgcagaaaagaacgacaaaaaacagcaggggatggctggtttggtatgaaagctccagaaatgacaaatgaactgaaaaatgatctcaaagcactgaagatgagagccagcatggacccgaaaagattttacaagaaaaatgatagagatggcttccccaagtacttccagattggaaccattgttgacaatccagctgatttctaccattcacgaattcccaagaagcaaaggaaaagaactattgtggaagaactgctggctgattctgaattcagaagatacaaccgaaggaagtactcagagatcatggctgaaaaagcagcaaatgcagcaggaaaaaagttccgaaagaagaagaaatttcgcaattaagatttaccaagcaaactgcaacattttacattgctcctttatttacttattaaagacgtttggaaaacta

SEQ ID NO: 326377 - DNA, 2850 bp, Homo sapiens
gcatttccggagcgccagggaagagggaagtcgtggtggtcgcgagggagccggaaagatggtggttaccagatctgcacgggctaaggccagcatccaagccgcgtcggctgaaagttccgggcaaaagagttttgctgctaatgggattcaagcgcatccagaaagtagtactggatctgatgcccgaactactgctgaatcacagaccactgggaagcaaagtttaatccctagaactcctaaagctagaaagaggaagagcagaactacaggctcactaccaaaggggactgaaccatctacggatggagagacctctgaggcagagtcaaattattctgtgtctgagcaccatgataccattttaagggtaactaggagaaggcagatcttaattgcatgctccccagtgtccagtgttaggaaaaagccgaaagtaactccaacaaaggagtcttacactgaagaaatagtgtctgaagcagaatctcatgtttcaggtatttctagaattgtgcttcctacagaaaaaactacaggagccagaagaagtaaggctaaatctctgacagatccaagccaagaatctcatacagaagctatatctgatgctgagacatcaagctcagacatttcattctctggaattgcaactagaagaaccaggagtatgcagaggaaattaaaggcacaaactgaaaagaaagatagtaagattgtaccaggaaatgagaaacagatcgtgggtacacctgtgaattcagaggattcagataccagacaaacttcccatttacaagcaagatctctttctgagataaataagccaaatttctataataatgactttgatgatgatttctcccacagaagttcagaaaatatattaacagtgcacgaacaggccaatgttgaatctcttaaagaaacaaaacagaattgtaaggatttggatgaagatgccaatggaataacagatgaggggaaagaaattaatgagaaaagttctcagctgaagaatctttctgaacttcaggacactagccttcaacagttagtttctcagagacattcaaccccccaaaataaaaatgctgtatcagtgcactctaatctgaactctgaggctgtaatgaaatcattaactcaaacatttgcaactgtggaagtaggcagatggaataacaacaaaaagagccccataaaagcaagtgacttgacaaagtttggtgattgtggtggtagtgatgatgaagaagagtccacagttataagtgtcagtgaagacatgaacagtgaagggaatgtagattttgaatgtgataccaaactatacacgtctgcgcccaacacatctcagggtaaagataattctgtcttactagttctcagcagtgatgaaagccaacagtctgaaaacagtgagaatgaagaggatactttatgttttgttgaaaatagtggccaaagggagtcattaagtggagacacaggaagtctgtcatgtgacaatgcattgtttgtaattgacacaactcctggaatgagtgctgataaaaatttttacttggaagaggaagacaaggcaagtgaggttgccattgaggaagaaaaagaagaggaagaggatgaaaaaagtgaagaagattcatcagaccatgacgaaaatgaagatgagtttagtgatgaagaagacttcctaaatagcacaaaggctaaacttctgaagttgacaagcagcagcatagaccctggtctgagtatcaagcagttgggtggtttgtatattaattttaatgcagataaactacagtctaacaagagaaccctaacacagatcaaggagaaaaagaaaaatgagcttctgcagaaagccgtcattacacctgattttgaaaaaaaccactgtgttccaccatatagtgaatcaaagtatcaacttcagaaaaaacgcagaaaagaacgacaaaaaacagcaggggatggctggtttggtatgaaagctccagaaatgacaaatgaactgaaaaatgatctcaaagcactgaagatgagagccagcatggacccgaaaagattttacaagaaaaatgatagagatggcttccccaagtacttccagattggaaccattgttgacaatccagctgatttctaccattcacgaattcccaagaagcaaaggaaaagaactattgtggaagaactgctggctgattctgaattcagaagatacaaccgaaggaagtactcagagatcatggctgaaaaagcagcaaatgcagcaggaaaaaagttccgaaagaagaagaaatttcgcaattaagatttaccaagcaaactgcaacattttacattgctcctttatttacttattaaagacgtttggaaaactaacaccatcatctaaattaatttaccatagactggccctgttcatacaggaatttgtatttggaaaaagttgatttgagaatcgattacatgcccttagaaaataggggtgtctaaaagacccaccctggtgtagactctttatgggaaaaaaggaaaaaaaatctcaaccattttaagataactgatggtttgtaaagttttcaatgcttagttatttaaagaaaatttaattaaaagataggaagtataaagtttgctaacatgttcaaagaactttaaaaaatgatcaaagatatataaacattattgtaattaataggtagttttatgtgtgtatgtgtgtgtgtgtctgtgtaggggacgggagatggtagagaggcaatgccctatagttagctataaaattcagatccagaaagttgggatacaaagatatgaagaatatgacct

SEQ ID NO: 326378 - DNA, 2399 bp, Homo sapiens
gcatttccggagcgccagggaagagggaagtcgtggtggtcgcgagggagccggaaagatggtggttaccagatctgcacgggctaaggccagcatccaagccgcgtcggctgaaagttccgggcaaaagagttttgctgctaatgggattcaagcgcatccagaaagtagtactggatctgatgcccgaactactgctgaatcacagaccactgggaagcaaagtttaatccctagaactcctaaagctagaaagaggaagagcagaactacaggctcactaccaaaggggactgaaccatctacggatggagagacctctgaggcagagtcaaattattctgtgtctgagcaccatgataccattttaagggtaactaggagaaggcagatcttaattgcatgctccccagtgtccagtgttaggaaaaagccgaaagtaactccaacaaaggagtcttacactgaagaaatagtgtctgaagcagaatctcatgtttcaggtatttctagaattgtgcttcctacagaaaaaactacaggagccagaagaagtaaggctaaatctctgacagatccaagccaagaatctcatacagaagctatatctgatgctgagacatcaagctcagacatttcattctctggaattgcaactagaagaaccaggagtatgcagaggaaattaaaggcacaaactgaaaagaaagatagtaagattgtaccaggaaatgagaaacagatcgtgggtacacctgtgaattcagaggattcagataccagacaaacttcccatttacaagcaagatctctttctgagataaataagccaaatttctataataatgactttgatgatgatttctcccacagaagttcagaaaatatattaacagtgcacgaacaggccaatgttgaatctcttaaagaaacaaaacagaattgtaaggatttggatgaagatgccaatggaataacagatgaggggaaagaaattaatgagaaaagttctcagctgaagaatctttctgaacttcaggacactagccttcaacagttagtttctcagagacattcaaccccccaaaataaaaatgctgtatcagtgcactctaatctgaactctgaggctgtaatgaaatcattaactcaaacatttgcaactgtggaagtaggcagatggaataacaacaaaaagagccccataaaagcaagtgacttgacaaagtttggtgattgtggtggtagtgatgatgaagaagagtccacagttataagtgtcagtgaagacatgaacagtgaagggaatgtagattttgaatgtgataccaaactatacacgtctgcgcccaacacatctcagggtaaagataattctgtcttactagttctcagcagtgatgaaagccaacagtctgaaaacagtgagaatgaagaggatactttatgttttgttgaaaatagtggccaaagggagtcattaagtggagacacaggaagtctgtcatgtgacaatgcattgtttgtaattgacacaactcctggaatgagtgctgataaaaatttttacttggaagaggaagacaaggcaagtgaggttgccattgaggaagaaaaagaagaggaagaggatgaaaaaagtgaagaagattcatcagaccatgacgaaaatgaagatgagtttagtgatgaagaagacttcctaaatagcacaaaggctaaacttctgaagttgacaagcagcagcatagaccctggtctgagtatcaagcagttgggtggtttgtatattaattttaatgcagataaactacagtctaacaagagaaccctaacacagatcaaggagaaaaagaaaaatgagcttctgcagaaagccgtcattacacctgattttgaaaaaaaccactgtgttccaccatatagtgaatcaaagtatcaacttcagaaaaaacgcagaaaagaacgacaaaaaacagcaggggatggctggtttggtatgaaagctccagaaatgacaaatgaactgaaaaatgatctcaaagcactgaagatgagagccagcatggacccgaaaagattttacaagaaaaatgatagagatggcttccccaagtacttccagattggaaccattgttgacaatccagctgatttctaccattcacgaattcccaagaagcaaaggaaaagaactattgtggaagaactgctggctgattctgaattcagaagatacaaccgaaggaagtactcagagatcatggctgaaaaagcagcaaatgcagcaggaaaaaagttccgaaagaagaagaaatttcgcaattaagatttaccaagcaaactgcaacattttacattgctcctttatttacttattaaagacgtttggaaaacta

SEQ ID NO: 326379 - DNA, 2026 bp, Homo sapiens
gcatttccggagcgccagggaagagggaagtcgtggtggtcgcgagggagccggaaagatggtggttaccagatctgcacgggctaaggccagcatccaagccgcgtcggctgaaagttccgggcaaaaggtatttctagaattgtgcttcctacagaaaaaactacaggagccagaagaagtaaggctaaatctctgacagatccaagccaagaatctcatacagaagctatatctgatgctgagacatcaagctcagacatttcattctctggaattgcaactagaagaaccaggagtatgcagaggaaattaaaggcacaaactgaaaagaaagatagtaagattgtaccaggaaatgagaaacagatcgtgggtacacctgtgaattcagaggattcagataccagacaaacttcccatttacaagcaagatctctttctgagataaataagccaaatttctataataatgactttgatgatgatttctcccacagaagttcagaaaatatattaacagtgcacgaacaggccaatgttgaatctcttaaagaaacaaaacagaattgtaaggatttggatgaagatgccaatggaataacagatgaggggaaagaaattaatgagaaaagttctcagctgaagaatctttctgaacttcaggacactagccttcaacagttagtttctcagagacattcaaccccccaaaataaaaatgctgtatcagtgcactctaatctgaactctgaggctgtaatgaaatcattaactcaaacatttgcaactgtggaagtaggcagatggaataacaacaaaaagagccccataaaagcaagtgacttgacaaagtttggtgattgtggtggtagtgatgatgaagaagagtccacagttataagtgtcagtgaagacatgaacagtgaagggaatgtagattttgaatgtgataccaaactatacacgtctgcgcccaacacatctcagggtaaagataattctgtcttactagttctcagcagtgatgaaagccaacagtctgaaaacagtgagaatgaagaggatactttatgttttgttgaaaatagtggccaaagggagtcattaagtggagacacaggaagtctgtcatgtgacaatgcattgtttgtaattgacacaactcctggaatgagtgctgataaaaatttttacttggaagaggaagacaaggcaagtgaggttgccattgaggaagaaaaagaagaggaagaggatgaaaaaagtgaagaagattcatcagaccatgacgaaaatgaagatgagtttagtgatgaagaagacttcctaaatagcacaaaggctaaacttctgaagttgacaagcagcagcatagaccctggtctgagtatcaagcagttgggtggtttgtatattaattttaatgcagataaactacagtctaacaagagaaccctaacacagatcaaggagaaaaagaaaaatgagcttctgcagaaagccgtcattacacctgattttgaaaaaaaccactgtgttccaccatatagtgaatcaaagtatcaacttcagaaaaaacgcagaaaagaacgacaaaaaacagcaggggatggctggtttggtatgaaagctccagaaatgacaaatgaactgaaaaatgatctcaaagcactgaagatgagagccagcatggacccgaaaagattttacaagaaaaatgatagagatggcttccccaagtacttccagattggaaccattgttgacaatccagctgatttctaccattcacgaattcccaagaagcaaaggaaaagaactattgtggaagaactgctggctgattctgaattcagaagatacaaccgaaggaagtactcagagatcatggctgaaaaagcagcaaatgcagcaggaaaaaagttccgaaagaagaagaaatttcgcaattaagatttaccaagcaaactgcaacattttacattgctcctttatttacttattaaagacgtttggaaaacta

SEQ ID NO: 326380 - DNA, 587 bp, Homo sapiens
  misc_feature (39)..(39): n is a, c, g, or t
aacaaacaaccaactaggctaggtacgaggccgggggtnaatcggccgagggtttaccacgtggatggccacctctatgaacttgatggacgaatgccttttccggtgaaccatggcgccagttcagaggacaccctgctgaaggacgctgccaaggtctgcagagaattcaccgagcgtgagcaaggagaagtccgcttctctgccgtggctctctgcaaggcagcctaatgctctgtgggagggactttgctgatttcccctcttcccttcaacatgaaaatatatacccccccatgcagtctaaaatgcttcagtacttgtgaaacacagctgttcttctgttctgcagacacgccttcccctcagccacacccaggcacttaagcacaagcagagtgcacagctgtccactgggccattgtggtgtgagcttcagatggtgaagcattctccccagtgtatgtcttgtatccgatatctaacgctttaaatggctactttggtttctgtctgtaagttaagaccttggatgtggtttaattgtttgtcctcaaaaggaataaaacttttctgctgataagata

SEQ ID NO: 326381 - DNA, 667 bp, Homo sapiens
gaagcacaaaaccatttggtggaagtgataagtcaaatccatgatgtaaccttgtctttcccatcacctgattttttgctttaagccctggttttcaaattaatgatggaattaaagttgatgagggtgaactttgagcattaatagaccttggagcctttccctatgtgactttcattttgagctcttgctgtttggattttaatgacatttctcctttccaggacgctgccaaggtctgcagagaattcaccgagcgtgagcaaggagaagtccgcttctctgccgtggctctctgcaaggcagcctaatgctctgtgggagggactttgctgatttcccctcttcccttcaacatgaaaatatatacccccccatgcagtctaaaatgcttcagtacttgtgaaacacagctgttcttctgttctgcagacacgccttcccctcagccacacccaggcacttaagcacaagcagagtgcacagctgtccactgggccattgtggtgtgagcttcagatggtgaagcattctccccagtgtatgtcttgtatccgatatctaacgctttaaatggctactttggtttctgtctgtaagttaagaccttggatgtggtttaattgtttgtcctcaaaaggaataaaacttttctgctgataagata

SEQ ID NO: 326382 - DNA, 1007 bp, Homo sapiens
gggctaggtacgaggctgggtggtggcgggcgctccgcgaagatgcagctcaagccgatggagatcaaccccgagatgctgaacaaagtgctgtcccggctgggggtcgccggccagtggcgcttcgtggacgtgctggggctggaagaggagtctctgggctcggtgccagcgcctgcctgcgcgctgctgctgctgtttcccctcacggcccagcatgagaacttcaggaaaaagcagattgaagagctgaagggacaagaagttagtcctaaagtgtacttcatgaagcagaccattgggaattcctgtggcacaatcggacttattcacgcagtggccaataatcaagacaaactgggatttgaggatggatcagttctgaaacagtttctttctgaaacagagaaaatgtcccctgaagacagagcaaaatgctttgaaaagaatgaggccatacaggcagcccatgatgccgtggcacaggaaggccaatgtcgggtagatgacaaggtgaatttccattttattctgtttaacaacgtggatggccacctctatgaacttgatggacgaatgccttttccggtgaaccatggcgccagttcagaggacaccctgctgaaggacgctgccaaggtctgcagagaattcaccgagcgtgagcaaggagaagtccgcttctctgccgtggctctctgcaaggcagcctaatgctctgtgggagggactttgctgatttcccctcttcccttcaacatgaaaatatatacccccccatgcagtctaaaatgcttcagtacttgtgaaacacagctgttcttctgttctgcagacacttccctcagcaaccggacttagcaggggttgcagtgtcactggcctggggggagtcgaggtggaatttcccaggtgtggtcgacttacgcaaggatgggcgtgggaaaggagtggtggggcccagaaatttggtgaaacacgcaaaaaaacacaaagtttttcacacc

SEQ ID NO: 326383 - DNA, 882 bp, Homo sapiens
  misc_feature (39)..(39): n is a, c, g, or t
  misc_feature (785)..(785): n is a, c, g, or t
aacaaacaaccaactaggctaggtacgaggccgggggtnaatcggccgaggcgaagatgcagctcaagccgatggagatcaaccccgagatgctgaacaaagtgctgtcccggctgggggtcgccggccagtggcgcttcgtggacgtgctggggctggaagaggagtctctgggctcggtgccagcgcctgcctgcgcgctgctgctgctgtttcccctcacggcccagcatgagaacttcaggaaaaagcagattgaagagctgaagggacaagaagttagtcctaaagtgtacttcatgaagcagaccattgggaattcctgtggcacaatcggacttattcacgcagtggccaataatcaagacaaactgggatttgaggatggatcagttctgaaacagtttctttctgaaacagagaaaatgtcccctgaagacagagcaaaatgctttgaaaagaatgaggccatacaggcagcccatgatgccgtggcacaggaaggccaatgtcgggtagatgacaaggtgaatttccattttattctgtttaacaacgtggatggccacctctatgaacttgatggacgaatgccttttccggtgaaccatggcgccagttcagaggacaccctgctgaaggacgctgccaaggtctgcagagaattcaccgagcgtgagcaaggagaagtccgcttctctgccgtggctctctgcaaggcagcctaatgctctgtgggagggactttgctgatttcccctcttctgaaattttcccccatgagntaaatgtcgattggaaacagtgtcttgttggaagctccctggcaccgggtttcaagaggcggttccggcgggtgggctggaagtcccgggttgtgat

SEQ ID NO: 326384 - DNA, 370 bp, Homo sapiens
  misc_feature (39)..(39): n is a, c, g, or t
aacaaacaaccaactaggctaggtacgaggccgggggtnaatcggccgaggccttcaacatgaaaatatatacccccccatgcagtctaaaatgcttcagtacttgtgaaacacagctgttcttctgttctgcagacacgccttcccctcagccacacccaggcacttaagcacaagcagagtgcacagctgtccactgggccattgtggtgtgagcttcagatggtgaagcattctccccagtgtatgtcttgtatccgatatctaacgctttaaatggctactttggtttctgtctgtaagttaagaccttggatgtggtttaattgtttgtcctcaaaaggaataaaacttttctgctgataagata

SEQ ID NO: 326385 - DNA, 1189 bp, Homo sapiens
accgtccgtttccccctcgcttggttctgcccctgctccccctgcacaggcctcacagtgcgtctggccggcgctttatagctgcagcctgggcggctccgctagctgtttttcgtcttcttcgtcttccctaggctatttctgccgggcgctccgcgaagatgcagctcaagccgatggagatcaaccccgagatgctgaacaaagtgctgtcccggctgggggtcgccggccagtggcgcttcgtggacgtgctggggctggaagaggagtctctgggctcggtgccagcgcctgcctgcgcgctgctgctgctgtttcccctcacggcccagcatgagaacttcaggaaaaagcagattgaagagctgaagggacaagaagttagtcctaaagtgtacttcatgaagcagaccattgggaattcctgtggcacaatcggacttattcacgcagtggccaataatcaagacaaactgggatttgaggatggatcagttctgaaacagtttctttctgaaacagagaaaatgtcccctgaagacagagcaaaatgctttgaaaagaatgaggccatacaggcagcccatgatgccgtggcacaggaaggccaatgtcgggtagatgacaaggtgaatttccattttattctgtttaacaacgtggatggccacctctatgaacttgatggacgaatgccttttccggtgaaccatggcgccagttcagaggacaccctgctgaaggacgctgccaaggtctgcagagaattcaccgagcgtgagcaaggagaagtccgcttctctgccgtggctctctgcaaggcagcctaatgctctgtgggagggactttgctgatttcccctcttcccttcaacatgaaaatatatacccccccatgcagtctaaaatgcttcagtacttgtgaaacacagctgttcttctgttctgcagacacgccttcccctcagccacacccaggcacttaagcacaagcagagtgcacagctgtccactgggccattgtggtgtgagcttcagatggtgaagcattctccccagtgtatgtcttgtatccgatatctaacgctttaaatggctactttggtttctgtctgtaagttaagaccttggatgtggtttaattgtttgtcctcaaaaggaataaaacttttctgctgataagata

SEQ ID NO: 326386 - DNA, 1149 bp, Homo sapiens
cactggtaagttgtacaagggggtattctgaggcagtactatacggtcctatggtagcgaggctgggtggcgcttcctagttcgtcttccctaggctatttctgccgggcgctccgcgaagatgcagctcaagccgatggagatcaaccccgagatgctgaacaaagtgctgtcccggctgggggtcgccggccagtggcgcttcgtggacgtgctggggctggaagaggagtctctgggctcggtgccagcgcctgcctgcgcgctgctgctgctgtttcccctcacggcccagcatgagaacttcaggaaaaagcagattgaagagctgaagggacaagaagttagtcctaaagtgtacttcatgaagcagaccattgggaattcctgtggcacaatcggacttattcacgcagtggccaataatcaagacaaactgggatttgaggatggatcagttctgaaacagtttctttctgaaacagagaaaatgtcccctgaagacagagcaaaatgctttgaaaagaatgaggccatacaggcagcccatgatgccgtggcacaggaaggccaatgtcgggtagatgacaaggtgaatttccattttattctgtttaacaacgtggatggccacctctatgaacttgatggacgaatgccttttccggtgaaccatggcgccagttcagaggacaccctgctgaaggacgctgccaaggtctgcagagaattcaccgagcgtgagcaaggagaagtccgcttctctgccgtggctctctgcaaggcagcctaatgctctgtgggagggactttgctgatttcccctcttcccttcaacatgaaaatatatacccccccatgcagtctaaaatgcttcagtacttgtgaaacacagctgttcttctgttctgcagacacgccttcccctcagccacacccaggcacttaagcacaagcagagtgcacagctgtccactgggccattgtggtgtgagcttcagatggtgaagcattctccccagtgtatgtcttgtatccgatatctaacgctttaaatggctactttggtttctgtctgtaagttaagaccttggatgtggtttaattgtttgtcctcaaaaggaataaaacttttctgctgataagata

SEQ ID NO: 326387 - DNA, 1112 bp, Homo sapiens
  misc_feature (9)..(9): n is a, c, g, or t
aagttttanaaaaagcaggttgtaccgtccggaattcccggatttcgtcttccctaggctatttctgccgggcgctccgcgaagatgcagctcaagccgatggagatcaaccccgagatgctgaacaaagtgctgtcccggctgggggtcgccggccagtggcgcttcgtggacgtgctggggctggaagaggagtctctgggctcggtgccagcgcctgcctgcgcgctgctgctgctgtttcccctcacggcccagcatgagaacttcaggaaaaagcagattgaagagctgaagggacaagaagttagtcctaaagtgtacttcatgaagcagaccattgggaattcctgtggcacaatcggacttattcacgcagtggccaataatcaagacaaactgggatttgaggatggatcagttctgaaacagtttctttctgaaacagagaaaatgtcccctgaagacagagcaaaatgctttgaaaagaatgaggccatacaggcagcccatgatgccgtggcacaggaaggccaatgtcgggtagatgacaaggtgaatttccattttattctgtttaacaacgtggatggccacctctatgaacttgatggacgaatgccttttccggtgaaccatggcgccagttcagaggacaccctgctgaaggacgctgccaaggtctgcagagaattcaccgagcgtgagcaaggagaagtccgcttctctgccgtggctctctgcaaggcagcctaatgctctgtgggagggactttgctgatttcccctcttcccttcaacatgaaaatatatacccccccatgcagtctaaaatgcttcagtacttgtgaaacacagctgttcttctgttctgcagacacgccttcccctcagccacacccaggcacttaagcacaagcagagtgcacagctgtccactgggccattgtggtgtgagcttcagatggtgaagcattctccccagtgtatgtcttgtatccgatatctaacgctttaaatggctactttggtttctgtctgtaagttaagaccttggatgtggtttaattgtttgtcctcaaaaggaataaaacttttctgctgataagata

SEQ ID NO: 326388 - DNA, 1644 bp, Homo sapiens
  misc_feature (1309)..(1309): n is a, c, g, or t
  misc_feature (1311)..(1311): n is a, c, g, or t
  misc_feature (1315)..(1315): n is a, c, g, or t
  misc_feature (1349)..(1349): n is a, c, g, or t
  misc_feature (1644)..(1644): n is a, c, g, or t
accgtccgtttccccctcgcttggttctgcccctgctccccctgcacaggcctcacagtgcgtctggccggcgctttatagctgcagcctgggcggctccgctagctgtttttcgtcttcttcgtcttccctaggctatttctgccgggcgctccgcgaagatgcagctcaagccgatggagatcaaccccgagatgctgaacaaagtgctgtcccggctgggggtcgccggccagtggcgcttcgtggacgtgctggggctggaagaggagtctctgggctcggtgccagcgcctgcctgcgcgctgctgctgctgtttcccctcacggcccagcatgagaacttcaggaaaaagcagattgaagagctgaagggacaagaagttagtcctaaagtgtacttcatgaagcagaccattgggaattcctgtggcacaatcggacttattcacgcagtggccaataatcaagacaaactgggatttgaggatggatcagttctgaaacagtttctttctgaaacagagaaaatgtcccctgaagacagagcaaaatgctttgaaaagaatgaggccatacaggcagcccatgatgccgtggcacaggaaggccaatgtcgggtagatgacaaggtgaatttccattttattctgtttaacaacgtggatggccacctctatgaacttgatggacgaatgccttttccggtgaaccatggcgccagttcagaggacaccctgctgaaggacgctgccaaggtctgcagagaattcaccgagcgtgagcaaggagaagtccgcttctctgccgtggctctctgcaaggcagcctaatgctctgtgggagggactttgctgatttcccctcttcccttcaacatgaaaatatatacccccccatgcagtctaaaatgcttcagtacttgtgaaacacagctgttcttctgttctgcagacacgccttcccctcagccacacccaggcacttaagcacaagcagagtgcacagctgtccactgggccattgtggtgtgagcttcagatggtgaagcattctccccagtgtatgtcttgtatccgatatctaacgctttaaatggctactttggtttctgtctgtaagttaagaccttggatgtggtttaattgtttgtcctcaaaaggaataaaacttttctgctgataagataaaaaaaaaaaaaaaacctgaggggggcccagtaccaatcgcctatagtgagcgattacaatcactggcgtcgttacacgcggactgggaaacctgcgtaccaactaatcgctgagacatncncttngcagctgcgtatacgaaaggccgaccgacgcttntcacagtggcagctgatggcatgcaatggagcgtaaattggttaaatcggtaaactcgaataagtcatttaacaatggcggaatggaatcctatattaaaggattccgcaaagggttatgtgtcattggaacaagcctcttaaacggcctcactcaagggaaaacccttaagcgagggccttcggacaaccctaaaatattgggtagtcgcaaccaagtgactaagggcccttatttgcgaaaacccctgcaaaagaggggtcttgtaggggcctctcttctttttattatatan

SEQ ID NO: 326389 - DNA, 1410 bp, Homo sapiens
  misc_feature (1410)..(1410): n is a, c, g, or t
accgtccgtttccccctcgcttggttctgcccctgctccccctgcacaggcctcacagtgcgtctggccggcgctttatagctgcagcctgggcggctccgctagctgtttttcgtcttcttcgtcttccctaggctatttctgccgggcgctccgcgaagatgcagctcaagccgatggagatcaaccccgagatgctgaacaaagtgctgtcccggctgggggtcgccggccagtggcgcttcgtggacgtgctggggctggaagaggagtctctgggctcggtgccagcgcctgcctgcgcgctgctgctgctgtttcccctcacggcccagcatgagaacttcaggaaaaagcagattgaagagctgaagggacaagaagttagtcctaaagtgtacttcatgaagcagaccattgggaattcctgtggcacaatcggacttattcacgcagtggccaataatcaagacaaactgggatttgaggatggatcagttctgaaacagtttctttctgaaacagagaaaatgtcccctgaagacagagcaaaatgctttgaaaagaatgaggccatacaggcagcccatgatgccgtggcacaggaaggccaatgtcgggtagatgacaaggtgaatttccattttattctgtttaacaacgtggatggccacctctatgaacttgatggacgaatgccttttccggtgaaccatggcgccagttcagaggacaccctgctgaaggacgctgccaaggtctgcagagaattcaccgagcgtgagcaaggagaagtccgcttctctgccgtggctctctgcaaggcagcctaatgctctgtgggagggactttgctgatttcccctcttcccttcaacatgaaaatatatacccccccatgcagtctaaaatgcttcagtacttgtgaaacacagctgttcttctgttctgcagacacgccttcccctcagccacacccaggcacttaagcacaagcagagtgcacagctgtccactgggccattgtggtgtgagcttcagatggtgaagcattctccccagtgtatgtcttgtatccgatatctaacgctttaaatggctactttggtttctgtctgtaagttaagaccttggatgtggttatgttgtcctaaagaataaattttggtgataaaaaaaaaagggggagacaaattcctaaggacaattagggaacagttctggaaacgggccaaggacgaataaaaccgcggcccataaacgagcagtgaaagacgtgactggagaacaaatggcggaaatggaacacaagaaactaagacaataagaagagaacaaactaaacataaataaaagacagggacaaacaagaagaaatagaacagaatagaagaaaactaccactatcan

SEQ ID NO: 326390 - DNA, 1349 bp, Homo sapiens
accgtccgtttccccctcgcttggttctgcccctgctccccctgcacaggcctcacagtgcgtctggccggcgctttatagctgcagcctgggcggctccgctagctgtttttcgtcttcttcgtcttccctaggctatttctgccgggcgctccgcgaagatgcagctcaagccgatggagatcaaccccgagatgctgaacaaagtgctgtcccggctgggggtcgccggccagtggcgcttcgtggacgtgctggggctggaagaggagtctctgggctcggtgccagcgcctgcctgcgcgctgctgctgctgtttcccctcacggcccagcatgagaacttcaggaaaaagcagattgaagagctgaagggacaagaagttagtcctaaagtgtacttcatgaagcagaccattgggaattcctgtggcacaatcggacttattcacgcagtggccaataatcaagacaaactgggatttgaggatggatcagttctgaaacagtttctttctgaaacagagaaaatgtcccctgaagacagagcaaaatgctttgaaaagaatgaggccatacaggcagcccatgatgccgtggcacaggaaggccaatgtcgggtagatgacaaggtgaatttccattttattctgtttaacaacgtggatggccacctctatgaacttgatggacgaatgccttttccggtgaaccatggcgccagttcagaggacaccctgctgaaggacgctgccaaggtctgcagagaattcaccgagcgtgagcaaggagaagtccgcttctctgccgtggctctctgcaaggcagcctaatgctctgtgggagggactttgctgatttcccctcttcccttcaacatgaaaatatatacccccccatgcagtctaaaatgcttcagtacttgtgaaacacagctgttcttctgttctgcagacacgccttcccctcagccacacccaggcacttaagcacaagcagagtgcacagctgtccactgggccattgtggtgtgagcttcagatggtgaagcattctccccagtgtatgtcttgtatccgatatctaacgctttaaatggctactttggtttctgtctgtaagttaagaccttggatgtggtttaattgtttgtcctcaaagatacacctttctgtggtaacaaaacacacacaaaaaaatttgcggcgcggggccgaagatttaacacttttggggcggccaaggaaataagtacaggtccaaacgggacagggtttccaaaaacggggcgggtgcacagttgtgtggttatcagcgtgtcccgcgcggtaagggaaaaaatcagtcaa

SEQ ID NO: 326391 - DNA, 1343 bp, Homo sapiens
accgtccgtttccccctcgcttggttctgcccctgctccccctgcacaggcctcacagtgcgtctggccggcgctttatagctgcagcctgggcggctccgctagctgtttttcgtcttcttcgtcttccctaggctatttctgccgggcgctccgcgaagatgcagctcaagccgatggagatcaaccccgagatgctgaacaaagtgctgtcccggctgggggtcgccggccagtggcgcttcgtggacgtgctggggctggaagaggagtctctgggctcggtgccagcgcctgcctgcgcgctgctgctgctgtttcccctcacggcccagcatgagaacttcaggaaaaagcagattgaagagctgaagggacaagaagttagtcctaaagtgtacttcatgaagcagaccattgggaattcctgtggcacaatcggacttattcacgcagtggccaataatcaagacaaactgggatttgaggatggatcagttctgaaacagtttctttctgaaacagagaaaatgtcccctgaagacagagcaaaatgctttgaaaagaatgaggccatacaggcagcccatgatgccgtggcacaggaaggccaatgtcgggtagatgacaaggtgaatttccattttattctgtttaacaacgtggatggccacctctatgaacttgatggacgaatgccttttccggtgaaccatggcgccagttcagaggacaccctgctgaaggacgctgccaaggtctgcagagaattcaccgagcgtgagcaaggagaagtccgcttctctgccgtggctctctgcaaggcagcctaatgctctgtgggagggactttgctgatttcccctcttcccttcaacatgaaaatatatacccccccatgcagtctaaaatgcttcagtacttgtgaaacacagctgttcttctgttctgcagacacgccttcccctcagccacacccaggcacttaagcacaagcagagtgcacagctgtccactgggccattgtggtgtgagcttcagatggtgaagcattctccccagtgtatgtcttgtatccgatatctaacgctttaaatggctactttggtttctgtctgtaagttaagaccttggatgtggtttaattgtttgtcctcaaaaggaataaaacttttctgctgataagatacaaaaaaaaagaaccacgagaagagacgcacaacgcaagagaggagcgaaaaagcagaaaaagagggccgaaaaaaatacacggaggacacgataagaccaatacatcaagcgaaagataaaaaaacagggggcgatacaaaagacgcacatta

SEQ ID NO: 326392 - DNA, 1359 bp, Homo sapiens
  misc_feature (1190)..(1190): n is a, c, g, or t
  misc_feature (1234)..(1234): n is a, c, g, or t
  misc_feature (1256)..(1256): n is a, c, g, or t
accgtccgtttccccctcgcttggttctgcccctgctccccctgcacaggcctcacagtgcgtctggccggcgctttatagctgcagcctgggcggctccgctagctgtttttcgtcttcttcgtcttccctaggctatttctgccgggcgctccgcgaagatgcagctcaagccgatggagatcaaccccgagatgctgaacaaagtgctgtcccggctgggggtcgccggccagtggcgcttcgtggacgtgctggggctggaagaggagtctctgggctcggtgccagcgcctgcctgcgcgctgctgctgctgtttcccctcacggcccagcatgagaacttcaggaaaaagcagattgaagagctgaagggacaagaagttagtcctaaagtgtacttcatgaagcagaccattgggaattcctgtggcacaatcggacttattcacgcagtggccaataatcaagacaaactgggatttgaggatggatcagttctgaaacagtttctttctgaaacagagaaaatgtcccctgaagacagagcaaaatgctttgaaaagaatgaggccatacaggcagcccatgatgccgtggcacaggaaggccaatgtcgggtagatgacaaggtgaatttccattttattctgtttaacaacgtggatggccacctctatgaacttgatggacgaatgccttttccggtgaaccatggcgccagttcagaggacaccctgctgaaggacgctgccaaggtctgcagagaattcaccgagcgtgagcaaggagaagtccgcttctctgccgtggctctctgcaaggcagcctaatgctctgtgggagggactttgctgatttcccctcttcccttcaacatgaaaatatatacccccccatgcagtctaaaatgcttcagtacttgtgaaacacagctgttcttctgttctgcagacacgccttcccctcagccacacccaggcacttaagcacaagcagagtgcacagctgtccactgggccattgtggtgtgagcttcagatggtgaagcattctccccagtgtatgtcttgtatccgatatctaacgctttaaatggctactttggtttctgtctgtaagttaagaccttggatgtggtttaattgtttgtcctcaaaaggaataaaacttttctgctgataagatanaaaaaaaaaagagccaaagctaagacccccgaaaccagacgagnagaaaacgacaacggcatcatnacaacaaccacaccgccaccaggaaagcctgtcctattctagtcaagcacctagggataggcatgcaaattgataacaaaaacaaaagattacaaaactggga

SEQ ID NO: 326393 - DNA, 1070 bp, Homo sapiens
gggctaggtacgaggctgggtggtggcgggcgctccgcgaagatgcagctcaagccgatggagatcaaccccgagatgctgaacaaagtgctgtcccggctgggggtcgccggccagtggcgcttcgtggacgtgctggggctggaagaggagtctctgggctcggtgccagcgcctgcctgcgcgctgctgctgctgtttcccctcacggcccagcatgagaacttcaggaaaaagcagattgaagagctgaagggacaagaagttagtcctaaagtgtacttcatgaagcagaccattgggaattcctgtggcacaatcggacttattcacgcagtggccaataatcaagacaaactgggatttgaggatggatcagttctgaaacagtttctttctgaaacagagaaaatgtcccctgaagacagagcaaaatgctttgaaaagaatgaggccatacaggcagcccatgatgccgtggcacaggaaggccaatgtcgggtagatgacaaggtgaatttccattttattctgtttaacaacgtggatggccacctctatgaacttgatggacgaatgccttttccggtgaaccatggcgccagttcagaggacaccctgctgaaggacgctgccaaggtctgcagagaattcaccgagcgtgagcaaggagaagtccgcttctctgccgtggctctctgcaaggcagcctaatgctctgtgggagggactttgctgatttcccctcttcccttcaacatgaaaatatatacccccccatgcagtctaaaatgcttcagtacttgtgaaacacagctgttcttctgttctgcagacacgccttcccctcagccacacccaggcacttaagcacaagcagagtgcacagctgtccactgggccattgtggtgtgagcttcagatggtgaagcattctccccagtgtatgtcttgtatccgatatctaacgctttaaatggctactttggtttctgtctgtaagttaagaccttggatgtggtttaattgtttgtcctcaaaaggaataaaacttttctgctgataagata

SEQ ID NO: 326394 - DNA, 1022 bp, Homo sapiens
aggagaggagacatataggctaggtcgaggccgggtgctgtgctgtcccggctgggggtcgccggccagtggcgcttcgtggacgtgctggggctggaagaggagtctctgggctcggtgccagcgcctgcctgcgcgctgctgctgctgtttcccctcacggcccagcatgagaacttcaggaaaaagcagattgaagagctgaagggacaagaagttagtcctaaagtgtacttcatgaagcagaccattgggaattcctgtggcacaatcggacttattcacgcagtggccaataatcaagacaaactgggatttgaggatggatcagttctgaaacagtttctttctgaaacagagaaaatgtcccctgaagacagagcaaaatgctttgaaaagaatgaggccatacaggcagcccatgatgccgtggcacaggaaggccaatgtcgggtagatgacaaggtgaatttccattttattctgtttaacaacgtggatggccacctctatgaacttgatggacgaatgccttttccggtgaaccatggcgccagttcagaggacaccctgctgaaggacgctgccaaggtctgcagagaattcaccgagcgtgagcaaggagaagtccgcttctctgccgtggctctctgcaaggcagcctaatgctctgtgggagggactttgctgatttcccctcttcccttcaacatgaaaatatatacccccccatgcagtctaaaatgcttcagtacttgtgaaacacagctgttcttctgttctgcagacacgccttcccctcagccacacccaggcacttaagcacaagcagagtgcacagctgtccactgggccattgtggtgtgagcttcagatggtgaagcattctccccagtgtatgtcttgtatccgatatctaacgctttaaatggctactttggtttctgtctgtaagttaagaccttggatgtggtttaattgtttgtcctcaaaaggaataaaacttttctgctgataagata

SEQ ID NO: 326395 - DNA, 1012 bp, Homo sapiens
accacgcgtcgcccacgcgtcggaacaaagtgctgtcccggctgggggtcgccggccagtggcgcttcgtggacgtgctggggctggaagaggagtctctgggctcggtgccagcgcctgcctgcgcgctgctgctgctgtttcccctcacggcccagcatgagaacttcaggaaaaagcagattgaagagctgaagggacaagaagttagtcctaaagtgtacttcatgaagcagaccattgggaattcctgtggcacaatcggacttattcacgcagtggccaataatcaagacaaactgggatttgaggatggatcagttctgaaacagtttctttctgaaacagagaaaatgtcccctgaagacagagcaaaatgctttgaaaagaatgaggccatacaggcagcccatgatgccgtggcacaggaaggccaatgtcgggtagatgacaaggtgaatttccattttattctgtttaacaacgtggatggccacctctatgaacttgatggacgaatgccttttccggtgaaccatggcgccagttcagaggacaccctgctgaaggacgctgccaaggtctgcagagaattcaccgagcgtgagcaaggagaagtccgcttctctgccgtggctctctgcaaggcagcctaatgctctgtgggagggactttgctgatttcccctcttcccttcaacatgaaaatatatacccccccatgcagtctaaaatgcttcagtacttgtgaaacacagctgttcttctgttctgcagacacgccttcccctcagccacacccaggcacttaagcacaagcagagtgcacagctgtccactgggccattgtggtgtgagcttcagatggtgaagcattctccccagtgtatgtcttgtatccgatatctaacgctttaaatggctactttggtttctgtctgtaagttaagaccttggatgtggtttaattgtttgtcctcaaaaggaataaaacttttctgctgataagata

SEQ ID NO: 326396 - DNA, 1136 bp, Homo sapiens
  misc_feature (39)..(39): n is a, c, g, or t
aacaaacaaccaactaggctaggtacgaggccgggggtnaatcggccgaggagtgcgtctggccggcgctttatagctgcagcctgggcggctccgctagctgtttttcgtcttcttcgtcttccctaggctatttctgccgggcgctccgcgaagatgcagctcaagccgatggagatcaaccccgagatgctgaacaaagtgctgtcccggctgggggtcgccggccagtggcgcttcgtggacgtgctggggctggaagaggagtctctgggctcggtgccagcgcctgcctgcgcgctgctgctgctgtttcccctcacggcccagcatgagaacttcaggaaaaagcagattgaagagctgaagggacaagaagttagtcctaaagtgtacttcatgaagcagaccattgggaattcctgtggcacaatcggacttattcacgcagtggccaataatcaagacaaactgggatttgaggatggatcagttctgaaacagtttctttctgaaacagagaaaatgtcccctgaagacagagcaaaatgctttgaaaagaatgaggtagatgacaaggtgaatttccattttattctgtttaacaacgtggatggccacctctatgaacttgatggacgaatgccttttccggtgaaccatggcgccagttcagaggacaccctgctgaaggacgctgccaaggtctgcagagaattcaccgagcgtgagcaaggagaagtccgcttctctgccgtggctctctgcaaggcagcctaatgctctgtgggagggactttgctgatttcccctcttcccttcaacatgaaaatatatacccccccatgcagtctaaaatgcttcagtacttgtgaaacacagctgttcttctgttctgcagacacgccttcccctcagccacacccaggcacttaagcacaagcagagtgcacagctgtccactgggccattgtggtgtgagcttcagatggtgaagcattctccccagtgtatgtcttgtatccgatatctaacgctttaaatggctactttggtttctgtctgtaagttaagaccttggatgtggtttaattgtttgtcctcaaaaggaataaaacttttctgctgataagata

SEQ ID NO: 326397 - DNA, 1414 bp, Homo sapiens
  misc_feature (39)..(39): n is a, c, g, or t
aacaaacaaccaactaggctaggtacgaggccgggggtnaatcggccgaggagtgcgtctggccggcgctttatagctgcagcctgggcggctccgctagctgtttttcgtcttcttcgtcttccctaggctatttctgccgggcgctccgcgaagatgcagctcaagccgatggagatcaaccccgagatgctgaacaaaccaggtgcaccgctacccggagagcgcgaggccgagggagggggagccgagtcgctgatcggttcggttttgcctttttctttgcatttgcctttcagatgctgaacaaagtgagtggcgtctcgcgccgtctctggccccctcccccgcgagcgccgaggcgggggcgcccaccggttccggctgctggcagggaccaagccgcccgctgcgagcaccggagacggccgggctggggcgtgggctgggcgcctttcctgggcccctgcatttagcgggtgctgtcccggctgggggtcgccggccagtggcgcttcgtggacgtgctggggctggaagaggagtctctgggctcggtgccagcgcctgcctgcgcgctgctgctgctgtttcccctcacggcccagcatgagaacttcaggaaaaagcagattgaagagctgaagggacaagaagttagtcctaaagtgtacttcatgaagcagaccattgggaattcctgtggcacaatcggacttattcacgcagtggccaataatcaagacaaactgggatttgaggatggatcagttctgaaacagtttctttctgaaacagagaaaatgtcccctgaagacagagcaaaatgctttgaaaagaatgaggtagatgacaaggtgaatttccattttattctgtttaacaacgtggatggccacctctatgaacttgatggacgaatgccttttccggtgaaccatggcgccagttcagaggacaccctgctgaaggacgctgccaaggtctgcagagaattcaccgagcgtgagcaaggagaagtccgcttctctgccgtggctctctgcaaggcagcctaatgctctgtgggagggactttgctgatttcccctcttcccttcaacatgaaaatatatacccccccatgcagtctaaaatgcttcagtacttgtgaaacacagctgttcttctgttctgcagacacgccttcccctcagccacacccaggcacttaagcacaagcagagtgcacagctgtccactgggccattgtggtgtgagcttcagatggtgaagcattctccccagtgtatgtcttgtatccgatatctaacgctttaaatggctactttggtttctgtctgtaagttaagaccttggatgtggtttaattgtttgtcctcaaaaggaataaaacttttctgctgataagata

SEQ ID NO: 326398 - DNA, 1076 bp, Homo sapiens
  misc_feature (39)..(39): n is a, c, g, or t
aacaaacaaccaactaggctaggtacgaggccgggggtnaatcggccgaggagtgcgtctggccggcgctttatagctgcagcctgggcggctccgctagctgtttttcgtcttcttcgtcttccctaggctatttctgccgggcgctccgcgaagatgcagctcaagccgatggagatcaaccccgagatgctgaacaaaatgctgaacaaagtgagtggcgtctcgcgccgtctctggccccctcccccgcgagcgccgaggcgggggcgcccaccggttccggctgctggcagggaccaagccgcccgctgcgagcaccggagacggccgggctggggcgtgggctgggcgcctttcctgggcccctgcatttagcgggtgactctacgaaaccggtcacggggagacggagggggctgcgccccgtggcgagcgagcgccaggcggagctcccgagggcgtggcgcgggcagcacagactcggctgcacgggcttcgcgggcgccacgtgtgggccgcgctttgtgctgtgtcattgcgccggcccgggtgggggtggcagggcgggactggggctcctcccaggctcgggtgcgggcgcggagggcgcgcgcctcctggccccgccccctggcaggtgcccgcgacccgcgtgtccccgtgcgcctggccgccttgtctcctctccgcaggtgctgtcccggctgggggtcgccggccagtggcgcttcgtggacgtgctggggctggaagaggagtctctgggctcggtgccagcgcctgcctgcgcgctgctgctgctgtttcccctcacggcccagcatgagaacttcaggaaaaagcagattgaagagctgaagggacaagaagttagtcctaaagtgtacttcatgaagcagaccattgggaattcctgtggcacaatcggacttattcacgcacccagtgtatgtcttgtatccgatatctaacgctttaaatggctactttggtttctgtctgtaagttaagaccttggatgtggtttaattgtttgtcctcaaaaggaataaaacttttctgctgataagata

SEQ ID NO: 326399 - DNA, 835 bp, Homo sapiens
  misc_feature (798)..(798): n is a, c, g, or t
  misc_feature (811)..(811): n is a, c, g, or t
  misc_feature (835)..(835): n is a, c, g, or t
cttctcgctttgtttcttctctgtctttcttatccactcttcgtcttccctaggctatttctgccgggcgctccgcgaagatgcagctcaagccgatggagatcaaccccgagatgctgaacaaaggcgtggcgcgggcagcacagactcggctgcacgggcttcgcgggcgccacgtgtgggccgcgctttgtgctgtgtcattgcgccggcccgggtgggggtggcagggcgggactggggctcctcccaggctcgggtgcgggcgcggagggcgcgcgcctcctggccccgccccctggcaggtgcccgcgacccgcgtgtccccgtgcgcctggccgccttgtctcctctccgcaggtgctgtcccggctgggggtcgccggccagtggcgcttcgtggacgtgctggggctggaagaggagtctctgggctcggtgccagcgcctgcctgcgcgctgctgctgctgtttcccctcacggcccagcatgagaacttcaggaaaaagcagattgaagagctgaagggacaagaagttagtcctaaagtgtacttcatgaagcagaccattgggaattcctgtggcacaatcggacttattcacgcagtggccaataatcaagacaaactgggatttgaggatggatcagttctgaaacagtttctttctgaaacagagaaaatgtcccctgaagacagagcaaaatgctttgaaaagaatgagcatacaggcagccatatccgttgcaaagaaggcaattcggtaatcaatcaatcgagcaagtctggtcacttntcataattcaganctatgaaacaatttcacagcaatn

SEQ ID NO: 326400 - DNA, 265 bp, Homo sapiens
tcgagctctgtaccccccgactagcccgaagcacgccttcccctcagccacacccaggcacttaagcacaagcagagtgcacagctgtccactgggccattgtggtgtgagcttcagatggtgaagcattctccccagtgtatgtcttgtatccgatatctaacgctttaaatggctactttggtttctgtctgtaagttaagaccttggatgtggtttaattgtttgtcctcaaaaggaataaaacttttctgctgataagata

SEQ ID NO: 326401 - DNA, 1028 bp, Homo sapiens
aaggcagtagaggcggtgggaattggcagagggctgaacaaagtgctgtcccggctgggggtcgccggccagtggcgcttcgtggacgtgctggggctggaagaggagtctctgggctcggtgccagcgcctgcctgcgcgctgctgctgctgtttcccctcacggcccagcatgagaacttcaggaaaaagcagattgaagagctgaagggacaagaagttagtcctaaagtgtacttcatgaagcagaccattgggaattcctgtggcacaatcggacttattcacgcagtggccaataatcaagacaaactgggatttgaggatggatcagttctgaaacagtttctttctgaaacagagaaaatgtcccctgaagacagagcaaaatgctttgaaaagaatgaggccatacaggcagcccatgatgccgtggcacaggaaggccaatgtcgggtagatgacaaggtgaatttccattttattctgtttaacaacgtggatggccacctctatgaacttgatggacgaatgccttttccggtgaaccatggcgccagttcagaggacaccctgctgaaggacgctgccaaggtctgcagagaattcaccgagcgtgagcaaggagaagtccgcttctctgccgtggctctctgcaaggcagcctaatgctctgtgggagggactttgctgatttcccctcttcccttcaacatgaaaatatatacccccccatgcagtctaaaatgcttcagtacttgtgaaacacagctgttcttctgttctgcagacacgccttcccctcagccacacccaggcacttaagcacaagcagagtgcacagctgtccactgggccattgtggtgtgagcttcagatggtgaagcattctccccagtgtatgtcttgtatccgaattaaggttaaggatgggttggctgcagtaacgggggggatggggccaggaaattgggtgaaaaaaaagggtttggggaagaagaggatcttaagggggcagttggaaggct

SEQ ID NO: 326402 - DNA, 1184 bp, Homo sapiens
  misc_feature (39)..(39): n is a, c, g, or t
aacaaacaaccaactaggctaggtacgaggccgggggtnaatcggccgaggagtgcgtctggccggcgctttatagctgcagcctgggcggctccgctagctgtttttcgtcttcttcgtcttccctaggctatttctgccgggcgctccgcgaagatgcagctcaagccgatggagatcaaccccgagatgctgaacaaagtgctgtcccggctgggggtcgccggccagtggcgcttcgtggacgtgctggggctggaagaggagtctctgggctcggtgccagcgcctgcctgcgcgctgctgctgctgtttcccctcacggcccagcatgagaacttcaggaaaaagcagattgaagagctgaagggacaagaagttagtcctaaagtgtacttcatgaagcagaccattgggaattcctgtggcacaatcggacttattcacgcagtggccaataatcaagacaaactgggatttgaggatggatcagttctgaaacagtttctttctgaaacagagaaaatgtcccctgaagacagagcaaaatgctttgaaaagaatgaggccatacaggcagcccatgatgccgtggcacaggaaggccaatgtcgggtagatgacaaggtgaatttccattttattctgtttaacaacgtggatggccacctctatgaacttgatggacgaatgccttttccggtgaaccatggcgccagttcagaggacaccctgctgaaggacgctgccaaggtctgcagagaattcaccgagcgtgagcaaggagaagtccgcttctctgccgtggctctctgcaaggcagcctaatgctctgtgggagggactttgctgatttcccctcttcccttcaacatgaaaatatatacccccccatgcagtctaaaatgcttcagtacttgtgaaacacagctgttcttctgttctgcagacacgccttcccctcagccacacccaggcacttaagcacaagcagagtgcacagctgtccactgggccattgtggtgtgagcttcagatggtgaagcattctccccagtgtatgtcttgtatccgatatctaacgctttaaatggctactttggtttctgtctgtaagttaagaccttggatgtggtttaattgtttgtcctcaaaaggaataaaacttttctgctgataagata

SEQ ID NO: 326403 - DNA, 1108 bp, Homo sapiens
cttctcgctttgtttcttctctgtctttcttatccactcttcgtcttccctaggctatttctgccgggcgctccgcgaagatgcagctcaagccgatggagatcaaccccgagatgctgaacaaagtgctgtcccggctgggggtcgccggccagtggcgcttcgtggacgtgctggggctggaagaggagtctctgggctcggtgccagcgcctgcctgcgcgctgctgctgctgtttcccctcacggcccagcatgagaacttcaggaaaaagcagattgaagagctgaagggacaagaagttagtcctaaagtgtacttcatgaagcagaccattgggaattcctgtggcacaatcggacttattcacgcagtggccaataatcaagacaaactgggatttgaggatggatcagttctgaaacagtttctttctgaaacagagaaaatgtcccctgaagacagagcaaaatgctttgaaaagaatgaggccatacaggcagcccatgatgccgtggcacaggaaggccaatgtcgggtagatgacaaggtgaatttccattttattctgtttaacaacgtggatggccacctctatgaacttgatggacgaatgccttttccggtgaaccatggcgccagttcagaggacaccctgctgaaggacgctgccaaggtctgcagagaattcaccgagcgtgagcaaggagaagtccgcttctctgccgtggctctctgcaaggcagcctaatgctctgtgggagggactttgctgatttcccctcttcccttcaacatgaaaatatatacccccccatgcagtctaaaatgcttcagtacttgtgaaacacagctgttcttctgttctgcagacacgccttcccctcagccacacccaggcacttaagcacaagcagagtgcacagctgtccactgggccattgtggtgtgagcttcagatggtgaagcattctccccagtgtatgtcttgtatccgatatctaacgctttaaatggctactttggtttctgtctgtaagttaagaccttggatgtggtttaattgtttgtcctcaaaaggaataaaacttttctgctgataagata

SEQ ID NO: 326404 - DNA, 1407 bp, Homo sapiens
accgtccgtttccccctcgcttggttctgcccctgctccccctgcacaggcctcacagtgcgtctggccggcgctttatagctgcagcctgggcggctccgctagctgtttttcgtcttcttcgtcttccctaggctatttctgccgggcgctccgcgaagatgcagctcaagccgatggagatcaaccccgagatgctgaacaaagtgctgtcccggctgggggtcgccggccagtggcgcttcgtggacgtgctggggctggaagaggagtctctgggctcggtgccagcgcctgcctgcgcgctgctgctgctgtttcccctcacggcccagcatgagaacttcaggaaaaagcagattgaagagctgaagggacaagaagttagtcctaaagtgtacttcatgaagcagaccattgggaattcctgtggcacaatcggacttattcacgcagtggccaataatcaagacaaactgggatttgaggatggatcagttctgaaacagtttctttctgaaacagagaaaatgtcccctgaagacagagcaaaatgctttgaaaagaatgaggccatacaggcagcccatgatgccgtggcacaggaaggccaatgtcgggtagatgacaaggtgaatttccattttattctgtttaacaacgtggatggccacctctatgaacttgatggacgaatgccttttccggtgaaccatggcgccagttcagaggacaccctgctgaaggacgctgccaaggtctgcagagaattcaccgagcgtgagcaaggagaagtccgcttctctgccgtggctctctgcaaggcagcctaatgctctgtgggagggactttgctgatttcccctcttcccttcaacatgaaaatatatacccccccatgcagtctaaaatgcttcagtacttgtgaaacacagctgttcttctgttctgcagacacgccttcccctcagccacacccaggcacttaagcacaagcagagtgcacagctgtccactgggccattgtggtgtgagcttcagatggtgaagcattctccccagtgtatgtcttgtatccgatatctaacgctttaaatggctactttggtttctgtctgtaagttaagaccttggatgtggtttaattgtttgtcctcaaaaggaataaaacttttctgctgataagataaaaaaaaacaacacaacacaaacacaccacaaacaacaacacaaaagtcaaacaaagcgaccaacaaagaacccgccacaaaatctctcccccgccgggaagaaaagacgagggtcctaaagaagagaggccccccccccggaaaaaggggggcacccacaaacaaagggaacacacaagaggaggcgcggaggggcccacggaaaaacaggggggca

SEQ ID NO: 326405 - DNA, 1263 bp, Homo sapiens
accgtccgtttccccctcgcttggttctgcccctgctccccctgcacaggcctcacagtgcgtctggccggcgctttatagctgcagcctgggcggctccgctagctgtttttcgtcttcttcgtcttccctaggctatttctgccgggcgctccgcgaagatgcagctcaagccgatggagatcaaccccgagatgctgaacaaagtgctgtcccggctgggggtcgccggccagtggcgcttcgtggacgtgctggggctggaagaggagtctctgggctcggtgccagcgcctgcctgcgcgctgctgctgctgtttcccctcacggcccagcatgagaacttcaggaaaaagcagattgaagagctgaagggacaagaagttagtcctaaagtgtacttcatgaagcagaccattgggaattcctgtggcacaatcggacttattcacgcagtggccaataatcaagacaaactgggatttgaggatggatcagttctgaaacagtttctttctgaaacagagaaaatgtcccctgaagacagagcaaaatgctttgaaaagaatgaggccatacaggcagcccatgatgccgtggcacaggaaggccaatgtcgggtagatgacaaggtgaatttccattttattctgtttaacaacgtggatggccacctctatgaacttgatggacgaatgccttttccggtgaaccatggcgccagttcagaggacaccctgctgaaggacgctgccaaggtctgcagagaattcaccgagcgtgagcaaggagaagtccgcttctctgccgtggctctctgcaaggcagcctaatgctctgtgggagggactttgctgatttcccctcttcccttcaacatgaaaatatatacccccccatgcagtctaaaatgcttcagtacttgtgaaacacagctgttcttctgttctgcagacacgccttcccctcagccacacccaggcacttaagcacaagcagagtgcacagctgtccactgggccattgtggtgtgagcttcagatggtgaagcattctccccagtgtatgtcttgtatccgatatctaacgctttaaatggctactttggtttctgtctgtaagttaagaccttggatgtggtttaattgtttgtcctcaaaaggaataaaacttttctgctgataagataagccacagctgattctcattttcttttaccctctcctcaatatgtcaggttattttggtagtaatatatgaatg

SEQ ID NO: 326406 - DNA, 1192 bp, Homo sapiens
accgtccgtttccccctcgcttggttctgcccctgctccccctgcacaggcctcacagtgcgtctggccggcgctttatagctgcagcctgggcggctccgctagctgtttttcgtcttcttcgtcttccctaggctatttctgccgggcgctccgcgaagatgcagctcaagccgatggagatcaaccccgagatgctgaacaaagtgctgtcccggctgggggtcgccggccagtggcgcttcgtggacgtgctggggctggaagaggagtctctgggctcggtgccagcgcctgcctgcgcgctgctgctgctgtttcccctcacggcccagcatgagaacttcaggaaaaagcagattgaagagctgaagggacaagaagttagtcctaaagtgtacttcatgaagcagaccattgggaattcctgtggcacaatcggacttattcacgcagtggccaataatcaagacaaactgggatttgaggatggatcagttctgaaacagtttctttctgaaacagagaaaatgtcccctgaagacagagcaaaatgctttgaaaagaatgaggccatacaggcagcccatgatgccgtggcacaggaaggccaatgtcgggtagatgacaaggtgaatttccattttattctgtttaacaacgtggatggccacctctatgaacttgatggacgaatgccttttccggtgaaccatggcgccagttcagaggacaccctgctgaaggacgctgccaaggtctgcagagaattcaccgagcgtgagcaaggagaagtccgcttctctgccgtggctctctgcaaggcagcctaatgctctgtgggagggactttgctgatttcccctcttcccttcaacatgaaaatatatacccccccatgcagtctaaaatgcttcagtacttgtgaaacacagctgttcttctgttctgcagacacgccttcccctcagccacacccaggcacttaagcacaagcagagtgcacagctgtccactgggccattgtggtgtgagcttcagatggtgaagcattctccccagtgtatgtcttgtatccgaattaaggttaaggatgggttggctgcagtaacgggggggatggggccaggaaattgggtgaaaaaaaagggtttggggaagaagaggatcttaagggggcagttggaaggct

SEQ ID NO: 326407 - DNA, 1678 bp, Homo sapiens
  misc_feature (39)..(39): n is a, c, g, or t
aacaaacaaccaactaggctaggtacgaggccgggggtnaatcggccgaggagtgcgtctggccggcgctttatagctgcagcctgggcggctccgctagctgtttttcgtcttcttcgtcttccctaggctatttctgccgggcgctccgcgaagatgcagctcaagccgatggagatcaaccccgagatgctgaacaaaatgctgaacaaagtgagtggcgtctcgcgccgtctctggccccctcccccgcgagcgccgaggcgggggcgcccaccggttccggctgctggcagggaccaagccgcccgctgcgagcaccggagacggccgggctggggcgtgggctgggcgcctttcctgggcccctgcatttagcgggtgactctacgaaaccggtcacggggagacggagggggctgcgccccgtggcgagcgagcgccaggcggagctcccgagggcgtggcgcgggcagcacagactcggctgcacgggcttcgcgggcgccacgtgtgggccgcgctttgtgctgtgtcattgcgccggcccgggtgggggtggcagggcgggactggggctcctcccaggctcgggtgcgggcgcggagggcgcgcgcctcctggccccgccccctggcaggtgcccgcgacccgcgtgtccccgtgcgcctggccgccttgtctcctctccgcaggtgctgtcccggctgggggtcgccggccagtggcgcttcgtggacgtgctggggctggaagaggagtctctgggctcggtgccagcgcctgcctgcgcgctgctgctgctgtttcccctcacggcccagcatgagaacttcaggaaaaagcagattgaagagctgaagggacaagaagttagtcctaaagtgtacttcatgaagcagaccattgggaattcctgtggcacaatcggacttattcacgcagtggccaataatcaagacaaactgggatttgaggatggatcagttctgaaacagtttctttctgaaacagagaaaatgtcccctgaagacagagcaaaatgctttgaaaagaatgaggccatacaggcagcccatgatgccgtggcacaggaaggccaatgtcgggtagatgacaaggtgaatttccattttattctgtttaacaacgtggatggccacctctatgaacttgatggacgaatgccttttccggtgaaccatggcgccagttcagaggacaccctgctgaaggacgctgccaaggtctgcagagaattcaccgagcgtgagcaaggagaagtccgcttctctgccgtggctctctgcaaggcagcctaatgctctgtgggagggactttgctgatttcccctcttcccttcaacatgaaaatatatacccccccatgcagtctaaaatgcttcagtacttgtgaaacacagctgttcttctgttctgcagacacgccttcccctcagccacacccaggcacttaagcacaagcagagtgcacagctgtccactgggccattgtggtgtgagcttcagatggtgaagcattctccccagtgtatgtcttgtatccgatatctaacgctttaaatggctactttggtttctgtctgtaagttaagaccttggatgtggtttaattgtttgtcctcaaaaggaataaaacttttctgctgataagata

SEQ ID NO: 326408 - DNA, 1136 bp, Homo sapiens
accgtccgtttccccctcgcttggttctgcccctgctccccctgcacaggcctcacagtgcgtctggccggcgctttatagctgcagcctgggcggctccgctagctgtttttcgtcttcttcgtcttccctaggctatttctgccgggcgctccgcgaagatgcagctcaagccgatggagatcaaccccgagatgctgaacaaagtgctgtcccggctgggggtcgccggccagtggcgcttcgtggacgtgctggggctggaagaggagtctctgggctcggtgccagcgcctgcctgcgcgctgctgctgctgtttcccctcacggcccagcatgagaacttcaggaaaaagcagattgaagagctgaagggacaagaagttagtcctaaagtgtacttcatgaagcagaccattgggaattcctgtggcacaatcggacttattcacgcagtggccaataatcaagacaaactgggatttgaggatggatcagttctgaaacagtttctttctgaaacagagaaaatgtcccctgaagacagagcaaaatgctttgaaaagaatgaggccatacaggcagcccatgatgccgtggcacaggaaggccaatgtcgggtagatgacaaggtgaatttccattttattctgtttaacaacgtggatggccacctctatgaacttgatggacgaatgccttttccggtgaaccatggcgccagttcagaggacaccctgctgaaggacgctgccaaggtctgcagagaattcaccgagcgtgagcaaggagaagtccgcttctctgccgtggctctctgcaaggcagcctaatgctctgtgggagggactttgctgatttcccctcttcccttcaacatgaaaatatatacccccccatgcagtgccttcccctcagccacacccaggcacttaagcacaagcagagtgcacagctgtccactgggccattgtggtgtgagcttcagatggtgaagcattctccccagtgtatgtcttgtatccgatatctaacgctttaaatggctactttggtttctgtctgtaagttaagaccttggatgtggtttaattgtttgtcctcaaaaggaataaaacttttctgctgataagata

SEQ ID NO: 326409 - DNA, 1557 bp, Homo sapiens
cttctcgctttgtttcttctctgtctttcttatccactcttcgtcttccctaggctatttctgccgggcgctccgcgaagatgcagctcaagccgatggagatcaaccccgagatgctgaacaaaatgctgaacaaagtgagtggcgtctcgcgccgtctctggccccctcccccgcgagcgccgaggcgggggcgcccaccggttccggcgggctggggcgtgggctgggcgcctttcctgggcccctgcatttagcgggtgactctacgaaaccggtcacggggagacggagggggctgcgccccgtggcgagcgagcgccaggcggagctcccgagggcgtggcgcgggcagcacagactcggctgcacgggcttcgcgggcgccacgtgtgggccgcgctttgtgctgtgtcattgcgccggcccgggtgggggtggcagggcgggactggggctcctcccaggctcgggtgcgggcgcggagggcgcgcgcctcctggccccgccccctggcaggtgcccgcgacccgcgtgtccccgtgcgcctggccgccttgtctcctctccgcaggtgctgtcccggctgggggtcgccggccagtggcgcttcgtggacgtgctggggctggaagaggagtctctgggctcggtgccagcgcctgcctgcgcgctgctgctgctgtttcccctcacggcccagcatgagaacttcaggaaaaagcagattgaagagctgaagggacaagaagttagtcctaaagtgtacttcatgaagcagaccattgggaattcctgtggcacaatcggacttattcacgcagtggccaataatcaagacaaactgggatttgaggatggatcagttctgaaacagtttctttctgaaacagagaaaatgtcccctgaagacagagcaaaatgctttgaaaagaatgaggccatacaggcagcccatgatgccgtggcacaggaaggccaatgtcgggtagatgacaaggtgaatttccattttattctgtttaacaacgtggatggccacctctatgaacttgatggacgaatgccttttccggtgaaccatggcgccagttcagaggacaccctgctgaaggacgctgccaaggtctgcagagaattcaccgagcgtgagcaaggagaagtccgcttctctgccgtggctctctgcaaggcagcctaatgctctgtgggagggactttgctgatttcccctcttcccttcaacatgaaaatatatacccccccatgcagtctaaaatgcttcagtacttgtgaaacacagctgttcttctgttctgcagacacgccttcccctcagccacacccaggcacttaagcacaagcagagtgcacagctgtccactgggccattgtggtgtgagcttcagatggtgaagcattctccccagtgtatgtcttgtatccgatatctaacgctttaaatggctactttggtttctgtctgtaagttaagaccttggatgtggtttaattgtttgtcctcaaaaggaataaaacttttctgctgataagata

SEQ ID NO: 326410 - DNA, 1462 bp, Homo sapiens
  misc_feature (39)..(39): n is a, c, g, or t
aacaaacaaccaactaggctaggtacgaggccgggggtnaatcggccgaggagtgcgtctggccggcgctttatagctgcagcctgggcggctccgctagctgtttttcgtcttcttcgtcttccctaggctatttctgccgggcgctccgcgaagatgcagctcaagccgatggagatcaaccccgagatgctgaacaaaccaggtgcaccgctacccggagagcgcgaggccgagggagggggagccgagtcgctgatcggttcggttttgcctttttctttgcatttgcctttcagatgctgaacaaagtgagtggcgtctcgcgccgtctctggccccctcccccgcgagcgccgaggcgggggcgcccaccggttccggctgctggcagggaccaagccgcccgctgcgagcaccggagacggccgggctggggcgtgggctgggcgcctttcctgggcccctgcatttagcgggtgctgtcccggctgggggtcgccggccagtggcgcttcgtggacgtgctggggctggaagaggagtctctgggctcggtgccagcgcctgcctgcgcgctgctgctgctgtttcccctcacggcccagcatgagaacttcaggaaaaagcagattgaagagctgaagggacaagaagttagtcctaaagtgtacttcatgaagcagaccattgggaattcctgtggcacaatcggacttattcacgcagtggccaataatcaagacaaactgggatttgaggatggatcagttctgaaacagtttctttctgaaacagagaaaatgtcccctgaagacagagcaaaatgctttgaaaagaatgaggccatacaggcagcccatgatgccgtggcacaggaaggccaatgtcgggtagatgacaaggtgaatttccattttattctgtttaacaacgtggatggccacctctatgaacttgatggacgaatgccttttccggtgaaccatggcgccagttcagaggacaccctgctgaaggacgctgccaaggtctgcagagaattcaccgagcgtgagcaaggagaagtccgcttctctgccgtggctctctgcaaggcagcctaatgctctgtgggagggactttgctgatttcccctcttcccttcaacatgaaaatatatacccccccatgcagtctaaaatgcttcagtacttgtgaaacacagctgttcttctgttctgcagacacgccttcccctcagccacacccaggcacttaagcacaagcagagtgcacagctgtccactgggccattgtggtgtgagcttcagatggtgaagcattctccccagtgtatgtcttgtatccgatatctaacgctttaaatggctactttggtttctgtctgtaagttaagaccttggatgtggtttaattgtttgtcctcaaaaggaataaaacttttctgctgataagata

SEQ ID NO: 326411 - DNA, 1218 bp, Homo sapiens
accgtccgtttccccctcgcttggttctgcccctgctccccctgcacaggcctcacagtgcgtctggccggcgctttatagctgcagcctgggcggctccgctagctgtttttcgtcttcttcgtcttccctaggctatttctgccgggcgctccgcgaagatgcagctcaagccgatggagatcaaccccgagatgctgaacaaagtgctgtcccggctgggggtcgccggccagtggcgcttcgtggacgtgctggggctggaagaggagtctctgggctcggtgccagcgcctgcctgcgcgctgctgctgctgtttcccctcacggcccagcatgagaacttcaggaaaaagcagattgaagagctgaagggacaagaagttagtcctaaagtgtacttcatgaagcagaccattgggaattcctgtggcacaatcggacttattcacgcagtggccaataatcaagacaaactgggatttgaggatggatcagttctgaaacagtttctttctgaaacagagaaaatgtcccctgaagacagagcaaaatgctttgaaaagaatgaggccatacaggcagcccatgatgccgtggcacaggaaggccaatgtcgggtagatgacaaggtgaatttccattttattctgtttaacaacgtggatggccacctctatgaacttgatggacgaatgccttttccggtgaaccatggcgccagttcagaggacaccctgctgaaggtcatctttggaatgcatctcttcttaatgacgctgccaaggtctgcagagaattcaccgagcgtgagcaaggagaagtccgcttctctgccgtggctctctgcaaggcagcctaatgctctgtgggagggactttgctgatttcccctcttcccttcaacatgaaaatatatacccccccatgcagtctaaaatgcttcagtacttgtgaaacacagctgttcttctgttctgcagacacgccttcccctcagccacacccaggcacttaagcacaagcagagtgcacagctgtccactgggccattgtggtgtgagcttcagatggtgaagcattctccccagtgtatgtcttgtatccgatatctaacgctttaaatggctactttggtttctgtctgtaagttaagaccttggatgtggtttaattgtttgtcctcaaaaggaataaaacttttctgctgataagata

SEQ ID NO: 326412 - DNA, 1058 bp, Homo sapiens
  misc_feature (39)..(39): n is a, c, g, or t
aacaaacaaccaactaggctaggtacgaggccgggggtnaatcggccgaggagtgcgtctggccggcgctttatagctgcagcctgggcggctccgctagctgtttttcgtcttcttcgtcttccctaggctatttctgccgggcgctccgcgaagatgcagctcaagccgatggagatcaaccccgagatgctgaacaaagtgctgtcccggctgggggtcgccggccagtggcgcttcgtggacgtgctggggctggaagaggagtctctgggctcggtgccagcgcctgcctgcgcgctgctgctgctgtttcccctcacggcccagcatgagaacttcaggaaaaagcagattgaagagctgaagggacaagaagttagtcctaaagtgtacttcatgaagcagaccattgggaattcctgtggcacaatcggacttattcacgcagtggccaataatcaagacaaactgggatttgaggatggatcagttctgaaacagtttctttctgaaacagagaaaatgtcccctgaagacagagcaaaatgctttgaaaagaatgaggccatacaggcagcccatgatgccgtggcacaggaaggccaatgtcgggacgctgccaaggtctgcagagaattcaccgagcgtgagcaaggagaagtccgcttctctgccgtggctctctgcaaggcagcctaatgctctgtgggagggactttgctgatttcccctcttcccttcaacatgaaaatatatacccccccatgcagtctaaaatgcttcagtacttgtgaaacacagctgttcttctgttctgcagacacgccttcccctcagccacacccaggcacttaagcacaagcagagtgcacagctgtccactgggccattgtggtgtgagcttcagatggtgaagcattctccccagtgtatgtcttgtatccgatatctaacgctttaaatggctactttggtttctgtctgtaagttaagaccttggatgtggtttaattgtttgtcctcaaaaggaataaaacttttctgctgataagata

SEQ ID NO: 326413 - DNA, 648 bp, Homo sapiens
aatcaacctgcttggaatacgaatgaggccctgcggcgctcgtccatcatcttctgtgcatctggaatagccttggcgggtagatgacaaggtgaatttccattttattctgtttaacaacgtggatggccacctctatgaacttgatggacgaatgccttttccggtgaaccatggcgccagttcagaggacaccctgctgaaggacgctgccaaggtctgcagagaattcaccgagcgtgagcaaggagaagtccgcttctctgccgtggctctctgcaaggcagcctaatgctctgtgggagggactttgctgatttcccctcttcccttcaacatgaaaatatatacccccccatgcagtctaaaatgcttcagtacttgtgaaacacagctgttcttctgttctgcagacacgccttcccctcagccacacccaggcacttaagcacaagcagagtgcacagctgtccactgggccattgtggtgtgagcttcagatggtgaagcattctccccagtgtatgtcttgtatccgatatctaacgctttaaatggctactttggtttctgtctgtaagttaagaccttggatgtggtttaattgtttgtcctcaaaaggaataaaacttttctgctgataagata

SEQ ID NO: 326414 - DNA, 1006 bp, Homo sapiens
accgtccgtttccccctcgcttggttctgcccctgctccccctgcacaggcctcacagtgcgtctggccggcgctttatagctgcagcctgggcggctccgctagctgtttttcgtcttcttcgtcttccctaggctatttctgccgggcgctccgcgaagatgcagctcaagccgatggagatcaaccccgagatgctgaacaaagtgctgtcccggctgggggtcgccggccagtggcgcttcgtggacgtgctggggctggaagaggagtctctgggctcggtgccagcgcctgcctgcgcgctgctgctgctgtttcccctcacggcccagcatgagaacttcaggaaaaagcagattgaagagctgaagggacaagaagttagtcctaaagtgtacttcatgaagcagaccattgggaattcctgtggcacaatcggacttattcacgcagtggccaataatcaagacaaactgggatttgaggatggatcagttctgaaacagtttctttctgaaacagagaaaatgtcccctgaagacagagcaaaatgctttgaaaagaatgaggccatacaggcagcccatgatgccgtggcacaggaaggccaatgtcgggtagatgacaaggtgaatttccattttattctgtttaacaacgtggatggccacctctatgaacttgccttcaacatgaaaatatatacccccccatgcagtctaaaatgcttcagtacttgtgaaacacagctgttcttctgttctgcagacacgccttcccctcagccacacccaggcacttaagcacaagcagagtgcacagctgtccactgggccattgtggtgtgagcttcagatggtgaagcattctccccagtgtatgtcttgtatccgatatctaacgctttaaatggctactttggtttctgtctgtaagttaagaccttggatgtggtttaattgtttgtcctcaaaaggaataaaacttttctgctgataagata

SEQ ID NO: 326415 - DNA, 706 bp, Homo sapiens
  misc_feature (39)..(39): n is a, c, g, or t
aacaaacaaccaactaggctaggtacgaggccgggggtnaatcggccgaggagtgcgtctggccggcgctttatagctgcagcctgggcggctccgctagctgtttttcgtcttcttcgtcttccctaggctatttctgccgggcgctccgcgaagatgcagctcaagccgatggagatcaaccccgagatgctgaacaaagtgctgtcccggctgggggtcgccggccagtggcgcttcgtggacgtgctggggctggaagaggagtctctgggctcggtgccagcgcctgcctgcgcgctgctgctgctgtttcccctcacggcccagcatgagaacttcaggaaaaagcagattgaagagctgaagggacaagaagttagtcctaaagtgtacttcatgaagcagaccattgggaattcctgtggcacaatcggacttattcacgcagtggccaataatcaagacaaactgggatttgaggatggatcagttctgaaacagtttctttctgaaacagagaaaatgtccactgggccattgtggtgtgagcttcagatggtgaagcattctccccagtgtatgtcttgtatccgatatctaacgctttaaatggctactttggtttctgtctgtaagttaagaccttggatgtggtttaattgtttgtcctcaaaaggaataaaacttttctgctgataagata

SEQ ID NO: 326416 - DNA, 482 bp, Homo sapiens
  misc_feature (39)..(39): n is a, c, g, or t
aacaaacaaccaactaggctaggtacgaggccgggggtnaatcggccgaggcgaagatgcagctcaagccgatggagatcaaccccgagatgctgaacaaagtgctgtcccggctgggggtcgccggccagtggcgcttcgtggacgtgctggggctggaagaggagtctctgggctcggtgccagcgcctgcctgcgcgctgctgctgctgtttcccctcacggcccagcatgagaacttcaggaaaaagcagattgaagagctgaagggacaagaagttagtcctaaagtgtacttcatgaagcagaccattgggaattcctgtggcacaatcggacttattcacgcacccagtgtatgtcttgtatccgatatctaacgctttaaatggctactttggtttctgtctgtaagttaagaccttggatgtggtttaattgtttgtcctcaaaaggaataaaacttttctgctgataagata

SEQ ID NO: 326417 - DNA, 1683 bp, Homo sapiens
acgcagtctctctctctctccctcctccgggaggaactgccgcgctccggctgactcctccgccggcgggcggggcgggggagggggcttcgggcgcgctgggaaccgcgggacccggacctgggcgccgcccgccgggggacgcgcggcccccgcttccgccgggccccgctgagctctagacaaacctccgcttcagaaataggctgcgggcggccggctaggaggcttggcccccaccccgggacccccgccgtccccgggccggccggccggtgggcacgatgagccaggtgctggggaagccgcagccgcaggacgaggacgacgcggaggaggaggaggaggaggatgagctggtggggctagcggactacggagacgggcccgactcctccgacgccgatccggacagcggcacagaggagggagttctggacttcagtgaccccttcagcactgaagtgaagccgagaatcctgctcatgggcctgaggagaagcggcaagtcgtctattcagaaagttgtctttcacaaaatgtctcccaacgaaactctgttcttggagagcactaataagatatgccgggaagatgtttccaacagctcctttgtcaattttcagatttgggacttcccaggacagattgacttttttgaccctacatttgactatgagatgatcttccggggaacaggagcactgatatttgtcattgactcacaggatgattacatggaagccctggccaggctccacctcacggtgaccagggcctacaaagtgaatactgacatcaacttcgaggtgtttattcataaagtggatggtctgtcagatgaccacaaaattgaaacccaaagagatattcaccagagggcaaacgatgaccttgcagatgctggattagaaaaaattcacctcagcttttatctgacaagcatatatgatcattcaatatttgaagcttttagcaaagttgttcagaaactgattccacaactcccaactctggagaatttgctgaacatctttatctcaaattctggaattgaaaaggcatttctatttgatgtggtcagtaaaatttatattgcaactgatagtactccggtggatatgcaaacctatgagctctgctgtgatatgatagatgtggttattgacatctcttgtatttatggtctcaaagaagatggagcaggaaccccctatgacaaggaatccacagccatcataaagcttaataatacaaccgtgctttatttaaaagaggtgacaaagttcctggctctcgtttgctttgtcagagaggaaagctttgaaagaaaagggctaattgactataattttcattgcttccggaaggccattcatgaagtttttgaggtgagaatgaaagtagtaaaatctcgaaaggttcagaatcggctgcagaagaaaaagagagccacccctaatgggacccctagagtgctgctgtaggtgaggtttcaggaatgtcttttgaaatcagaccttatccatgaggctgctgcgccatgttgcactaaaggaagaggaagaaggagattgggacacataccattgatttgttgttaaaaaaaaaaaattcctgcaaccctcttgatcttctcttttataaataaagtaagcactttgaagcaaaaacttgtatatt

SEQ ID NO: 326418 - DNA, 537 bp, Homo sapiens
  misc_feature (23)..(23): n is a, c, g, or t
tccttcattttcttcttttcaanaatttgaaacaacaagccaacctatcagtaaccattgaaaagcatttctatttgatgtggtcagtaaaatttatattgcaactgatagtactccggtggatatgcaaacctatgagctctgctgtgatatgatagatgtggttattgacatctcttgtatttatggggctaattgactataattttcattgcttccggaaggccattcatgaagtttttgaggtgagaatgaaagtagtaaaatctcgaaaggttcagaatcggctgcagaagaaaaagagagccacccctaatgggacccctagagtgctgctgtaggtgaggtttcaggaatgtcttttgaaatcagaccttatccatgaggctgctgcgccatgttgcactaaaggaagaggaagaaggagattgggacacataccattgatttgttgttaaaaaaaaaaaattcctgcaaccctcttgatcttctcttttataaataaagtaagcactttgaagcaaaaacttgtatatt

SEQ ID NO: 326419 - DNA, 5048 bp, Homo sapiens
  misc_feature (2276)..(2276): n is a, c, g, or t
  misc_feature (2278)..(2278): n is a, c, g, or t
  misc_feature (2577)..(2577): n is a, c, g, or t
  misc_feature (2592)..(2592): n is a, c, g, or t
acgcagtctctctctctctccctcctccgggaggaactgccgcgctccggctgactcctccgccggcgggcggggcgggggagggggcttcgggcgcgctgggaaccgcgggacccggacctgggcgccgcccgccgggggacgcgcggcccccgcttccgccgggccccgctgagctctagacaaacctccgcttcagaaataggctgcgggcggccggctaggaggcttggcccccaccccgggacccccgccgtccccgggccggccggccggtgggcacgatgagccaggtgctggggaagccgcagccgcaggacgaggacgacgcggaggaggaggaggaggaggatgagctggtggggctagcggactacggagacgggcccgactcctccgacgccgatccggacagcggcacagaggagggagttctggacttcagtgaccccttcagcactgaagtgaagccgagaatcctgctcatgggcctgaggagaagcggcaagtcgtctattcagaaagttgtctttcacaaaatgtctcccaacgaaactctgttcttggagagcactaataagatatgccgggaagatgtttccaacagctcctttgtcaattttcagatttgggacttcccaggacagattgacttttttgaccctacatttgactatgagatgatcttccggggaacaggagcactgatatttgtcattgactcacaggatgattacatggaagccctggccaggctccacctcacggtgaccagggcctacaaagtgaatactgacatcaacttcgaggtgtttattcataaagtggatggtctgtcagatgaccacaaaattgaaacccaaagagatattcaccagagggcaaacgatgaccttgcagatgctggattagaaaaaattcacctcagcttttatctgacaagcatatatgatcattcaatatttgaagcttttagcaaagttgttcagaaactgattccacaactcccaactctggagaatttgctgaacatctttatctcaaattctggaattgaaaaggcatttctatttgatgtggtcagtaaaatttatattgcaactgatagtactccggtggatatgcaaacctatgagctctgctgtgatatgatagatgtggttattgacatctcttgtatttatggtctcaaagaagatggagcaggaaccccctatgacaaggaatccacagccatcataaagcttaataatacaaccgtgctttatttaaaagaggtgacaaagttcctggctctcgtttgctttgtcagagaggaaagctttgaaagaaaagggctaattgactataattttcattgcttccggaaggccattcatgaagtttttgaggtgagaatgaaagtagtaaaatctcgaaaggttcagaatcggctgcagaagaaaaagagagccacccctaatgggacccctagagtgctgctgtaggtgaggtttcaggaatgtcttttgaaatcagaccttatccatgaggctgctgcgccatgttgcactaaaggaagaggaagaaggagattgggacacataccattgatttgttgttaaaaaaaaaaaattcctgcaaccctcttgatcttctcttttataaataaagtaagcactttgaagcaaaaacttgtatattaacagtgatgtgaaatccattgtcatttcattacacaaatgtaaacttttatggtctgtagtcaaaaaaatcccgtgtgagaactgccaggaattgtacatattttgcactttttcatgtttctcattgaactgaactttgataaaacgacttttctaagctttttttctgtacttggtgtcaaggacatgcatactgtagtccatatctatatggcaatcagaaattaatcaaaaagtgatgcattggtaatgactttttgtaaatttggaaatctttgctaccaattgttgagaaaaatcatttttcagtggagctggaacagattggagctacaagctccaggagcaataagaactgtcccctatttataatgggtgtaaacagttttgtagaataatgctagcaccagacttacctaaaaatttctatagcagtggctgtgcttccctgctcaacggtttttatgaagctgtttacctcaacacacatctctataatcactttatacagagaggttatttctttttgttgcattagtattcttttgaaactttgggaccagatttccaaaatggtgccgaacactggananaagtaagaatgtcactgaattgtagggtttctggaggcttttctgtacctaccacccagggctaaagtaacatcagaggcctaaagttgttccaaaagtatgtgattggcaactgcagactaaaaaacatagatacaattctggacttttggccctgtgcgatggtctggtgtgctgcatttaaaatgcttattcaggaccagttctttattgctccatgaccatagtgaatagaacaaatcgcagaaccccaccatggagctcaatcctgttagtcacttttgtcacctccacatctncttctcactggtganaacatgcctcatgtactccacttgttcccaccttatgattaagccaagctcagcctgccaccagcatgctctgcaaggctgaagagtcatcctgaagacccctaaaggtcagtgggaaaaggatggctggagagacattacaattagctgtgtaattgtttctgtgaaattatttcacttatgtttactttagactaacaggaaattaagagtcctaaatctacccctatgccaaatcattccaagtagataattttacgtgcatctcaagggttagcaccctaaagcatgcttgtggggcattagaaaatgagatttttttttttttaaagcagagcctcctaagaacatcaaagttggtcctagcaaaatatataaagtccctaaagcaacttatacttgaaactttttttttttttttttttagaggggggcctcattctgttgcttgtgctggaatacattggtacaatcatagctcactgttacctcttgggctcaagggatccttccacctcagcctccctagtagctagaactacaggtgtgcacaaccacgcccggctaattcttaaattttgtttttgtagagacaggatctcactgtgttgcccaagatggtctcaaactcctggccccaagcaatcctcctgccttggcctcctcaaatgctgagattacaggcctgagctactgtgcccagcctaaactttcccacttctctctgtggcttctttccaacctctctccttcctctccccaagtcctgtttctttgaagctggtaactgaatttaagatgatatctgggttggtgtttaaggtttgagcctcccaagggtctgtgcattttgaaaggagatttctaaaaataattaaggtgccctaactcctttcctcatgattcctactccgaaacctggatggttaggagcccagggctccctgatttccagagctatatcctgttggacctttgccaacagacctgacacttaggggttattgttataaatctaattctctaatattttttacatgttgtttcactttgaataagcaaatgaagaatcagttttctaatatgactttatcctcaagctagagacactagcctatttggtaaatcacacattacttaggtatatttattactataaccaggttggagcttccatgtttaagctgggtatatgatgggtttttgttaaaatgtgccttaaaaagcctattacttcaagagcaaatgattctttgggggaaaggcaaaaataattctatgacatagggcccaagttcatggtagtaagtgtactctttgattaatcacacgctaatatagattactgcctctaactttgtaagtgtggcaatgacttcttaattaaagaaagatgcaggagttatgtctaagcgttcagtttttcaaatctgtgttattggaaatgtcttcaagtcattttgcattgtatttttgatatgagaggcagcttattgcgatgtgtatggccatgtttcattctcaaatttaattctataaatacaaatcctaaatacatggctacagcaactgcactggaacatttttgcttggttttagggattgagaacttgccttgcaggtttccttcctcaaaaggagcagggcagtcctttccctgttgagtcaattagaatttttacatagaggtgagactgtgaattattttggttattttcagtgatgtagattagtgtgaatgaccagggtggaatgtttttgaaggaatataaagcaaaaactggttgacattcacaaactgttcttttgtgaacatattttggacccttaaatatgactaaaatcacagcaatattgttacatacgggttatatgccaactctgtttgaaatatactctggaaaaacagctgaattgtcttggttattaaagtatggtatgtattcaacttgtacagactggatgtaatttgtaatcaggtatagtccatgttttactttaagcagtacatcacttaataaccattgttaagccattgctttcaagaatgttaactgccaatttaaaagcatgtgtcctaggttcatgctttggtaaagctctcatttcaagtgtattcatagctaagctttctgggagcagaattgtctctttggtgaaaaggaagtacagcctttcctgtttctgaggttgcttaccatacatgtatgtcactgtttcattggccctgttacatccatttggtaaaatttatttgtcctgattaaccagctctcattttatggaaatgatgataaatctcactacttaaatttaatttatgcttttatttttaaactctcttacatctccacatttttgatgggtacatgccagttagggctgtagaactgttacttcagtaaacttcagatattaactcttgctgctgtggccctaatcccctagtcatatgg

SEQ ID NO: 326420 - DNA, 4294 bp, Homo sapiens
  misc_feature (2030)..(2030): n is a, c, g, or t
  misc_feature (2032)..(2032): n is a, c, g, or t
  misc_feature (2331)..(2331): n is a, c, g, or t
  misc_feature (2346)..(2346): n is a, c, g, or t
tggcggttggggaggggaggggaccgcgggcgcgccctgggacctctctcccagaacggtgctgttgaagccagggtcagatgtcgtggctaaaaaaaggcagccggcggcggcgtgactggcagggtcgtcggcagctgcgggtgtcagtctcgccccgcgtcgccgcgggaggggcccacccagttctggacttcagtgaccccttcagcactgaagtgaagccgagaatcctgctcatgggcctgaggagaagcggcaagtcgtctattcagaaagttgtctttcacaaaatgtctcccaacgaaactctgttcttggagagcactaataagatatgccgggaagatgtttccaacagctcctttgtcaattttcagatttgggacttcccaggacagattgacttttttgaccctacatttgactatgagatgatcttccggggaacaggagcactgatatttgtcattgactcacaggatgattacatggaagccctggccaggctccacctcacggtgaccagggcctacaaagtgaatactgacatcaacttcgaggtgtttattcataaagtggatggtctgtcagatgaccacaaaattgaaacccaaagagatattcaccagagggcaaacgatgaccttgcagatgctggattagaaaaaattcacctcagcttttatctgacaagcatatatgatcattcaatatttgaagcttttagcaaagttgttcagaaactgattccacaactcccaactctggagaatttgctgaacatctttatctcaaattctggaattgaaaaggcatttctatttgatgtggtcagtaaaatttatattgcaactgatagtactccggtggatatgcaaacctatgagctctgctgtgatatgatagatgtggttattgacatctcttgtatttatggtctcaaagaagatggagcaggaaccccctatgacaaggaatccacagccatcataaagcttaataatacaaccgtgctttatttaaaagaggtgacaaagttcctggctctcgtttgctttgtcagagaggaaagctttgaaagaaaagggctaattgactataattttcattgcttccggaaggccattcatgaagtttttgaggtgagaatgaaagtagtaaaatctcgaaaggttcagaatcggctgcagaagaaaaagagagccacccctaatgggacccctagagtgctgctgtaggtgaggtttcaggaatgtcttttgaaatcagaccttatccatgaggctgctgcgccatgttgcactaaaggaagaggaagaaggagattgggacacataccattgatttgttgttaaaaaaaaaaaattcctgcaaccctcttgatcttctcttttataaataaagtaagcactttgaagcaaaaacttgtatattaacagtgatgtgaaatccattgtcatttcattacacaaatgtaaacttttatggtctgtagtcaaaaaaatcccgtgtgagaactgccaggaattgtacatattttgcactttttcatgtttctcattgaactgaactttgataaaacgacttttctaagctttttttctgtacttggtgtcaaggacatgcatactgtagtccatatctatatggcaatcagaaattaatcaaaaagtgatgcattggtaatgactttttgtaaatttggaaatctttgctaccaattgttgagaaaaatcatttttcagtggagctggaacagattggagctacaagctccaggagcaataagaactgtcccctatttataatgggtgtaaacagttttgtagaataatgctagcaccagacttacctaaaaatttctatagcagtggctgtgcttccctgctcaacggtttttatgaagctgtttacctcaacacacatctctataatcactttatacagagaggttatttctttttgttgcattagtattcttttgaaactttgggaccagatttccaaaatggtgccgaacactggananaagtaagaatgtcactgaattgtagggtttctggaggcttttctgtacctaccacccagggctaaagtaacatcagaggcctaaagttgttccaaaagtatgtgattggcaactgcagactaaaaaacatagatacaattctggacttttggccctgtgcgatggtctggtgtgctgcatttaaaatgcttattcaggaccagttctttattgctccatgaccatagtgaatagaacaaatcgcagaaccccaccatggagctcaatcctgttagtcacttttgtcacctccacatctncttctcactggtganaacatgcctcatgtactccacttgttcccaccttatgattaagccaagctcagcctgccaccagcatgctctgcaaggctgaagagtcatcctgaagacccctaaaggtcagtgggaaaaggatggctggagagacattacaattagctgtgtaattgtttctgtgaaattatttcacttatgtttactttagactaacaggaaattaagagtcctaaatctacccctatgccaaatcattccaagtagataattttacgtgcatctcaagggttagcaccctaaagcatgcttgtggggcattagaaaatgagatttttttttttttaaagcagagcctcctaagaacatcaaagttggtcctagcaaaatatataaagtccctaaagcaacttatacttgaaactttttttttttttttttttagaggggggcctcattctgttgcttgtgctggaatacattggtacaatcatagctcactgttacctcttgggctcaagggatccttccacctcagcctccctagtagctagaactacaggtgtgcacaaccacgcccggctaattcttaaattttgtttttgtagagacaggatctcactgtgttgcccaagatggtctcaaactcctggccccaagcaatcctcctgccttggcctcctcaaatgctgagattacaggcctgagctactgtgcccagcctaaactttcccacttctctctgtggcttctttccaacctctctccttcctctccccaagtcctgtttctttgaagctggtaactgaatttaagatgatatctgggttggtgtttaaggtttgagcctcccaagggtctgtgcattttgaaaggagatttctaaaaataattaaggtgccctaactcctttcctcatgattcctactccgaaacctggatggttaggagcccagggctccctgatttccagagctatatcctgttggacctttgccaacagacctgacacttaggggttattgttataaatctaattctctaatattttttacatgttgtttcactttgaataagcaaatgaagaatcagttttctaatatgactttatcctcaagctagagacactagcctatttggtaaatcacacattacttaggtatatttattactataaccaggttggagcttccatgtttaagctgggtatatgatgggtttttgttaaaatgtgccttaaaaagcctattacttcaagagcaaatgattctttgggggaaaggcaaaaataattctatgacatagggcccaagttcatggtagtaagtgtactctttgattaatcacacgctaatatagattactgcctctaactttgtaagtgtggcaatgacttcttaattaaagaaagatgcaggagttatgtctaagcgttcagtttttcaaatctgtgttattggaaatgtcttcaagtcattttgcattgtatttttgatatgagaggcagcttattgcgatgtgtatggccatgtttcattctcaaatttaattctataaatacaaatcctaaatacatggctacagcaactgcactggaacatttttgcttggttttagggattgagaacttgccttgcaggtttccttcctcaaaaggagcagggcagtcctttccctgttgagtcaattagaatttttacatagaggtgagactgtgaattattttggttattttcagtgatgtagattagtgtgaatgaccagggtggaatgtttttgaaggaatataaagcaaaaactggttgacattcacaaactgttcttttgtgaacatattttggacccttaaatatgactaaaatcacagcaatattgttacatacgggttatatgccaactctgtttgaaatatactctggaaaaacagctgaattgtcttggttattaaagtatggtatgtattcaa

SEQ ID NO: 326421 - DNA, 4346 bp, Homo sapiens
  misc_feature (2082)..(2082): n is a, c, g, or t
  misc_feature (2084)..(2084): n is a, c, g, or t
  misc_feature (2383)..(2383): n is a, c, g, or t
  misc_feature (2398)..(2398): n is a, c, g, or t
acgcagtctctctctctctccctcctccgggaggaactgccgcgctccggctgactcctccgccggcgggcggggcgggggagggggcttcgggcgcgctgggaaccgcgggacccggacctgggcgccgcccgccgggggacgcgcggcccccgcttccgccgggccccgctgagctctagacaaacctccgcttcagaaataggctgcgggcggccggctaggaggcttggcccccaccccgggacccccgccgtccccgggccggccggccggtgggcacgatgagccaggtgctggggaagccgcagccgcaggacgaggacgacgcggaggaggaggaggaggaggatgagctggtggggctagcggactacggagacgggcccgactcctccgacgccgatccggacagcggcacagaggagggagatttgggacttcccaggacagattgacttttttgaccctacatttgactatgagatgatcttccggggaacaggagcactgatatttgtcattgactcacaggatgattacatggaagccctggccaggctccacctcacggtgaccagggcctacaaagtgaatactgacatcaacttcgaggtgtttattcataaagtggatggtctgtcagatgaccacaaaattgaaacccaaagagatattcaccagagggcaaacgatgaccttgcagatgctggattagaaaaaattcacctcagcttttatctgacaagcatatatgatcattcaatatttgaagcttttagcaaagttgttcagaaactgattccacaactcccaactctggagaatttgctgaacatctttatctcaaattctggaattgaaaaggcatttctatttgatgtggtcagtaaaatttatattgcaactgatagtactccggtggatatgcaaacctatgagctctgctgtgatatgatagatgtggttattgacatctcttgtatttatggtctcaaagaagatggagcaggaaccccctatgacaaggaatccacagccatcataaagcttaataatacaaccgtgctttatttaaaagaggtgacaaagttcctggctctcgtttgctttgtcagagaggaaagctttgaaagaaaagggctaattgactataattttcattgcttccggaaggccattcatgaagtttttgaggtgagaatgaaagtagtaaaatctcgaaaggttcagaatcggctgcagaagaaaaagagagccacccctaatgggacccctagagtgctgctgtaggtgaggtttcaggaatgtcttttgaaatcagaccttatccatgaggctgctgcgccatgttgcactaaaggaagaggaagaaggagattgggacacataccattgatttgttgttaaaaaaaaaaaattcctgcaaccctcttgatcttctcttttataaataaagtaagcactttgaagcaaaaacttgtatattaacagtgatgtgaaatccattgtcatttcattacacaaatgtaaacttttatggtctgtagtcaaaaaaatcccgtgtgagaactgccaggaattgtacatattttgcactttttcatgtttctcattgaactgaactttgataaaacgacttttctaagctttttttctgtacttggtgtcaaggacatgcatactgtagtccatatctatatggcaatcagaaattaatcaaaaagtgatgcattggtaatgactttttgtaaatttggaaatctttgctaccaattgttgagaaaaatcatttttcagtggagctggaacagattggagctacaagctccaggagcaataagaactgtcccctatttataatgggtgtaaacagttttgtagaataatgctagcaccagacttacctaaaaatttctatagcagtggctgtgcttccctgctcaacggtttttatgaagctgtttacctcaacacacatctctataatcactttatacagagaggttatttctttttgttgcattagtattcttttgaaactttgggaccagatttccaaaatggtgccgaacactggananaagtaagaatgtcactgaattgtagggtttctggaggcttttctgtacctaccacccagggctaaagtaacatcagaggcctaaagttgttccaaaagtatgtgattggcaactgcagactaaaaaacatagatacaattctggacttttggccctgtgcgatggtctggtgtgctgcatttaaaatgcttattcaggaccagttctttattgctccatgaccatagtgaatagaacaaatcgcagaaccccaccatggagctcaatcctgttagtcacttttgtcacctccacatctncttctcactggtganaacatgcctcatgtactccacttgttcccaccttatgattaagccaagctcagcctgccaccagcatgctctgcaaggctgaagagtcatcctgaagacccctaaaggtcagtgggaaaaggatggctggagagacattacaattagctgtgtaattgtttctgtgaaattatttcacttatgtttactttagactaacaggaaattaagagtcctaaatctacccctatgccaaatcattccaagtagataattttacgtgcatctcaagggttagcaccctaaagcatgcttgtggggcattagaaaatgagatttttttttttttaaagcagagcctcctaagaacatcaaagttggtcctagcaaaatatataaagtccctaaagcaacttatacttgaaactttttttttttttttttttagaggggggcctcattctgttgcttgtgctggaatacattggtacaatcatagctcactgttacctcttgggctcaagggatccttccacctcagcctccctagtagctagaactacaggtgtgcacaaccacgcccggctaattcttaaattttgtttttgtagagacaggatctcactgtgttgcccaagatggtctcaaactcctggccccaagcaatcctcctgccttggcctcctcaaatgctgagattacaggcctgagctactgtgcccagcctaaactttcccacttctctctgtggcttctttccaacctctctccttcctctccccaagtcctgtttctttgaagctggtaactgaatttaagatgatatctgggttggtgtttaaggtttgagcctcccaagggtctgtgcattttgaaaggagatttctaaaaataattaaggtgccctaactcctttcctcatgattcctactccgaaacctggatggttaggagcccagggctccctgatttccagagctatatcctgttggacctttgccaacagacctgacacttaggggttattgttataaatctaattctctaatattttttacatgttgtttcactttgaataagcaaatgaagaatcagttttctaatatgactttatcctcaagctagagacactagcctatttggtaaatcacacattacttaggtatatttattactataaccaggttggagcttccatgtttaagctgggtatatgatgggtttttgttaaaatgtgccttaaaaagcctattacttcaagagcaaatgattctttgggggaaaggcaaaaataattctatgacatagggcccaagttcatggtagtaagtgtactctttgattaatcacacgctaatatagattactgcctctaactttgtaagtgtggcaatgacttcttaattaaagaaagatgcaggagttatgtctaagcgttcagtttttcaaatctgtgttattggaaatgtcttcaagtcattttgcattgtatttttgatatgagaggcagcttattgcgatgtgtatggccatgtttcattctcaaatttaattctataaatacaaatcctaaatacatggctacagcaactgcactggaacatttttgcttggttttagggattgagaacttgccttgcaggtttccttcctcaaaaggagcagggcagtcctttccctgttgagtcaattagaatttttacatagaggtgagactgtgaattattttggttattttcagtgatgtagattagtgtgaatgaccagggtggaatgtttttgaaggaatataaagcaaaaactggttgacattcacaaactgttcttttgtgaacatattttggacccttaaatatgactaaaatcacagcaatattgttacatacgggttatatgccaactctgtttgaaatatactctggaaaaacagctgaattgtcttggttattaaagtatggtatgtattcaa

SEQ ID NO: 326422 - DNA, 384 bp, Homo sapiens
ttacgctaagaccatcctctactgccccctactggcttgtcctggccatgggtcccatgaaaagatggagattatttctacgtgacatttataaatatttttgttctcttctccagggctaattgactataattttcattgcttccggaaggccattcatgaagtttttgaggtgagaatgaaagtagtaaaatctcgaaaggttcagaatcggctgcagaagaaaaagagagccacccctaatgggacccctagagtgctgctgtaggtgaggtttcaggaatgtcttttgaaatcagaccttatccatgaggctgctgcgccatgttgcactaaaggaagaggaagaaggagattgggacacataccattgatttgttgtta

SEQ ID NO: 326423 - DNA, 455 bp, Homo sapiens
ggatcggtggaaaaggggaaggagggagtaagcgtctgggctggaggagcgcgcgcttctgcccctttcagagccggtgcctcccgcgcccctcaccccaagctctccgcagcgtctggcggttggggaggggaggggaccgcgggcgcgccctgggacctctctcccagaacggtgctgttgaagccagggtcagatgtcgtggctaaaaaaaggcagccggcggcggcgtgactggcagggtcgtcggcagctgcgggtgtcagtctcgccccgcgtcgccgcgggaggggcccacccaggtagtggctggggagacccgcggggcggcggggggatgctcgccaagctgttgtgggagtctccgagaggccgcagatttcccgggatccacgcaaacaccgttgtcaggacaccttatctgctctcggtatcaccacctggacatggcagtg

SEQ ID NO: 326424 - DNA, 4244 bp, Homo sapiens
  misc_feature (1980)..(1980): n is a, c, g, or t
  misc_feature (1982)..(1982): n is a, c, g, or t
  misc_feature (2281)..(2281): n is a, c, g, or t
  misc_feature (2296)..(2296): n is a, c, g, or t
acgcagtctctctctctctccctcctccgggaggaactgccgcgctccggctgactcctccgccggcgggcggggcgggggagggggcttcgggcgcgctgggaaccgcgggacccggacctgggcgccgcccgccgggggacgcgcggcccccgcttccgccgggccccgctgagctctagacaaacctccgcttcagaaataggctgcgggcggccggctaggaggcttggcccccaccccgggacccccgccgtccccgggccggccggccggtgggcacgatgagccaggtgctggggaagccgcagccgcaggacgaggacgacgcggaggaggaggaggaggaggatgagctggtggggctagcggactacggagacgggcccgactcctccgacgccgatccggacagcggcacagaggagggaggatgattacatggaagccctggccaggctccacctcacggtgaccagggcctacaaagtgaatactgacatcaacttcgaggtgtttattcataaagtggatggtctgtcagatgaccacaaaattgaaacccaaagagatattcaccagagggcaaacgatgaccttgcagatgctggattagaaaaaattcacctcagcttttatctgacaagcatatatgatcattcaatatttgaagcttttagcaaagttgttcagaaactgattccacaactcccaactctggagaatttgctgaacatctttatctcaaattctggaattgaaaaggcatttctatttgatgtggtcagtaaaatttatattgcaactgatagtactccggtggatatgcaaacctatgagctctgctgtgatatgatagatgtggttattgacatctcttgtatttatggtctcaaagaagatggagcaggaaccccctatgacaaggaatccacagccatcataaagcttaataatacaaccgtgctttatttaaaagaggtgacaaagttcctggctctcgtttgctttgtcagagaggaaagctttgaaagaaaagggctaattgactataattttcattgcttccggaaggccattcatgaagtttttgaggtgagaatgaaagtagtaaaatctcgaaaggttcagaatcggctgcagaagaaaaagagagccacccctaatgggacccctagagtgctgctgtaggtgaggtttcaggaatgtcttttgaaatcagaccttatccatgaggctgctgcgccatgttgcactaaaggaagaggaagaaggagattgggacacataccattgatttgttgttaaaaaaaaaaaattcctgcaaccctcttgatcttctcttttataaataaagtaagcactttgaagcaaaaacttgtatattaacagtgatgtgaaatccattgtcatttcattacacaaatgtaaacttttatggtctgtagtcaaaaaaatcccgtgtgagaactgccaggaattgtacatattttgcactttttcatgtttctcattgaactgaactttgataaaacgacttttctaagctttttttctgtacttggtgtcaaggacatgcatactgtagtccatatctatatggcaatcagaaattaatcaaaaagtgatgcattggtaatgactttttgtaaatttggaaatctttgctaccaattgttgagaaaaatcatttttcagtggagctggaacagattggagctacaagctccaggagcaataagaactgtcccctatttataatgggtgtaaacagttttgtagaataatgctagcaccagacttacctaaaaatttctatagcagtggctgtgcttccctgctcaacggtttttatgaagctgtttacctcaacacacatctctataatcactttatacagagaggttatttctttttgttgcattagtattcttttgaaactttgggaccagatttccaaaatggtgccgaacactggananaagtaagaatgtcactgaattgtagggtttctggaggcttttctgtacctaccacccagggctaaagtaacatcagaggcctaaagttgttccaaaagtatgtgattggcaactgcagactaaaaaacatagatacaattctggacttttggccctgtgcgatggtctggtgtgctgcatttaaaatgcttattcaggaccagttctttattgctccatgaccatagtgaatagaacaaatcgcagaaccccaccatggagctcaatcctgttagtcacttttgtcacctccacatctncttctcactggtganaacatgcctcatgtactccacttgttcccaccttatgattaagccaagctcagcctgccaccagcatgctctgcaaggctgaagagtcatcctgaagacccctaaaggtcagtgggaaaaggatggctggagagacattacaattagctgtgtaattgtttctgtgaaattatttcacttatgtttactttagactaacaggaaattaagagtcctaaatctacccctatgccaaatcattccaagtagataattttacgtgcatctcaagggttagcaccctaaagcatgcttgtggggcattagaaaatgagatttttttttttttaaagcagagcctcctaagaacatcaaagttggtcctagcaaaatatataaagtccctaaagcaacttatacttgaaactttttttttttttttttttagaggggggcctcattctgttgcttgtgctggaatacattggtacaatcatagctcactgttacctcttgggctcaagggatccttccacctcagcctccctagtagctagaactacaggtgtgcacaaccacgcccggctaattcttaaattttgtttttgtagagacaggatctcactgtgttgcccaagatggtctcaaactcctggccccaagcaatcctcctgccttggcctcctcaaatgctgagattacaggcctgagctactgtgcccagcctaaactttcccacttctctctgtggcttctttccaacctctctccttcctctccccaagtcctgtttctttgaagctggtaactgaatttaagatgatatctgggttggtgtttaaggtttgagcctcccaagggtctgtgcattttgaaaggagatttctaaaaataattaaggtgccctaactcctttcctcatgattcctactccgaaacctggatggttaggagcccagggctccctgatttccagagctatatcctgttggacctttgccaacagacctgacacttaggggttattgttataaatctaattctctaatattttttacatgttgtttcactttgaataagcaaatgaagaatcagttttctaatatgactttatcctcaagctagagacactagcctatttggtaaatcacacattacttaggtatatttattactataaccaggttggagcttccatgtttaagctgggtatatgatgggtttttgttaaaatgtgccttaaaaagcctattacttcaagagcaaatgattctttgggggaaaggcaaaaataattctatgacatagggcccaagttcatggtagtaagtgtactctttgattaatcacacgctaatatagattactgcctctaactttgtaagtgtggcaatgacttcttaattaaagaaagatgcaggagttatgtctaagcgttcagtttttcaaatctgtgttattggaaatgtcttcaagtcattttgcattgtatttttgatatgagaggcagcttattgcgatgtgtatggccatgtttcattctcaaatttaattctataaatacaaatcctaaatacatggctacagcaactgcactggaacatttttgcttggttttagggattgagaacttgccttgcaggtttccttcctcaaaaggagcagggcagtcctttccctgttgagtcaattagaatttttacatagaggtgagactgtgaattattttggttattttcagtgatgtagattagtgtgaatgaccagggtggaatgtttttgaaggaatataaagcaaaaactggttgacattcacaaactgttcttttgtgaacatattttggacccttaaatatgactaaaatcacagcaatattgttacatacgggttatatgccaactctgtttgaaatatactctggaaaaacagctgaattgtcttggttattaaagtatggtatgtattcaa

SEQ ID NO: 326425 - DNA, 4540 bp, Homo sapiens
  misc_feature (2276)..(2276): n is a, c, g, or t
  misc_feature (2278)..(2278): n is a, c, g, or t
  misc_feature (2577)..(2577): n is a, c, g, or t
  misc_feature (2592)..(2592): n is a, c, g, or t
acgcagtctctctctctctccctcctccgggaggaactgccgcgctccggctgactcctccgccggcgggcggggcgggggagggggcttcgggcgcgctgggaaccgcgggacccggacctgggcgccgcccgccgggggacgcgcggcccccgcttccgccgggccccgctgagctctagacaaacctccgcttcagaaataggctgcgggcggccggctaggaggcttggcccccaccccgggacccccgccgtccccgggccggccggccggtgggcacgatgagccaggtgctggggaagccgcagccgcaggacgaggacgacgcggaggaggaggaggaggaggatgagctggtggggctagcggactacggagacgggcccgactcctccgacgccgatccggacagcggcacagaggagggagttctggacttcagtgaccccttcagcactgaagtgaagccgagaatcctgctcatgggcctgaggagaagcggcaagtcgtctattcagaaagttgtctttcacaaaatgtctcccaacgaaactctgttcttggagagcactaataagatatgccgggaagatgtttccaacagctcctttgtcaattttcagatttgggacttcccaggacagattgacttttttgaccctacatttgactatgagatgatcttccggggaacaggagcactgatatttgtcattgactcacaggatgattacatggaagccctggccaggctccacctcacggtgaccagggcctacaaagtgaatactgacatcaacttcgaggtgtttattcataaagtggatggtctgtcagatgaccacaaaattgaaacccaaagagatattcaccagagggcaaacgatgaccttgcagatgctggattagaaaaaattcacctcagcttttatctgacaagcatatatgatcattcaatatttgaagcttttagcaaagttgttcagaaactgattccacaactcccaactctggagaatttgctgaacatctttatctcaaattctggaattgaaaaggcatttctatttgatgtggtcagtaaaatttatattgcaactgatagtactccggtggatatgcaaacctatgagctctgctgtgatatgatagatgtggttattgacatctcttgtatttatggtctcaaagaagatggagcaggaaccccctatgacaaggaatccacagccatcataaagcttaataatacaaccgtgctttatttaaaagaggtgacaaagttcctggctctcgtttgctttgtcagagaggaaagctttgaaagaaaagggctaattgactataattttcattgcttccggaaggccattcatgaagtttttgaggtgagaatgaaagtagtaaaatctcgaaaggttcagaatcggctgcagaagaaaaagagagccacccctaatgggacccctagagtgctgctgtaggtgaggtttcaggaatgtcttttgaaatcagaccttatccatgaggctgctgcgccatgttgcactaaaggaagaggaagaaggagattgggacacataccattgatttgttgttaaaaaaaaaaaattcctgcaaccctcttgatcttctcttttataaataaagtaagcactttgaagcaaaaacttgtatattaacagtgatgtgaaatccattgtcatttcattacacaaatgtaaacttttatggtctgtagtcaaaaaaatcccgtgtgagaactgccaggaattgtacatattttgcactttttcatgtttctcattgaactgaactttgataaaacgacttttctaagctttttttctgtacttggtgtcaaggacatgcatactgtagtccatatctatatggcaatcagaaattaatcaaaaagtgatgcattggtaatgactttttgtaaatttggaaatctttgctaccaattgttgagaaaaatcatttttcagtggagctggaacagattggagctacaagctccaggagcaataagaactgtcccctatttataatgggtgtaaacagttttgtagaataatgctagcaccagacttacctaaaaatttctatagcagtggctgtgcttccctgctcaacggtttttatgaagctgtttacctcaacacacatctctataatcactttatacagagaggttatttctttttgttgcattagtattcttttgaaactttgggaccagatttccaaaatggtgccgaacactggananaagtaagaatgtcactgaattgtagggtttctggaggcttttctgtacctaccacccagggctaaagtaacatcagaggcctaaagttgttccaaaagtatgtgattggcaactgcagactaaaaaacatagatacaattctggacttttggccctgtgcgatggtctggtgtgctgcatttaaaatgcttattcaggaccagttctttattgctccatgaccatagtgaatagaacaaatcgcagaaccccaccatggagctcaatcctgttagtcacttttgtcacctccacatctncttctcactggtganaacatgcctcatgtactccacttgttcccaccttatgattaagccaagctcagcctgccaccagcatgctctgcaaggctgaagagtcatcctgaagacccctaaaggtcagtgggaaaaggatggctggagagacattacaattagctgtgtaattgtttctgtgaaattatttcacttatgtttactttagactaacaggaaattaagagtcctaaatctacccctatgccaaatcattccaagtagataattttacgtgcatctcaagggttagcaccctaaagcatgcttgtggggcattagaaaatgagatttttttttttttaaagcagagcctcctaagaacatcaaagttggtcctagcaaaatatataaagtccctaaagcaacttatacttgaaactttttttttttttttttttagaggggggcctcattctgttgcttgtgctggaatacattggtacaatcatagctcactgttacctcttgggctcaagggatccttccacctcagcctccctagtagctagaactacaggtgtgcacaaccacgcccggctaattcttaaattttgtttttgtagagacaggatctcactgtgttgcccaagatggtctcaaactcctggccccaagcaatcctcctgccttggcctcctcaaatgctgagattacaggcctgagctactgtgcccagcctaaactttcccacttctctctgtggcttctttccaacctctctccttcctctccccaagtcctgtttctttgaagctggtaactgaatttaagatgatatctgggttggtgtttaaggtttgagcctcccaagggtctgtgcattttgaaaggagatttctaaaaataattaaggtgccctaactcctttcctcatgattcctactccgaaacctggatggttaggagcccagggctccctgatttccagagctatatcctgttggacctttgccaacagacctgacacttaggggttattgttataaatctaattctctaatattttttacatgttgtttcactttgaataagcaaatgaagaatcagttttctaatatgactttatcctcaagctagagacactagcctatttggtaaatcacacattacttaggtatatttattactataaccaggttggagcttccatgtttaagctgggtatatgatgggtttttgttaaaatgtgccttaaaaagcctattacttcaagagcaaatgattctttgggggaaaggcaaaaataattctatgacatagggcccaagttcatggtagtaagtgtactctttgattaatcacacgctaatatagattactgcctctaactttgtaagtgtggcaatgacttcttaattaaagaaagatgcaggagttatgtctaagcgttcagtttttcaaatctgtgttattggaaatgtcttcaagtcattttgcattgtatttttgatatgagaggcagcttattgcgatgtgtatggccatgtttcattctcaaatttaattctataaatacaaatcctaaatacatggctacagcaactgcactggaacatttttgcttggttttagggattgagaacttgccttgcaggtttccttcctcaaaaggagcagggcagtcctttccctgttgagtcaattagaatttttacatagaggtgagactgtgaattattttggttattttcagtgatgtagattagtgtgaatgaccagggtggaatgtttttgaaggaatataaagcaaaaactggttgacattcacaaactgttcttttgtgaacatattttggacccttaaatatgactaaaatcacagcaatattgttacatacgggttatatgccaactctgtttgaaatatactctggaaaaacagctgaattgtcttggttattaaagtatggtatgtattcaa

SEQ ID NO: 326426 - DNA, 3759 bp, Homo sapiens
  misc_feature (2276)..(2276): n is a, c, g, or t
  misc_feature (2278)..(2278): n is a, c, g, or t
  misc_feature (2577)..(2577): n is a, c, g, or t
  misc_feature (2592)..(2592): n is a, c, g, or t
acgcagtctctctctctctccctcctccgggaggaactgccgcgctccggctgactcctccgccggcgggcggggcgggggagggggcttcgggcgcgctgggaaccgcgggacccggacctgggcgccgcccgccgggggacgcgcggcccccgcttccgccgggccccgctgagctctagacaaacctccgcttcagaaataggctgcgggcggccggctaggaggcttggcccccaccccgggacccccgccgtccccgggccggccggccggtgggcacgatgagccaggtgctggggaagccgcagccgcaggacgaggacgacgcggaggaggaggaggaggaggatgagctggtggggctagcggactacggagacgggcccgactcctccgacgccgatccggacagcggcacagaggagggagttctggacttcagtgaccccttcagcactgaagtgaagccgagaatcctgctcatgggcctgaggagaagcggcaagtcgtctattcagaaagttgtctttcacaaaatgtctcccaacgaaactctgttcttggagagcactaataagatatgccgggaagatgtttccaacagctcctttgtcaattttcagatttgggacttcccaggacagattgacttttttgaccctacatttgactatgagatgatcttccggggaacaggagcactgatatttgtcattgactcacaggatgattacatggaagccctggccaggctccacctcacggtgaccagggcctacaaagtgaatactgacatcaacttcgaggtgtttattcataaagtggatggtctgtcagatgaccacaaaattgaaacccaaagagatattcaccagagggcaaacgatgaccttgcagatgctggattagaaaaaattcacctcagcttttatctgacaagcatatatgatcattcaatatttgaagcttttagcaaagttgttcagaaactgattccacaactcccaactctggagaatttgctgaacatctttatctcaaattctggaattgaaaaggcatttctatttgatgtggtcagtaaaatttatattgcaactgatagtactccggtggatatgcaaacctatgagctctgctgtgatatgatagatgtggttattgacatctcttgtatttatggtctcaaagaagatggagcaggaaccccctatgacaaggaatccacagccatcataaagcttaataatacaaccgtgctttatttaaaagaggtgacaaagttcctggctctcgtttgctttgtcagagaggaaagctttgaaagaaaagggctaattgactataattttcattgcttccggaaggccattcatgaagtttttgaggtgagaatgaaagtagtaaaatctcgaaaggttcagaatcggctgcagaagaaaaagagagccacccctaatgggacccctagagtgctgctgtaggtgaggtttcaggaatgtcttttgaaatcagaccttatccatgaggctgctgcgccatgttgcactaaaggaagaggaagaaggagattgggacacataccattgatttgttgttaaaaaaaaaaaattcctgcaaccctcttgatcttctcttttataaataaagtaagcactttgaagcaaaaacttgtatattaacagtgatgtgaaatccattgtcatttcattacacaaatgtaaacttttatggtctgtagtcaaaaaaatcccgtgtgagaactgccaggaattgtacatattttgcactttttcatgtttctcattgaactgaactttgataaaacgacttttctaagctttttttctgtacttggtgtcaaggacatgcatactgtagtccatatctatatggcaatcagaaattaatcaaaaagtgatgcattggtaatgactttttgtaaatttggaaatctttgctaccaattgttgagaaaaatcatttttcagtggagctggaacagattggagctacaagctccaggagcaataagaactgtcccctatttataatgggtgtaaacagttttgtagaataatgctagcaccagacttacctaaaaatttctatagcagtggctgtgcttccctgctcaacggtttttatgaagctgtttacctcaacacacatctctataatcactttatacagagaggttatttctttttgttgcattagtattcttttgaaactttgggaccagatttccaaaatggtgccgaacactggananaagtaagaatgtcactgaattgtagggtttctggaggcttttctgtacctaccacccagggctaaagtaacatcagaggcctaaagttgttccaaaagtatgtgattggcaactgcagactaaaaaacatagatacaattctggacttttggccctgtgcgatggtctggtgtgctgcatttaaaatgcttattcaggaccagttctttattgctccatgaccatagtgaatagaacaaatcgcagaaccccaccatggagctcaatcctgttagtcacttttgtcacctccacatctncttctcactggtganaacatgcctcatgtactccacttgttcccaccttatgattaagccaagctcagcctgccaccagcatgctctgcaaggctgaagagtcatcctgaagacccctaaaggtcagtgggaaaaggatggctggagagacattacaattagctgtgtaattgtttctgtgaaattatttcacttatgtttactttagactaacaggaaattaagagtcctaaatctacccctatgccaaatcattccaagtagataattttacgtgcatctcaagggttagcaccctaaagcatgcttgtggggcattagaaaatgagatttttttttttttaaagcagagcctcctaagaacatcaaagttggtcctagcaaaatatataaagtccctaaagcaacttatacttgaaactttttttttttttttttttagagggggggccaccatccgggggcctggggcgggaatcacttgggcccactcatagcccacgggaacccctgggggcccaggggactcctttcacacctagaggcctcccatagatagttagacctaccgcgggtgtgcacacaccagcccgggggaaatctcaaaattggggttggtaaaaccgggatctcccgtgggtggtggcccaagaggggtctcaaactcgggggccccaggaaatgccctctgcggcgctgtaggcctccctccaacaaatgggcggggagtctcacccgggggctggagcactatcgttggtgcccacacgcttcataaatttttcacacactttctctctccgggggtgttctttccaaactctgtcttcttactttctcccccaaaggtccgtgtgctcttttcagaaccgcgggggcaaaccgggacagcaccgagagggaaaactcggggcgcaggggcgtacgaacggaggtattgagcacgccccccacgggggggcccggtcggccaccggagcaaggagcggctatcctacacacaaccaactcaagggggaccgcctacagtcgcttatacaaagagaaacgtcaatatcccgacaacaccgggagttgcgttcagacaccacagaggatcacagtggatatccacaaggacgataccgtagtgagcgcaccttggtgccgacacgaccctcacagcaggcgagcgactaggac

SEQ ID NO: 326427 - DNA, 3933 bp, Homo sapiens
  misc_feature (1669)..(1669): n is a, c, g, or t
  misc_feature (1671)..(1671): n is a, c, g, or t
  misc_feature (1970)..(1970): n is a, c, g, or t
  misc_feature (1985)..(1985): n is a, c, g, or t
acgcagtctctctctctctccctcctccgggaggaactgccgcgctccggctgactcctccgccggcgggcggggcgggggagggggcttcgggcgcgctgggaaccgcgggacccggacctgggcgccgcccgccgggggacgcgcggcccccgcttccgccgggccccgctgagctctagacaaacctccgcttcagaaataggctgcgggcggccggctaggaggcttggcccccaccccgggacccccgccgtccccgggccggccggccggtgggcacgatgagccaggtgctggggaagccgcagccgcaggacgaggacgacgcggaggaggaggaggaggaggatgagctggtggggctagcggactacggagacgggcccgactcctccgacgccgatccggacagcggcacagaggagggagttctggacttcagtgaccccttcagcactgaagtgaagccgagaatcctgctcatgggcctgaggagaagcggcaagtcgtctattcagaaagttgtctttcacaaaatgtctcccaacgaaactctgttcttggagagcactaataagatatgccgggaagatgtttccaacagctcctttgtcaattttcagatttgggacttcccaggacagattgacttttttgaccctacatttgactatgagatgatcttccggggaacaggagcactgatatttgtcattgactcacagggctaattgactataattttcattgcttccggaaggccattcatgaagtttttgaggtgagaatgaaagtagtaaaatctcgaaaggttcagaatcggctgcagaagaaaaagagagccacccctaatgggacccctagagtgctgctgtaggtgaggtttcaggaatgtcttttgaaatcagaccttatccatgaggctgctgcgccatgttgcactaaaggaagaggaagaaggagattgggacacataccattgatttgttgttaaaaaaaaaaaattcctgcaaccctcttgatcttctcttttataaataaagtaagcactttgaagcaaaaacttgtatattaacagtgatgtgaaatccattgtcatttcattacacaaatgtaaacttttatggtctgtagtcaaaaaaatcccgtgtgagaactgccaggaattgtacatattttgcactttttcatgtttctcattgaactgaactttgataaaacgacttttctaagctttttttctgtacttggtgtcaaggacatgcatactgtagtccatatctatatggcaatcagaaattaatcaaaaagtgatgcattggtaatgactttttgtaaatttggaaatctttgctaccaattgttgagaaaaatcatttttcagtggagctggaacagattggagctacaagctccaggagcaataagaactgtcccctatttataatgggtgtaaacagttttgtagaataatgctagcaccagacttacctaaaaatttctatagcagtggctgtgcttccctgctcaacggtttttatgaagctgtttacctcaacacacatctctataatcactttatacagagaggttatttctttttgttgcattagtattcttttgaaactttgggaccagatttccaaaatggtgccgaacactggananaagtaagaatgtcactgaattgtagggtttctggaggcttttctgtacctaccacccagggctaaagtaacatcagaggcctaaagttgttccaaaagtatgtgattggcaactgcagactaaaaaacatagatacaattctggacttttggccctgtgcgatggtctggtgtgctgcatttaaaatgcttattcaggaccagttctttattgctccatgaccatagtgaatagaacaaatcgcagaaccccaccatggagctcaatcctgttagtcacttttgtcacctccacatctncttctcactggtganaacatgcctcatgtactccacttgttcccaccttatgattaagccaagctcagcctgccaccagcatgctctgcaaggctgaagagtcatcctgaagacccctaaaggtcagtgggaaaaggatggctggagagacattacaattagctgtgtaattgtttctgtgaaattatttcacttatgtttactttagactaacaggaaattaagagtcctaaatctacccctatgccaaatcattccaagtagataattttacgtgcatctcaagggttagcaccctaaagcatgcttgtggggcattagaaaatgagatttttttttttttaaagcagagcctcctaagaacatcaaagttggtcctagcaaaatatataaagtccctaaagcaacttatacttgaaactttttttttttttttttttagaggggggcctcattctgttgcttgtgctggaatacattggtacaatcatagctcactgttacctcttgggctcaagggatccttccacctcagcctccctagtagctagaactacaggtgtgcacaaccacgcccggctaattcttaaattttgtttttgtagagacaggatctcactgtgttgcccaagatggtctcaaactcctggccccaagcaatcctcctgccttggcctcctcaaatgctgagattacaggcctgagctactgtgcccagcctaaactttcccacttctctctgtggcttctttccaacctctctccttcctctccccaagtcctgtttctttgaagctggtaactgaatttaagatgatatctgggttggtgtttaaggtttgagcctcccaagggtctgtgcattttgaaaggagatttctaaaaataattaaggtgccctaactcctttcctcatgattcctactccgaaacctggatggttaggagcccagggctccctgatttccagagctatatcctgttggacctttgccaacagacctgacacttaggggttattgttataaatctaattctctaatattttttacatgttgtttcactttgaataagcaaatgaagaatcagttttctaatatgactttatcctcaagctagagacactagcctatttggtaaatcacacattacttaggtatatttattactataaccaggttggagcttccatgtttaagctgggtatatgatgggtttttgttaaaatgtgccttaaaaagcctattacttcaagagcaaatgattctttgggggaaaggcaaaaataattctatgacatagggcccaagttcatggtagtaagtgtactctttgattaatcacacgctaatatagattactgcctctaactttgtaagtgtggcaatgacttcttaattaaagaaagatgcaggagttatgtctaagcgttcagtttttcaaatctgtgttattggaaatgtcttcaagtcattttgcattgtatttttgatatgagaggcagcttattgcgatgtgtatggccatgtttcattctcaaatttaattctataaatacaaatcctaaatacatggctacagcaactgcactggaacatttttgcttggttttagggattgagaacttgccttgcaggtttccttcctcaaaaggagcagggcagtcctttccctgttgagtcaattagaatttttacatagaggtgagactgtgaattattttggttattttcagtgatgtagattagtgtgaatgaccagggtggaatgtttttgaaggaatataaagcaaaaactggttgacattcacaaactgttcttttgtgaacatattttggacccttaaatatgactaaaatcacagcaatattgttacatacgggttatatgccaactctgtttgaaatatactctggaaaaacagctgaattgtcttggttattaaagtatggtatgtattcaa

SEQ ID NO: 326428 - DNA, 300 bp, Homo sapiens
cgccgtgggaagatggcggacggaaagggagacgccgccgctgtcgccggggctggggctgaggctccggcggtagcgggagccggagatggagtcgagactgagtccatggttcggggtcatcgccccgtatctccagcgccgggagcctcgggactgcggccgtgtctgtggcagctggagacagagctgagggagcaagaggtgtcggaggtctcatctttgaactactgccggagcttctgccagggagcggacatggactacgactcgtaccagcactatttctacgactatgac

SEQ ID NO: 326429 - DNA, 5992 bp, Homo sapiens
cgccgtgggaagatggcggacggaaagggagacgccgccgctgtcgccggggctggggctgaggctccggcggtagcgggagccggagatggagtcgagactgagtccatggttcggggtcatcgccccgtatctccagcgccgggagcctcgggactgcggccgtgtctgtggcagctggagacagagctgagggagcaagaggtgtcggaggtctcatctttgaactactgccggagcttctgccagactttattgcaatatgcaagcaacaagaatgcatcagaacatattgtgtatcttctggaggtatatcgacttgccatccaaagctttgccagtgcacgtccatacttaactactgaatgtgaagatgtcctcttagtgcttggcagattagtactgagttgtttcgaattactgctttcagtgtctgaaagtgaactgccatgtgaagtctggctaccattccttcagtctctacaggagtcacatgatgcattattggaatttgggaataataacctacaaatattggttcatgttaccaaggaaggggtgtggaaaaacccagttcttcttaaaattctgtctcaacagccagtagaaacggaggaagtcaataaattgattgcacaagaaggaccttcctttctgcaaatgcgaataaaacatttgttgaaatctaactgcatcccccaggctactgctttatcaaaactatgtgcagaatctaaagaaatttcaaatgtgtcatcttttcagcaagcctatatcacatgtttatgttctatgctccctaatgaagatgctattaaggagattgcaaaggtcgactgcaaggaagtactagacatcatttgtaatctggaatctgaggggcaggataacacagcatttgttctttgtacgacttaccttacccagcagctccaaactgcaagtgtatattgttcttgggaactgactcttttttggagtaaactgcaaagaagaattgacccttctttagatacttttttggagcgctgtcgtcagtttggtgtcatagctaaaacgcagcagcatttattttgcctcattagagttatacaaactgaagcacaagatgctggtcttggggtgtcaattttactgtgtgtcagagctcttcaactcagatcaagtgaagatgaggaaatgaaggcatcagtttgtaaaacaattgcctgtcttttaccagaagatttagaagttagacgagcctgtcagcttacagaattcttaattgaacccagtttggatggatttaatatgttagaagaactatatttgcaaccagatcaaaaatttgatgaagaaaatgcaccggttccaaattctcttcgatgtgagctcttactagctttaaaagcccactggccttttgatcctgagttttgggactggaaaactttaaaacgacactgccaccaacttttaggacaagaagcctcagattctgatgatgatttaagtggctatgaaatgtccattaatgacacagatgttttagagtcatttctcagtgactatgatgagggtaaagaagataaacaatatagaagaagagatttgacagatcagcataaggagaaaagagacaaaaaacctattggctcttctgaaagatatcagaggtggcttcagtacaagtttttctgtttgttatgtaagcgggaatgtatagaggctagaattcttcatcattctaagatgcatatggaagatggaatttacacctgtccagtttgtattaaaaaatttaagagaaaagaaatgtttgttcctcatgtgatggagcatgttaaaatgccaccaagcagaagggaccgctctaaaaagaaattactgttaaaaggctctcaaaagggtatttgtcctaagagcccctctgcaatcccagagcaaaaccattcattgaatgaccaagccaaaggagagtctcatgaatacgtcacattcagcaaattagaagattgccacctgcaagacagagatttgtatccatgtcccggtacagactgttcccgtgtgtttaagcaatttaaatacttaagtgtgcatcttaaagctgaacaccaaaataatgatgaaaatgccaagcactacttggatatgaaaaatagaagagagaagtgtacttactgtcgacgacattttatgtctgcttttcaccttcgagagcacgaacaagtgcattgtgggcctcagccttatatgtgtgtatctatagattgctatgctaggtttggatcagtaaatgaactacttaaccataaacaaaagcatgacgatctgcgttacaaatgtgaattaaatggctgtaatattgttttcagtgacttgggacagctttaccaccatgaagcacaacactttagggatgcatcttacacatgcaacttccttggctgtaaaaagttctattactccaaaattgaataccagaatcacctctcaatgcataatgttgaaaattcaaatggagacataaagaaatcagtgaaacttgaggagtctgcaacaggtgaaaagcaagattgtattaatcagccccatctacttaaccaaactgataaatcacatttacctgaagatcttttctgtgcagaatcagctaattctcaaatagatacagaaactgcagaaaacctgaaagaaaacagtgacagtaattctagtgatcagttaagtcatagctcttcagcttcaatgaatgaagagctaattgacacactagatcactctgaaactatgcaggatgtattgttatctaatgagaaagtctttgggccctccagtttaaaagaaaaatgttccagtatggcagtttgttttgacgggactaagtttacctgtggttttgatggctgtggttccacatacaaaaatgcaagaggaatgcagaaacatttacggaaggttcatccataccatttcaagcccaaaaagataaagacgaaagatctgtttccctctttgggtaatgaacataatcagacaactgaaaagttggatgcagaacctaaaccctgctcagatacaaacagtgactccccagatgaaggtctagatcacaatattcacattaaatgtaaacgagaacatcaaggttattcctcagaatcctccatttgtgcttctaaaaggccctgtacagaggataccatgttggaacttctgttacgcttgaaacatttaagcttgaaaaactcaataacacatggatctttctcagggtcattgcaggggtacccatccagtggtgctaagtctcttcagtcagtttcatctatctcagaccttaattttcagaatcaagatgaaaacatgccaagtcagtaccttgcacagttggcggctaagccgtttttctgtgagcttcaaggatgcaaatatgaatttgtgaccagagaggctctgttaatgcattatcttaaaaagcataattattcaaaagaaaaagtccttcagttaaccatgttccaacatcggtattccccatttcagtgtcatatttgccaaaggtcatttacaagaaaaacacaccttaggattcattataaaaataaacatcaaattggcagtgacagagcaactcacaaactattagataatgaaaagtgtgatcatgaaggcccatgttcagtagataggttgaaaggtgattgttctgcagaacttggaggtgatcccagtagtaactctgagaaaccacactgtcatcctaaaaaggatgaatgtagttctgaaacagatttggaatcatcttgtgaagaaacagaaagtaaaacatctgacatttcatcaccaataggcagccatagagaagaacaagaaggaagagagggcagaggtagcaggcgaactgttgctaaaggaaatctgtgttatattttgaataaataccacaaaccattccattgtattcataaaacttgcaactcctcattcaccaatctaaaaggcttaattcgccattacagaactgtacatcagtacaacaaagaacagttatgtttggagaaagacaaagcaagaaccaaaagggaacttgtcaaatgtaaaaagatatttgcttgcaaatataaggaatgtaataaacgcttcctgtgttccaaagctcttgctaagcactgtagtgattctcataacctagaccatattgaagagcctaaagtactttccgaagctggatctgcagcaaggttttcttgtaaccagcctcagtgccctgctgttttttatacattcaacaagttgaagcaccacttgatggaacagcataatattgaaggggaaatacattcagattatgaaattcattgtgatcttaatggctgtggccagattttcacccatcgcagtaattactcacaacatgtatattaccgacataaagactattatgatgatttgtttagaagccagaaagtagcaaatgagagactactaaggagtgaaaaggtatgtcaaacagctgatactcaggggcatgaacatcagaccaccaggagatcatttaatgctaagtctaaaaaatgtggcttaatcaaagaaaagaaagccccaataagttttaaaaccagagctgaggccctccatatgtgtgtggagcactctgagcacacacagtacccctgcatggttcaaggatgcttatctgtggtgaagttggagagcagcattgtgaggcattacaaacgcactcatcagatgagtagtgcctatttagagcaacagatggagaatcttgttgtttgcgttaagtacggtaccaaaattaaggaggaacccccttctgaagcagatccctgtataaagaaagaagaaaatagaagctgtgaatcagagcgcacagaacacagccattccccgggtgacagtagtgcacccatccagaacactgattgctgtcattcaagtgaaagggatggaggtcagaaagggtgcatagaaagcagctcagtatttgatgcagatactctgctctacaggggaactttgaaatgtaatcatagttccaaaaccacttccctagaacagtgtaatatagttcagcctcctcctccttgtaaaatagaaaattccatacctaatcccaatgggactgaaagtgggacttatttcacaagtttccagctgcctttaccaaggatcaaagaatcagaaactaggcagcatagttcagggcaagaaaacactgtaaaaaatccaacccatgtcccaaaagagaattttaggaaacattcacagccccggtcatttgatttgaagacttacaaacctatgggatttgaatcttcatttctgaaatttattcaggaaagtgaagagaaagaagatgattttgatgattgggagccttcagagcacttaacattaagtaattcttcacagtccagtaatgatttaacagggaatgttgtggcaaataatatggtgaatgacagtgaacctgaagttgacatacctcattcttccagtgactctacaattcatgagaacctgactgcaatcccacctttaatagtagctgaaacaacaacagttccttccttggaaaacctgagggttgtattggacaaagcattaacagactgtggagagcttgccttaaaacagcttcattatcttcggccagtggtggttcttgaaagatctaagttttccacaccaattttagacttatttccaacaaaaaagacagatgagctttgtgtaggaagttcataagtagcaattttgttttagtaacagactggctccaacactgcaacatggggacatttgccaactcgaacaaaggctgagaagcagccacaccgttgtttagggtagaataggctgtgtatttacatgaatgtataatatctatgtcagcagtattggctgagtccattagctctccagttggtttaatgattgggtttatttttgtttgtttgtttattaaaaaaatggaactgta

SEQ ID NO: 326430 - DNA, 6177 bp, Homo sapiens
cgccgtgggaagatggcggacggaaagggagacgccgccgctgtcgccggggctggggctgaggctccggcggtagcgggagccggagatggagtcgagactgagtccatggttcggggtcatcgccccgtatctccagcgccgggagcctcgggactgcggccgtgtctgtggcagctggagacagagctgagggagcaagaggtgtcggaggtctcatctttgaactactgccggagcttctgccagactttattgcaatatgcaagcaacaagaatgcatcagaacatattgtgtatcttctggaggtatatcgacttgccatccaaagctttgccagtgcacgtccatacttaactactgaatgtgaagatgtcctcttagtgcttggcagattagtactgagttgtttcgaattactgctttcagtgtctgaaagtgaactgccatgtgaagtctggctaccattccttcagtctctacaggagtcacatgatgcattattggaatttgggaataataacctacaaatattggttcatgttaccaaggaaggggtgtggaaaaacccagttcttcttaaaattctgtctcaacagccagtagaaacggaggaagtcaataaattgattgcacaagaaggaccttcctttctgcaaatgcgaataaaacatttgttgaaatctaactgcatcccccaggctactgctttatcaaaactatgtgcagaatctaaagaaatttcaaatgtgtcatcttttcagcaagcctatatcacatgtttatgttctatgctccctaatgaagatgctattaaggagattgcaaaggtcgactgcaaggaagtactagacatcatttgtaatctggaatctgaggggcaggataacacagcatttgttctttgtacgacttaccttacccagcagctccaaactgcaagtgtatattgttcttgggaactgactcttttttggagtaaactgcaaagaagaattgacccttctttagatacttttttggagcgctgtcgtcagtttggtgtcatagctaaaacgcagcagcatttattttgcctcattagagttatacaaactgaagcacaagatgctggtcttggggtgtcaattttactgtgtgtcagagctcttcaactcagatcaagtgaagatgaggaaatgaaggcatcagtttgtaaaacaattgcctgtcttttaccagaagatttagaagttagacgagcctgtcagcttacagaattcttaattgaacccagtttggatggatttaatatgttagaagaactatatttgcaaccagatcaaaaatttgatgaagaaaatgcaccggttccaaattctcttcgatgtgagctcttactagctttaaaagcccactggccttttgatcctgagttttgggactggaaaactttaaaacgacactgccaccaacttttaggacaagaagcctcagattctgatgatgatttaagtggctatgaaatgtccattaatgacacagatgttttagagtcatttctcagtgactatgatgagggtaaagaagataaacaatatagaagaagagatttgacagatcagcataaggagaaaagagacaaaaaacctattggctcttctgaaagatatcagaggtggcttcagtacaagtttttctgtttgttatgtaagcgggaatgtatagaggctagaattcttcatcattctaagatgcatatggaagatggaatttacacctgtccagtttgtattaaaaaatttaagagaaaagaaatgtttgttcctcatgtgatggagcatgttaaaatgccaccaagcagaagggaccgctctaaaaagaaattactgttaaaaggctctcaaaagggtatttgtcctaagagcccctctgcaatcccagagcaaaaccattcattgaatgaccaagccaaaggagagtctcatgaatacgtcacattcagcaaattagaagattgccacctgcaagacagagatttgtatccatgtcccggtacagactgttcccgtgtgtttaagcaatttaaatacttaagtgtgcatcttaaagctgaacaccaaaataatgatgaaaatgccaagcactacttggatatgaaaaatagaagagagaagtgtacttactgtcgacgacattttatgtctgcttttcaccttcgagagcacgaacaagtgcattgtgggcctcagccttatatgtgtgtatctatagattgctatgctaggtttggatcagtaaatgaactacttaaccataaacaaaagcatgacgatctgcgttacaaatgtgaattaaatggctgtaatattgttttcagtgacttgggacagctttaccaccatgaagcacaacactttagggatgcatcttacacatgcaacttccttggctgtaaaaagttctattactccaaaattgaataccagaatcacctctcaatgcataatgttgaaaattcaaatggagacataaagaaatcagtgaaacttgaggagtctgcaacaggtgaaaagcaagattgtattaatcagccccatctacttaaccaaactgataaatcacatttacctgaagatcttttctgtgcagaatcagctaattctcaaatagatacagaaactgcagaaaacctgaaagaaaacagtgacagtaattctagtgatcagttaagtcatagctcttcagcttcaatgaatgaagagctaattgacacactagatcactctgaaactatgcaggatgtattgttatctaatgagaaagtctttgggccctccagtttaaaagaaaaatgttccagtatggcagtttgttttgacgggactaagtttacctgtggttttgatggctgtggttccacatacaaaaatgcaagaggaatgcagaaacatttacggaaggttcatccataccatttcaagcccaaaaagataaagacgaaagatctgtttccctctttgggtaatgaacataatcagacaactgaaaagttggatgcagaacctaaaccctgctcagatacaaacagtgactccccagatgaaggtctagatcacaatattcacattaaatgtaaacgagaacatcaaggttattcctcagaatcctccatttgtgcttctaaaaggccctgtacagaggataccatgttggaacttctgttacgcttgaaacatttaagcttgaaaaactcaataacacatggatctttctcagggtcattgcaggggtacccatccagtggtgctaagtctcttcagtcagtttcatctatctcagaccttaattttcagaatcaagatgaaaacatgccaagtcagtaccttgcacagttggcggctaagccgtttttctgtgagcttcaaggatgcaaatatgaatttgtgaccagagaggctctgttaatgcattatcttaaaaagcataattattcaaaagaaaaagtccttcagttaaccatgttccaacatcggtattccccatttcagtgtcatatttgccaaaggtcatttacaagaaaaacacaccttaggattcattataaaaataaacatcaaattggcagtgacagagcaactcacaaactattagataatgaaaagtgtgatcatgaaggcccatgttcagtagataggttgaaaggtgattgttctgcagaacttggaggtgatcccagtagtaactctgagaaaccacactgtcatcctaaaaaggatgaatgtagttctgaaacagatttggaatcatcttgtgaagaaacagaaagtaaaacatctgacatttcatcaccaataggcagccatagagaagaacaagaaggaagagagggcagaggtagcaggcgaactgttgctaaaggaaatctgtgttatattttgaataaataccacaaaccattccattgtattcataaaacttgcaactcctcattcaccaatctaaaaggcttaattcgccattacagaactgtacatcagtacaacaaagaacagttatgtttggagaaagacaaagcaagaaccaaaagggaacttgtcaaatgtaaaaagatatttgcttgcaaatataaggaatgtaataaacgcttcctgtgttccaaagctcttgctaagcactgtagtgattctcataacctagaccatattgaagagcctaaagtactttccgaagctggatctgcagcaaggttttcttgtaaccagcctcagtgccctgctgttttttatacattcaacaagttgaagcaccacttgatggaacagcataatattgaaggggaaatacattcagattatgaaattcattgtgatcttaatggctgtggccagattttcacccatcgcagtaattactcacaacatgtatattaccgacataaagactattatgatgatttgtttagaagccagaaagtagcaaatgagagactactaaggagtgaaaaggtatgtcaaacagctgatactcaggggcatgaacatcagaccaccaggagatcatttaatgctaagtctaaaaaatgtggcttaatcaaagaaaagaaagccccaataagttttaaaaccagagctgaggccctccatatgtgtgtggagcactctgagcacacacagtacccctgcatggttcaaggatgcttatctgtggtgaagttggagagcagcattgtgaggcattacaaacgcactcatcagatgagtagtgcctatttagagcaacagatggagaatcttgttgtttgcgttaagtacggtaccaaaattaaggaggaacccccttctgaagcagatccctgtataaagaaagaagaaaatagaagctgtgaatcagagcgcacagaacacagccattccccgggtgacagtagtgcacccatccagaacactgattgctgtcattcaagtgaaagggatggaggtcagaaagggtgcatagaaagcagctcagtatttgatgcagatactctgctctacaggggaactttgaaatgtaatcatagttccaaaaccacttccctagaacagtgtaatatagttcagcctcctcctccttgtaaaatagaaaattccatacctaatcccaatgggactgaaagtgggacttatttcacaagtttccagctgcctttaccaaggatcaaagaatcagaaactaggcagcatagttcagggcaagaaaacactgtaaaaaatccaacccatgtcccaaaacctatgggatttgaatcttcatttctgaaatttattcaggaaagtgaagagaaagaagatgattttgatgattgggagccttcagagcacttaacattaagtaattcttcacagtccagtaatgatttaacagggaatgttgtggcaaataatatggtgaatgacagtgaacctgaagttgacatacctcattcttccagtgactctacaattcatgagaacctgactgcaatcccacctttaatagtagctgaaacaacaacagttccttccttggaaaacctgagggttgtattggacaaagcattaacagactgtggagagcttgccttaaaacagcttcattatcttcggccagtggtggttcttgaaagatctaagttttccacaccaattttagacttatttccaacaaaaaagacagatgagctttgtgtaggaagttcataagtagcaattttgttttagtaacagactggctccaacactgcaacatggggacatttgccaactcgaacaaaggctgagaagcagccacaccgttgtttagggtagaataggctgtgtatttacatgaatgtataatatctatgtcagcagtattggctgagtccattagctctccagttggtttaatgattgggtttatttttgtttgtttgtttattaaaaaaatggaactgtacacttgtttggtgctaattaatacatcaaaatatactggggcttcctttttcaaattaagtgtgcatgattgtatatggaacaaatactaaggtcccagggtgggagggctagggaaagggatatggagttcttacttgacttgaatgtgcacctgagggtgctttgtgtaatatattgtacactacagcatcttatattttttgagttgagtttcaataaattacaatttttcaccca

SEQ ID NO: 326431 - DNA, 712 bp, Homo sapiens
cgccgtgggaagatggcggacggaaagggagacgccgccgctgtcgccggggctggggctgaggctccggcggtagcgggagccggagatggagtcgagactgagtccatggttcggggtcatcgccccgtatctccagcgccgggagcctcgggactgcggccgtgtctgtggcagctggagacagagctgagggagcaagaggtgtcggaggtctcatctttgaactactgccggagcttctgccagactttattgcaatatgcaagcaacaagaatgcatcagaacatattgtgtatcttctggaggtatatcgacttgccatccaaagctttgccagtgcacgtccatacttaactactgaatgtgaagatgtcctcttagtgcttggcagattagtactgtaagtttgagaacttaaatcactcttaaaattgagtaccattggtcgtgttgtttgcctggtttctctttacagtggcatcacatttattcttcagagcaccattagagtcataccattgaatgaaatttccttcctactcacgttcccaggagatatagtccaagtgaagctccagccaagcaacatcatctttaacttgcctctagagtctcttttcctattcaggcttggaatctgagaatgatatatttctatcccttaggtatagattgatttaaatgacagaatacctggaaactggtagt

SEQ ID NO: 326432 - DNA, 6231 bp, Homo sapiens
cgccgtgggaagatggcggacggaaagggagacgccgccgctgtcgccggggctggggctgaggctccggcggtagcgggagccggagatggagtcgagactgagtccatggttcggggtcatcgccccgtatctccagcgccgggagcctcgggactgcggccgtgtctgtggcagctggagacagagctgagggagcaagaggtgtcggaggtctcatctttgaactactgccggagcttctgccagactttattgcaatatgcaagcaacaagaatgcatcagaacatattgtgtatcttctggaggtatatcgacttgccatccaaagctttgccagtgcacgtccatacttaactactgaatgtgaagatgtcctcttagtgcttggcagattagtactgagttgtttcgaattactgctttcagtgtctgaaagtgaactgccatgtgaagtctggctaccattccttcagtctctacaggagtcacatgatgcattattggaatttgggaataataacctacaaatattggttcatgttaccaaggaaggggtgtggaaaaacccagttcttcttaaaattctgtctcaacagccagtagaaacggaggaagtcaataaattgattgcacaagaaggaccttcctttctgcaaatgcgaataaaacatttgttgaaatctaactgcatcccccaggctactgctttatcaaaactatgtgcagaatctaaagaaatttcaaatgtgtcatcttttcagcaagcctatatcacatgtttatgttctatgctccctaatgaagatgctattaaggagattgcaaaggtcgactgcaaggaagtactagacatcatttgtaatctggaatctgaggggcaggataacacagcatttgttctttgtacgacttaccttacccagcagctccaaactgcaagtgtatattgttcttgggaactgactcttttttggagtaaactgcaaagaagaattgacccttctttagatacttttttggagcgctgtcgtcagtttggtgtcatagctaaaacgcagcagcatttattttgcctcattagagttatacaaactgaagcacaagatgctggtcttggggtgtcaattttactgtgtgtcagagctcttcaactcagatcaagtgaagatgaggaaatgaaggcatcagtttgtaaaacaattgcctgtcttttaccagaagatttagaagttagacgagcctgtcagcttacagaattcttaattgaacccagtttggatggatttaatatgttagaagaactatatttgcaaccagatcaaaaatttgatgaagaaaatgcaccggttccaaattctcttcgatgtgagctcttactagctttaaaagcccactggccttttgatcctgagttttgggactggaaaactttaaaacgacactgccaccaacttttaggacaagaagcctcagattctgatgatgatttaagtggctatgaaatgtccattaatgacacagatgttttagagtcatttctcagtgactatgatgagggtaaagaagataaacaatatagaagaagagatttgacagatcagcataaggagaaaagagacaaaaaacctattggctcttctgaaagatatcagaggtggcttcagtacaagtttttctgtttgttatgtaagcgggaatgtatagaggctagaattcttcatcattctaagatgcatatggaagatggaatttacacctgtccagtttgtattaaaaaatttaagagaaaagaaatgtttgttcctcatgtgatggagcatgttaaaatgccaccaagcagaagggaccgctctaaaaagaaattactgttaaaaggctctcaaaagggtatttgtcctaagagcccctctgcaatcccagagcaaaaccattcattgaatgaccaagccaaaggagagtctcatgaatacgtcacattcagcaaattagaagattgccacctgcaagacagagatttgtatccatgtcccggtacagactgttcccgtgtgtttaagcaatttaaatacttaagtgtgcatcttaaagctgaacaccaaaataatgatgaaaatgccaagcactacttggatatgaaaaatagaagagagaagtgtacttactgtcgacgacattttatgtctgcttttcaccttcgagagcacgaacaagtgcattgtgggcctcagccttatatgtgtgtatctatagattgctatgctaggtttggatcagtaaatgaactacttaaccataaacaaaagcatgacgatctgcgttacaaatgtgaattaaatggctgtaatattgttttcagtgacttgggacagctttaccaccatgaagcacaacactttagggatgcatcttacacatgcaacttccttggctgtaaaaagttctattactccaaaattgaataccagaatcacctctcaatgcataatgttgaaaattcaaatggagacataaagaaatcagtgaaacttgaggagtctgcaacaggtgaaaagcaagattgtattaatcagccccatctacttaaccaaactgataaatcacatttacctgaagatcttttctgtgcagaatcagctaattctcaaatagatacagaaactgcagaaaacctgaaagaaaacagtgacagtaattctagtgatcagttaagtcatagctcttcagcttcaatgaatgaagagctaattgacacactagatcactctgaaactatgcaggatgtattgttatctaatgagaaagtctttgggccctccagtttaaaagaaaaatgttccagtatggcagtttgttttgacgggactaagtttacctgtggttttgatggctgtggttccacatacaaaaatgcaagaggaatgcagaaacatttacggaaggttcatccataccatttcaagcccaaaaagataaagacgaaagatctgtttccctctttgggtaatgaacataatcagacaactgaaaagttggatgcagaacctaaaccctgctcagatacaaacagtgactccccagatgaaggtctagatcacaatattcacattaaatgtaaacgagaacatcaaggttattcctcagaatcctccatttgtgcttctaaaaggccctgtacagaggataccatgttggaacttctgttacgcttgaaacatttaagcttgaaaaactcaataacacatggatctttctcagggtcattgcaggggtacccatccagtggtgctaagtctcttcagtcagtttcatctatctcagaccttaattttcagaatcaagatgaaaacatgccaagtcagtaccttgcacagttggcggctaagccgtttttctgtgagcttcaaggatgcaaatatgaatttgtgaccagagaggctctgttaatgcattatcttaaaaagcataattattcaaaagaaaaagtccttcagttaaccatgttccaacatcggtattccccatttcagtgtcatatttgccaaaggtcatttacaagaaaaacacaccttaggattcattataaaaataaacatcaaattggcagtgacagagcaactcacaaactattagataatgaaaagtgtgatcatgaaggcccatgttcagtagataggttgaaaggtgattgttctgcagaacttggaggtgatcccagtagtaactctgagaaaccacactgtcatcctaaaaaggatgaatgtagttctgaaacagatttggaatcatcttgtgaagaaacagaaagtaaaacatctgacatttcatcaccaataggcagccatagagaagaacaagaaggaagagagggcagaggtagcaggcgaactgttgctaaaggaaatctgtgttatattttgaataaataccacaaaccattccattgtattcataaaacttgcaactcctcattcaccaatctaaaaggcttaattcgccattacagaactgtacatcagtacaacaaagaacagttatgtttggagaaagacaaagcaagaaccaaaagggaacttgtcaaatgtaaaaagatatttgcttgcaaatataaggaatgtaataaacgcttcctgtgttccaaagctcttgctaagcactgtagtgattctcataacctagaccatattgaagagcctaaagtactttccgaagctggatctgcagcaaggttttcttgtaaccagcctcagtgccctgctgttttttatacattcaacaagttgaagcaccacttgatggaacagcataatattgaaggggaaatacattcagattatgaaattcattgtgatcttaatggctgtggccagattttcacccatcgcagtaattactcacaacatgtatattaccgacataaagactattatgatgatttgtttagaagccagaaagtagcaaatgagagactactaaggagtgaaaaggtatgtcaaacagctgatactcaggggcatgaacatcagaccaccaggagatcatttaatgctaagtctaaaaaatgtggcttaatcaaagaaaagaaagccccaataagttttaaaaccagagctgaggccctccatatgtgtgtggagcactctgagcacacacagtacccctgcatggttcaaggatgcttatctgtggtgaagttggagagcagcattgtgaggcattacaaacgcactcatcagatgagtagtgcctatttagagcaacagatggagaatcttgttgtttgcgttaagtacggtaccaaaattaaggaggaacccccttctgaagcagatccctgtataaagaaagaagaaaatagaagctgtgaatcagagcgcacagaacacagccattccccgggtgacagtagtgcacccatccagaacactgattgctgtcattcaagtgaaagggatggaggtcagaaagggtgcatagaaagcagctcagtatttgatgcagatactctgctctacaggggaactttgaaatgtaatcatagttccaaaaccacttccctagaacagtgtaatatagttcagcctcctcctccttgtaaaatagaaaattccatacctaatcccaatgggactgaaagtgggacttatttcacaagtttccagctgcctttaccaaggatcaaagaatcagaaactaggcagcatagttcagggcaagaaaacactgtaaaaaatccaacccatgtcccaaaagagaattttaggaaacattcacagccccggtcatttgatttgaagacttacaaacctatgggatttgaatcttcatttctgaaatttattcaggaaagtgaagagaaagaagatgattttgatgattgggagccttcagagcacttaacattaagtaattcttcacagtccagtaatgatttaacagggaatgttgtggcaaataatatggtgaatgacagtgaacctgaagttgacatacctcattcttccagtgactctacaattcatgagaacctgactgcaatcccacctttaatagtagctgaaacaacaacagttccttccttggaaaacctgagggttgtattggacaaagcattaacagactgtggagagcttgccttaaaacagcttcattatcttcggccagtggtggttcttgaaagatctaagttttccacaccaattttagacttatttccaacaaaaaagacagatgagctttgtgtaggaagttcataagtagcaattttgttttagtaacagactggctccaacactgcaacatggggacatttgccaactcgaacaaaggctgagaagcagccacaccgttgtttagggtagaataggctgtgtatttacatgaatgtataatatctatgtcagcagtattggctgagtccattagctctccagttggtttaatgattgggtttatttttgtttgtttgtttattaaaaaaatggaactgtacacttgtttggtgctaattaatacatcaaaatatactggggcttcctttttcaaattaagtgtgcatgattgtatatggaacaaatactaaggtcccagggtgggagggctagggaaagggatatggagttcttacttgacttgaatgtgcacctgagggtgctttgtgtaatatattgtacactacagcatcttatattttttgagttgagtttcaataaattacaatttttcaccca

SEQ ID NO: 326433 - DNA, 6354 bp, Homo sapiens
cgccgtgggaagatggcggacggaaagggagacgccgccgctgtcgccggggctggggctgaggctccggcggtagcgggagccggagatggagtcgagactgagtccatggttcggggtcatcgccccgtatctccagcgccgggagcctcgggactgcggccgtgtctgtggcagctggagacagagctgagggagcaagaggtgtcggaggtctcatctttgaactactgccggagcttctgccagactttattgcaatatgcaagcaacaagaatgcatcagaacatattgtgtatcttctggaggtatatcgacttgccatccaaagctttgccagtgcacgtccatacttaactactgaatgtgaagatgtcctcttagtgcttggcagattagtactgagttgtttcgaattactgctttcagtgtctgaaagtgaactgccatgtgaagtctggctaccattccttcagtctctacaggagtcacatgatgcattattggaatttgggaataataacctacaaatattggttcatgttaccaaggaaggggtgtggaaaaacccagttcttcttaaaattctgtctcaacagccagtagaaacggaggaagtcaataaattgattgcacaagaaggaccttcctttctgcaaatgcgaataaaacatttgttgaaatctaactgcatcccccaggctactgctttatcaaaactatgtgcagaatctaaagaaatttcaaatgtgtcatcttttcagcaagcctatatcacatgtttatgttctatgctccctaatgaagatgctattaaggagattgcaaaggtcgactgcaaggaagtactagacatcatttgtaatctggaatctgaggggcaggataacacagcatttgttctttgtacgacttaccttacccagcagctccaaactgcaagtgtatattgttcttgggaactgactcttttttggagtaaactgcaaagaagaattgacccttctttagatacttttttggagcgctgtcgtcagtttggtgtcatagctaaaacgcagcagcatttattttgcctcattagagttatacaaactgaagcacaagatgctggtcttggggtgtcaattttactgtgtgtcagagctcttcaactcagatcaagtgaagatgaggaaatgaaggcatcagtttgtaaaacaattgcctgtcttttaccagaagatttagaagttagacgagcctgtcagcttacagaattcttaattgaacccagtttggatggatttaatatgttagaagaactatatttgcaaccagatcaaaaatttgatgaagaaaatgcaccggttccaaattctcttcgatgtgagctcttactagctttaaaagcccactggccttttgatcctgagttttgggactggaaaactttaaaacgacactgccaccaacttttaggacaagaagcctcagattctgatgatgatttaagtggctatgaaatgtccattaatgacacagatgttttagagtcatttctcagtgactatgatgagggtaaagaagataaacaatatagaagaagagatttgacagatcagcataaggagaaaagagacaaaaaacctattggctcttctgaaagatatcagaggtggcttcagtacaagtttttctgtttgttatgtaagcgggaatgtatagaggctagaattcttcatcattctaagatgcatatggaagatggaatttacacctgtccagtttgtattaaaaaatttaagagaaaagaaatgtttgttcctcatgtgatggagcatgttaaaatgccaccaagcagaagggaccgctctaaaaagaaattactgttaaaaggctctcaaaagggtatttgtcctaagagcccctctgcaatcccagagcaaaaccattcattgaatgaccaagccaaaggagagtctcatgaatacgtcacattcagcaaattagaagattgccacctgcaagacagagatttgtatccatgtcccggtacagactgttcccgtgtgtttaagcaatttaaatacttaagtgtgcatcttaaagctgaacaccaaaataatgatgaaaatgccaagcactacttggatatgaaaaatagaagagagaagtgtacttactgtcgacgacattttatgtctgcttttcaccttcgagagcacgaacaagtgcattgtgggcctcagccttatatgtgtgtatctatagattgctatgctaggtttggatcagtaaatgaactacttaaccataaacaaaagcatgacgatctgcgttacaaatgtgaattaaatggctgtaatattgttttcagtgacttgggacagctttaccaccatgaagcacaacactttagggatgcatcttacacatgcaacttccttggctgtaaaaagttctattactccaaaattgaataccagaatcacctctcaatgcataatgttgaaaattcaaatggagacataaagaaatcagtgaaacttgaggagtctgcaacaggtgaaaagcaagattgtattaatcagccccatctacttaaccaaactgataaatcacatttacctgaagatcttttctgtgcagaatcagctaattctcaaatagatacagaaactgcagaaaacctgaaagaaaacagtgacagtaattctagtgatcagttaagtcatagctcttcagcttcaatgaatgaagagctaattgacacactagatcactctgaaactatgcaggatgtattgttatctaatgagaaagtctttgggccctccagtttaaaagaaaaatgttccagtatggcagtttgttttgacgggactaagtttacctgtggttttgatggctgtggttccacatacaaaaatgcaagaggaatgcagaaacatttacggaaggttcatccataccatttcaagcccaaaaagataaagacgaaagatctgtttccctctttgggtaatgaacataatcagacaactgaaaagttggatgcagaacctaaaccctgctcagatacaaacagtgactccccagatgaaggtctagatcacaatattcacattaaatgtaaacgagaacatcaaggttattcctcagaatcctccatttgtgcttctaaaaggccctgtacagaggataccatgttggaacttctgttacgcttgaaacatttaagcttgaaaaactcaataacacatggatctttctcagggtcattgcaggggtacccatccagtggtgctaagtctcttcagtcagtttcatctatctcagaccttaattttcagaatcaagatgaaaacatgccaagtcagtaccttgcacagttggcggctaagccgtttttctgtgagcttcaaggatgcaaatatgaatttgtgaccagagaggctctgttaatgcattatcttaaaaagcataattattcaaaagaaaaagtccttcagttaaccatgttccaacatcggtattccccatttcagtgtcatatttgccaaaggtcatttacaagaaaaacacaccttaggattcattataaaaataaacatcaaattggcagtgacagagcaactcacaaactattagataatgaaaagtgtgatcatgaaggcccatgttcagtagataggttgaaaggtgattgttctgcagaacttggaggtgatcccagtagtaactctgagaaaccacactgtcatcctaaaaaggatgaatgtagttctgaaacagatttggaatcatcttgtgaagaaacagaaagtaaaacatctgacatttcatcaccaataggcagccatagagaagaacaagaaggaagagagggcagaggtagcaggcgaactgttgctaaaggaaatctgtgttatattttgaataaataccacaaaccattccattgtattcataaaacttgcaactcctcattcaccaatctaaaaggcttaattcgccattacagaactgtacatcagtacaacaaagaacagttatgtttggagaaagacaaagcaagaaccaaaagggaacttgtcaaatgtaaaaagatatttgcttgcaaatataaggaatgtaataaacgcttcctgtgttccaaagctcttgctaagcactgtagtgattctcataacctagaccatattgaagagcctaaagtactttccgaagctggatctgcagcaaggttttcttgtaaccagcctcagtgccctgctgttttttatacattcaacaagttgaagcaccacttgatggaacagcataatattgaaggggaaatacattcagattatgaaattcattgtgatcttaatggctgtggccagattttcacccatcgcagtaattactcacaacatgtatattaccgacataaagactattatgatgatttgtttagaagccagaaagtagcaaatgagagactactaaggagtgaaaaggtatgtcaaacagctgatactcaggggcatgaacatcagaccaccaggagatcatttaatgctaagtctaaaaaatgtggcttaatcaaagaaaagaaagccccaataagttttaaaaccagagctgaggccctccatatgtgtgtggagcactctgagcacacacagtacccctgcatggttcaaggatgcttatctgtggtgaagttggagagcagcattgtgaggcattacaaacgcactcatcagatgagtagtgcctatttagagcaacagatggagaatcttgttgtttgcgttaagtacggtaccaaaattaaggaggaacccccttctgaagcagatccctgtataaagaaagaagaaaatagaagctgtgaatcagagcgcacagaacacagccattccccgggtgacagtagtgcacccatccagaacactgattgctgtcattcaagtgaaagggatggaggtcagaaagggtgcatagaaagcagctcagtatttgatgcagatactctgctctacaggggaactttgaaatgtaatcatagttccaaaaccacttccctagaacagtgtaatatagttcagcctcctcctccttgtaaaatagaaaattccatacctaatcccaatgggactgaaagtgggacttatttcacaagtttccagctgcctttaccaaggatcaaagaatcagaaactaggcagcatagttcagggcaagaaaacactgtaaaaaatccaacccatgtcccaaaagagaattttaggaaacattcacagccccggtcatttgatttgaagacttacaaacctatgggatttgaatcttcatttctgaaatttattcaggaaagtgaagagaaagaagatgattttgatgattgggagccttcagagcacttaacattaagtaattcttcacagtccagtaatgatttaacagggaatgttgtggcaaataatatggtgaatgacagtgaacctgaagttgacatacctcattcttccagtgactctacaattcatgagaacctgactgcaatcccacctttaatagtagctgaaacaacaacagttccttccttggaaaacctgagggttgtattggacaaagcattaacagactgtggagagcttgccttaaaacagcttcattatcttcggccagtggtggttcttgaaagatctaagttttccacaccaattttagacttatttccaacaaaaaagacagatgagctttgtgtaggaagttcataagtagcaattttgttttagtaacagactggctccaacactgcaacatggggacatttgccaactcgaacaaaggctgagaagcagccacaccgttgtttagggtagaataggctgtgtatttacatgaatgtataatatctatgtcagcagtattggctgagtccattagctctccagttggtttaatgattgggtttatttttgtttgtttgtttattaaaaaaatggaactgtacacttgtttggtgctaattaatacatcaaaatatactggggcttcctttttcaaattaagtgtgcatgattgtatatggaacaaatactaaggtcccagggtgggagggctagggaaagggatatggagttcttacttgacttgaatgtgcacctgagggtgctttgtgtaatatattgtacactacagcatcttatattttttgagttgagtttcaataaattacaatttttcacccaaaaaaaaaaaaaaaaaaggggcccgccaaagtacccggggccattcgacccattctgcaaaggccaaagaataacaagcgcccaaaacgaggaagatggcttgcaacattgggaacgaccaaa

SEQ ID NO: 326434 - DNA, 2482 bp, Homo sapiens
cgccgtgggaagatggcggacggaaagggagacgccgccgctgtcgccggggctggggctgaggctccggcggtagcgggagccggagatggagtcgagactgagtccatggttcggggtcatcgccccgtatctccagcgccgggagcctcgggactgcggccgtgtctgtggcagctggagacagagctgagggagcaagaggtgtcggaggtctcatctttgaactactgccggagcttctgccagactttattgcaatatgcaagcaacaagaatgcatcagaacatattgtgtatcttctggaggtatatcgacttgccatccaaagctttgccagtgcacgtccatacttaactactgaatgtgaagatgtcctcttagtgcttggcagattagtactgagttgtttcgaattactgctttcagtgtctgaaagtgaactgccatgtgaagtctggctaccattccttcagtctctacaggagtcacatgatgcattattggaatttgggaataataacctacaaatattggttcatgttaccaaggaaggggtgtggaaaaacccagttcttcttaaaattctgtctcaacagccagtagaaacggaggaagtcaataaattgattgcacaagaaggaccttcctttctgcaaatgcgaataaaacatttgttgaaatctaactgcatcccccaggctactgctttatcaaaactatgtgcagaatctaaagaaatttcaaatgtgtcatcttttcagcaagcctatatcacatgtttatgttctatgctccctaatgaagatgctattaaggagattgcaaaggtcgactgcaaggaagtactagacatcatttgtaatctggaatctgaggggcaggataacacagcatttgttctttgtacgacttaccttacccagcagctccaaactgcaagtgtatattgttcttgggaactgactcttttttggagtaaactgcaaagaagaattgacccttctttagatacttttttggagcgctgtcgtcagtttggtgtcatagctaaaacgcagcagcatttattttgcctcattagagttatacaaactgaagcacaagatgctggtcttggggtgtcaattttactgtgtgtcagagctcttcaactcagatcaagtgaagatgaggaaatgaaggcatcagtttgtaaaacaattgcctgtcttttaccagaagatttagaagttagacgagcctgtcagcttacagaattcttaattgaacccagtttggatggatttaatatgttagaagaactatatttgcaaccagatcaaaaatttgatgaagaaaatgcaccggttccaaattctcttcgatgtgagctcttactagctttaaaagcccactggccttttgatcctgagttttgggactggaaaactttaaaacgacactgccaccaacttttaggacaagaagcctcagattctgatgatgatttaagtggctatgaaatgtccattaatgacacagatgttttagagtcatttctcagtgactatgatgagggtaaagaagataaacaatatagaagaagagatttgacagatcagcataaggagaaaagagacaaaaaacctattggctcttctgaaagatatcagaggtggcttcagtacaagtttttctgtttgttatgtaagcgggaatgtatagaggctagaattcttcatcattctaagatgcatatggaagatggaatttacacctgtccagtttgtattaaaaaatttaagagaaaagaaatgtttgttcctcatgtgatggagcatgttaaaatgccaccaagcagaagggaccgctctaaaaagaaattactgttaaaaggctctcaaaagggtatttgtcctaagagcccctctgcaatcccagagcaaaaccattcattgaatgaccaagccaaaggagagtctcatgaatacgtcacattcagcaaattagaagattgccacctgcaagacagagatttgtatccatgtcccggtacagactgttcccgtgtgtttaagcaatttaaatacttaagtgtgcatcttaaagctgaacaccaaaataatgatgaaaatgccaagcactacttggatatgaaaaatagaagagagaagtgtacttactgtcgacgacattttatgtctgcttttcaccttcgagagcacgaacaagtgcattgtgggcctcagccttatatgtgtgtatctatagattgctatgctaggtttggatcagtaaatgaactacttaaccataaacaaaagcatgacgatctgcgttacaaatgtgaattaaatggctgtaatattgttttcagtgacttgggacagctttaccaccatggcacgtggatccacaagggcacgtggatcacaatggcacgtggatcacaatggcacgtggatcacaatggcacgtggatcacaatggcacgtggat

SEQ ID NO: 326435 - DNA, 279 bp, Homo sapiens
cccactgtcccctctctcgggctcagagcctctacccccacgaagtgcctgctttgtgctggatggggttgctgtgcacagttctttgtccctctcttgcatccgtgttgctcactcttactggaaatgcccaggcccttccgagtcctcacttggataactgtggcagcctccagcctcacctccaaccttaggaacctggtgggagacccctgactgcacacagtaccctccatcctcctccccagccttggtcctgcccccgactgccattcagta

SEQ ID NO: 326436 - DNA, 466 bp, Homo sapiens
gtccagggtggttggggaaggtagtgtcccatcacagaggagactagatgcaattttttcctgcccctggtccctagtgtgggagcttggccattcttctggatgtccctggcttgaggaggatctgtactgtgggcctccccagggcctgagcagttgtgcatgttgggctaggaggggcccagactggacatcctgttaagtacagtggcccaagtctcagccagaaagtggacactgggatccaggagggatctaggaggcacctgaatgagtcagagcagcccagtgaataggattagtgagttattatagctctctggcagttgctgcctgctatgccttagttgtaacagagggaagtcacctctgtgactaagaccgggcttatagcaccacagggaactcacccagacctgtgggctttgggtagaggttggctgttcagaggctgtagagccaggca

SEQ ID NO: 326437 - DNA, 416 bp, Homo sapiens
catgatgggtgcacaattgcttattgacatttctacttggattttacataggcatcttaatcttatgacctttcccctggtcctattccagtttttcctgtctctatgaatgaaatcactgcccatcttgttgtacaagctagaaagctgagtcacctttgacacctccctctctttcacctccatattgacccactatggagtcctggcatttgcctcctgaatagcttctaatcttctgcctggtcacgtctaccaccaccacatgacctaagccaccacagtgtcttgtctggactgttgtatttcctaacaaatattcctgcatccactcttactcctatcaatccccaactccaaactcgttgccagactgcagccagtcccagtttggaactcttaatctgataccccaa

SEQ ID NO: 326438 - DNA, 267 bp, Homo sapiens
gttaccaaatctctgacaagcatatattctttccagtcttcacagggcacgcttcggcccttgctaggagtccatcgttctgccataacatttgctcccaggtcatctgcttgcaagaggcaatcgagagtttgggaaacccttacaaaagaaatgacaatagtttatttttagctcctgacattttgtgctcctaatacccagtaagcctttctgccccacagtcaggatgctttaattggcagtaaatggtgaggcggtaaccca

SEQ ID NO: 326439 - DNA, 910 bp, Homo sapiens
gctctgattgaagacagacaacagacctgcccagcctcaagttcccctttctttcccttccccaagatgttccctaagagggctcctcagaatccccaagacttcaaagaatgcagtttaacaccaactcatttgatggtaccaaatggataagcagaagattgtttggttacattttgtggagcagacactgagatggaatttggggtacaacatgagaaagaagcggggatcaggaagaactgagcagaagaccaattaatatgataccgtatgatcaggccgttcaaaactttggccaacctagcagggaattctggaatgagtaatacccgtcatagatgtctcatgttgggccaaactggtcagactttatattcctgtcatacttggccaccagatgtgggctgtaccaggaagcgcatgactttatgcatggcaactctgcatatgatatcaaccctggaggagctaatagtctgaggctgtccactcccagtagcaagatcttccctgcaggaggatctgagcagcacttctccatgtcttccagtctccaaaatacagttcccgaaaacaggattatttttatatatctttttgtccttagtatatgtgcctctaggtacatgcaatcaagctgttgaacagatgatcctcagctcaatggttcaacataccaattttcagctttactatggtacaaaagctatacacattcagtagaaactacaccccaaattttgaattttgatcttttcccaaccagcaatacacagtacaatattctctggagatgttaggcagtggccatgagccataacttccagtcagccatgccatcatgagggtaaacaaatactgtactctgcagtgtactgtattcaataaattacatgagatattaaat

SEQ ID NO: 326440 - DNA, 250 bp, Homo sapiens
agcctcccaaagtgctgggattacaggcgtgagccaccgcgcccggcctgagatcttattttttaaaagcatgtggcacctcccctctcactcttgtcttgctcctgttcccactgtgtgagatgactcactctccctttgctttgtgccgtgactggaagctttctgaggcctccccaaaagtagaagctgctgtgcttcctgtacagccttcagaactatgagccagttaaacctttttttttttttt

SEQ ID NO: 326441 - DNA, 386 bp, Homo sapiens
gccataggggtattataaacggggaggagagtgtgacacattattattattattttaaaagatcattgctgtgtgaagaagtgactgaagggagacaagaataggaggagggagacaaacctgggaggctcttacaataggcaagggcgagagcaaacagtgattaggactggagtgttgataatggaaatggaaaggattagatagattgggatctgtttgggagacaggtttgataggacagactgaatgcggagtgtgaaaataagaaaataatcaagaataagccttagtttttttgtctggatgttggatgttggtgctacctacagaaatgggaaacctgggggaggaacaggtatgtgatagagaatcaacttttattt

SEQ ID NO: 326442 - DNA, 1081 bp, Homo sapiens
gttttccctcaacctctagtactctgtaaagtataccaaaagtcaaggttttaaagaactgtgttacatattagagagaacaaatcaaaagttacctatctccatcgttaccagtagaacattagtatgtattttgaagcaccatttgactctttctatttcagctacttgcttgtcccttgcaaagttattatagtactcttttaaaacttttcttcaagggaagagctattttgacttccttttctttgatctaaacctaacacccagaatatgcttagcagatcatcccaaaacaatcataacttgtttaaattgttcatagcaaaagttacatattataaagagttatgagtgtcttaggcagtgaatagtaactgaatatccttttatagttgtccttcactagcaggaagccttattccctgcccttttacatatcttaacttagaatgttactgtctaaatagtggttaggcaagagtagttcttaaacgtgcagtaattatcttgcactacatttaagggctaaatagctagtagtggtgcttgataattgaagaaatttgtacagctggaggaagtacctgctaaattttcaaaagttacctgaatttaataggtaaatctgtttttaattagagctatatcattttactctgaatgtcttaacatagaagtttacataaaatttacagattggattgatttcagccttcttctggtactttttaaaatcttattaatcattaggaaaagaagttttattattgatgcaagccctaaacactctttcgactccagaggagaagctggcagctctctgtaagaaatatgctgatcttgtgagtatttatttaatggagcaaggaacacagaaaataaaatctatgtgtgcttgataagatttttaaatattattttgatgtaactttaaatgtaaaatgatattttatctcaaaattgaaaacaatctcctttctttagtacttatgattggtgtgtgtgacttcatcttatgaaatgatgtatagaacataataatacttttttaaatgtgaaataaatttcctaaaactta

SEQ ID NO: 326443 - DNA, 750 bp, Homo sapiens
gtggccgcagccagtcggtgagaccgactgagctctggggcttcagttcttgacgctacctacatggctacatctccagccaaggatgagagtttgtgaatagcacaatggaagaagctggactttgtgggttaagagagaaagcagatatgttgtgtaactctgaatcacatgatattcttcaacatcaagactcaaattgcagtgccacaagtaataaacatttattggaagatgaagaaggccgtgactttataacaaagaacaggagttgggtgagcccagtgcactgcacacaagagtcaagaagggagcttcctgagcaagaagtagcccctccgtctggtcagcaagctttacaatgcaacaggaacaaagaaaaagtcttagagagacaaggtctttccctgtcacccaggctggagcgcggtggtacattcatgggtcatggcagccttaaactccctgagctcgtgatcctgtctcttcagactctagagtagctggggctacaggcgtacaccaccacacatggctaattttttatttttcttttgttgtagagatgggctgtcattctcttgcccaggctggtcttggtatactgtcctgtagcagtatattttggctacctgtactggcattggcttttccaagtgtcaagattacaggtgtgagctagtataccctgcccagtgtttctttcttacttggctttggtgtgaatgagaaaagaatttagtactaaaa

SEQ ID NO: 326444 - DNA, 3547 bp, Homo sapiens
ttttgctgcggaagtcacctcgtggcgtaggggagaggtaacaccgagaagaggcagcggcggtggcccaagacgattggtgccaaacagggcagaacgcaactcagctctgggatatcagtgcacaattaaagaaacttaattgcacctttcaacttggagtataaattttgtatgtatctatgtatatctatgtgtgtattttgtggtttaaggcttatttacataatatgtgacattttacctcagaaattcagtgactgaatttcacagctgcttcccatgcatctttattatctatgtttctgaaaaactcaaatactaactaatctcttttcttcccttagctgttcctttcctgtggttttaaaaaagtgaccagaaactaggtctctattttcattgctttgctgcatattcttttaacctgcttttatcttttacagagttgaggggctttctaaataacctagacaatgtcaagattcttagctgcgttttctgtctaaaagtgtagatgtctagttattcctcatgtaaaacacaacatttcaaccctgagtactataaactttattatgcttctaggttactttttctctttaagcaattattcctacattcctaagtgttcaccagtggaacagataagagatagaagtagttagaaattgagataattgggttgacctgtcattgttgccaggataattactggaagattaagcctatctgttagacattttgaccatgtttataattgttgttagtattctgtcagaatgtatctgttttctagttattaaaagaagcaacagaatcgaggcacaaatatgaagaaatgaaacaagaagaagcacaactgaaagagcagcttttcctttatatggataagtttgaagaattccagactaccatggcaaaaaccaatgaactttttacagccttcaagcaggaaacggaaaagctgacaaagaaaattaaaaaactggaaaaagaaatggtaatatggtataccaaatgggaaaataataatacaacacttctgcaaatggctgaagagaaaactattcgtgataaaaattataaggtctttcaaataaaattggagcggttagagaagctgtacaaggctcttcaaatagaaaggaatgaactcagtgagaaactgggaattctgaaagggcaggtctctgtgaaagtagcagatgtagatttagcagtgcctgtgacgcattcctgtgctgacctggattcttccaatatgctgaacacttcctctaaaagagccccaggagtccatctggaggctgaccccaaaggaatgaatgaagtaaaatgctactcaaaagccctctccacaggatctcctctaggcattgattaagattaagtgtgatcattgtactgatggatatattttgtgtacatgtttctcttttagttgtaactattgattttgtaatgaaaatttcctctcctttttctaccatatctctgtttttttagaactactcaactgtgtggtaacagaaagcttcttaccaatttccccaactatgttgcacatcagcctcattttccccctttattggaatgcatgttttcattgccttctcctttcaaagtgtacgtttgtgtgttcatcaccttaaattatcttaatttgagacttttttataatggtttcgtaatgtgaaatcaaatactaatttaaactctggagcccataatatctacataaaagaaaatataaactgactaatattgtcaagtcatttaaatgataagtaaaacttcaatggattaagaaacaagcatggcatatttgattcagatcagttttttgacaatatttgtatgactttccaaattgatgtgactgtaaactttgaattcctcaaaattgacagaatatatatatatatatatatatatatatatatatatatatatatgtatgtacacacacacagagagatcatttaaatgtaaatgatgttaagaaaaaccaaaacagtagcatatgcaggcaagtcattggaccaataggcttaatatttatgaaactgacaattgttctgctttagtttcaggttacaattatgtttaaagaaaaaaaaatcagtatctagatctctgcacttggcatggaaaattttgaactatttattccttaattttcttttatttcagtttctcatagagctaaatggttttacatatattctcttgtcagatttgtggtctaatagaggtagaaaatggaaattttcccagtacttagaaatatggtacttaggaagaagtctaggatgtgaattacatatacacttcccctagtgactatgataatcaagggggcagatagcagaggaaaataagttaacatgaaatttgacaaattttattactttgccaaaattagcaaaacaaaaatactcaccttcccctgctcaccccccaactttttataaatattcaattcagctacaaaacaaaatactggacccacttctttcagaagagatgaagataccttatatgccctaaagttaataccagcagtcatattttatcagatgtaaatctggatgtaagctcttaatgttatactaaggcagtttcttaggctgtgacacttctttgtggtacttgttttgtgtgaaaggtaaattttggggagaaaacaatgtgaaaaacagaacttgttctgttgtttttggcatactgtttatgttagatacactgtgttacaatacaatattacgaagatctgcattgtattttggaatttggtttcctttcagaattattgctctggctagcattggaaacaacaacaacaacaaaacccaaaggaaccctttgcagaagattcccttgtaaatggccctgtggcatgcccagtatctgcaatgttctagaatagaagttggcaaacctctctgtttgccaagcctgcagagttgaacatgtccataaatgtatacaatctgaccctgttttttggccctgtttctggacactgtagctgaccaagaaaatgtttaaatgttgcgatcaattaaatttttttgttgtatcattctggagttgtaatatgtatagtggcaggggattccaagctatagaaaaaacatgagtctagaatgacagagtgtgtcatcttcaaatgtgtattaatatatttcttgatgatgagaccaatatttctaagttaatggaactattttattacacctgataatcacagttcaattcttgtctgttgcagaattatctacctctttcaaactgtaaatgaaaataactgtgaaaaaaaggatgcagtactgataaaaacactgctttgtttttatctcacctcttttttaaggatatgattttataagaggcagttctcttttgcttttcaagacttctgtagagtttgtgttttttgtttttgtttttgtttttgtttttgtttttttacctaatgtgaatcttattttatctactcaacttcgttcaggttaactaaagatatagatataatggttaa

SEQ ID NO: 326445 - DNA, 3667 bp, Homo sapiens
atttgactatacccatttacccccatggaaatgaaactatattctatgaatgaaaaatgattttaataatgtggtgtattacattttcttcattcaagtaatgtaggccctgagtagagcatgttatgaatatttagttccttagtgttttctcattcaagcctctcatattgaatgagtctagggtttggagagatgtttcacacagcatgtctcttcagtgcaagctgacagatatcagtgcacaattaaagaaacttaattgcacctttcaacttggagtataaattttgtatgtatctatgtatatctatgtgtgtattttgtggtttaaggcttatttacataatatgtgacattttacctcagaaattcagtgactgaatttcacagctgcttcccatgcatctttattatctatgtttctgaaaaactcaaatactaactaatctcttttcttcccttagctgttcctttcctgtggttttaaaaaagtgaccagaaactaggtctctattttcattgctttgctgcatattcttttaacctgcttttatcttttacagagttgaggggctttctaaataacctagacaatgtcaagattcttagctgcgttttctgtctaaaagtgtagatgtctagttattcctcatgtaaaacacaacatttcaaccctgagtactataaactttattatgcttctaggttactttttctctttaagcaattattcctacattcctaagtgttcaccagtggaacagataagagatagaagtagttagaaattgagataattgggttgacctgtcattgttgccaggataattactggaagattaagcctatctgttagacattttgaccatgtttataattgttgttagtattctgtcagaatgtatctgttttctagttattaaaagaagcaacagaatcgaggcacaaatatgaagaaatgaaacaagaagaagcacaactgaaagagcagcttttcctttatatggataagtttgaagaattccagactaccatggcaaaaaccaatgaactttttacagccttcaagcaggaaacggaaaagctgacaaagaaaattaaaaaactggaaaaagaaatggtaatatggtataccaaatgggaaaataataatacaacacttctgcaaatggctgaagagaaaactattcgtgataaaaattataaggtctttcaaataaaattggagcggttagagaagctgtacaaggctcttcaaatagaaaggaatgaactcagtgagaaactgggaattctgaaagggcaggtctctgtgaaagtagcagatgtagatttagcagtgcctgtgacgcattcctgtgctgacctggattcttccaatatgctgaacacttcctctaaaagagccccaggagtccatctggaggctgaccccaaaggaatgaatgaagtaaaatgctactcaaaagccctctccacaggatctcctctaggcattgattaagattaagtgtgatcattgtactgatggatatattttgtgtacatgtttctcttttagttgtaactattgattttgtaatgaaaatttcctctcctttttctaccatatctctgtttttttagaactactcaactgtgtggtaacagaaagcttcttaccaatttccccaactatgttgcacatcagcctcattttccccctttattggaatgcatgttttcattgccttctcctttcaaagtgtacgtttgtgtgttcatcaccttaaattatcttaatttgagacttttttataatggtttcgtaatgtgaaatcaaatactaatttaaactctggagcccataatatctacataaaagaaaatataaactgactaatattgtcaagtcatttaaatgataagtaaaacttcaatggattaagaaacaagcatggcatatttgattcagatcagttttttgacaatatttgtatgactttccaaattgatgtgactgtaaactttgaattcctcaaaattgacagaatatatatatatatatatatatatatatatatatatatatatatgtatgtacacacacacagagagatcatttaaatgtaaatgatgttaagaaaaaccaaaacagtagcatatgcaggcaagtcattggaccaataggcttaatatttatgaaactgacaattgttctgctttagtttcaggttacaattatgtttaaagaaaaaaaaatcagtatctagatctctgcacttggcatggaaaattttgaactatttattccttaattttcttttatttcagtttctcatagagctaaatggttttacatatattctcttgtcagatttgtggtctaatagaggtagaaaatggaaattttcccagtacttagaaatatggtacttaggaagaagtctaggatgtgaattacatatacacttcccctagtgactatgataatcaagggggcagatagcagaggaaaataagttaacatgaaatttgacaaattttattactttgccaaaattagcaaaacaaaaatactcaccttcccctgctcaccccccaactttttataaatattcaattcagctacaaaacaaaatactggacccacttctttcagaagagatgaagataccttatatgccctaaagttaataccagcagtcatattttatcagatgtaaatctggatgtaagctcttaatgttatactaaggcagtttcttaggctgtgacacttctttgtggtacttgttttgtgtgaaaggtaaattttggggagaaaacaatgtgaaaaacagaacttgttctgttgtttttggcatactgtttatgttagatacactgtgttacaatacaatattacgaagatctgcattgtattttggaatttggtttcctttcagaattattgctctggctagcattggaaacaacaacaacaacaaaacccaaaggaaccctttgcagaagattcccttgtaaatggccctgtggcatgcccagtatctgcaatgttctagaatagaagttggcaaacctctctgtttgccaagcctgcagagttgaacatgtccataaatgtatacaatctgaccctgttttttggccctgtttctggacactgtagctgaccaagaaaatgtttaaatgttgcgatcaattaaatttttttgttgtatcattctggagttgtaatatgtatagtggcaggggattccaagctatagaaaaaacatgagtctagaatgacagagtgtgtcatcttcaaatgtgtattaatatatttcttgatgatgagaccaatatttctaagttaatggaactattttattacacctgataatcacagttcaattcttgtctgttgcagaattatctacctctttcaaactgtaaatgaaaataactgtgaaaaaaaggatgcagtactgataaaaacactgctttgtttttatctcacctcttttttaaggatatgattttataagaggcagttctcttttgcttttcaagacttctgtagagtttgtgttttttgtttttgtttttgtttttgtttttgtttttttacctaatgtgaatcttattttatctactcaacttcgttcaggttaactaaagatatagatataatggttaa

SEQ ID NO: 326446 - DNA, 939 bp, Homo sapiens
  misc_feature (198)..(198): n is a, c, g, or t
ttttgctgcggaagtcacctcgtggcgtaggggagaggtaacaccgagaagaggcagcggcggtggcccaagacgattggtgccaaacagggcagaacgcaactcagctctggggtgggttcctgtccagaggggtagagaagagtggctgagggcgcgcctgatctcagcgggaagagtgcgaccccgagggccgcntagtttgtgaatagcacaatggaagaagctggactttgtgggttaagagagaaagcagatatgttgtgtaactctgaatcacatgatattcttcaacatcaagactcaaattgcagtgccacaagtaataaacatttattggaagatgaagaaggccgtgactttataacaaagaacaggagttgggtgagcccagtgcactgcacacaagagtcaagaagggagcttcctgagcaagaagtagcccctccgtctggtcagcaagctttacaatgcaacaggaacaaagaaaaagtcttaggaaaagaagttttattattgatgcaagccctaaacactctttcgactccagaggagaagctggcagctctctgtaagaaatatgctgatcttggaaattcacctcttctatagaagagtttgttttgaactatacgatttgaaacaaaattctttttttggagactatggaaacattctcaacagggaaaccctactagactttgtaaagcaaataatggaaaagatacagaactttttgaagaatcatgggaaatttttataattaaataaatgctaaaattctgttttgtgaaacatttatgggaattatcactgacagtttttgtacactttcaaatagtgttaaagcagcaactccatgttgtaaatgcacaaaacaaatatttagttaataatcaactccaagaataaagctgtaacaataatagttaaaaaaaa

SEQ ID NO: 326447 - DNA, 1215 bp, Homo sapiens
gcggccgcagccgtgcgtcccgctcgagcgccagcgcccgcgccccccgatccgcttgccgtggctccctcctcagttggccgagtcgtcccgcgcgcaccgcctccgcgcgcctatgagaatgaggtggtaacgggcccccggatgaccccgcgtcaccactgtgaggcctacagctctgccggggaggaggaggaggaggaagaggaggagaagtttgtgaatagcacaatggaagaagctggactttgtgggttaagagagaaagcagatatgttgtgtaactctgaatcacatgatattcttcaacatcaagactcaaattgcagtgccacaagtaataaacatttattggaagatgaagaaggccgtgactttataacaaagaacaggagttgggtgagcccagtgcactgcacacaagagtcaagaagggagcttcctgagcaagaagtagcccctccgtctggtcagcaagctttacaatgcaacaggaacaaagaaaaagtcttaggtaataatctctgctctgtggttggatgttgtcacatactggtctttttgttttacattttctgcagcatgagtgattatgaacttggcctgtttggaggtaaatgttgcctggtaaacttgtttcttcacttggtttagtccacctatcatctccagttatgtgtagggaacaaaaatagcaaaatacgaagcccagttataagaaacttaattatttctctgtgtaacaagaactgaagttttaagaaagtttgaggccaatatgatgtaattagtatttgatttaccttgctttttgtacctttgaaaataacctaatagtatgaaaacaatatgtatgctaattttgcttaaaagattatacactgaaatttagagaggatataatgttatctgtagtgtagaaagagttaaataagactgatttttagaatttgttttatcccttccactcttagcttgacaattaggattaagaatatgatatgtcaaatttcatgactgaaatctgaaatgccttaatagttgccctcagtgtttcatccttatactaacatttacattgatatatatgacttatatgtgacactgaaacttggaatttttattcttaatccattttctgttaccctggaagacaaaaaaaaagtatggtaatatataaagtaattgtaattccttgaaaataagacagatatc

SEQ ID NO: 326448 - DNA, 852 bp, Homo sapiens
ttttgctgcggaagtcacctcgtggcgtaggggagaggtaacaccgagaagaggcagcggcggtggcccaagacgattggtgccaaacagggcagaacgcaactcagctctgggtttgtgaatagcacaatggaagaagctggactttgtgggttaagagagaaagcagatatgttgtgtaactctgaatcacatgatattcttcaacatcaagactcaaattgcagtgccacaagtaataaacatttattggaagatgaagaaggccgtgactttataacaaagaacaggagttgggtgagcccagtgcactgcacacaagagtcaagaagggagcttcctgagcaagaagtagcccctccgtctggtcagcaagctttacaatgcaacaggaacaaagaaaaagtcttaggaaaagaagttttattattgatgcaagccctaaacactctttcgactccagaggagaagctggcagctctctgtaagaaatatgctgatcttggaaattcacctcttctatagaagagtttgttttgaactatacgatttgaaacaaaattctttttttggagactatggaaacattctcaacagggaaaccctactagactttgtaaagcaaataatggaaaagatacagaactttttgaagaatcatgggaaatttttataattaaataaatgctaaaattctgttttgtgaaacatttatgggaattatcactgacagtttttgtacactttcaaatagtgttaaagcagcaactccatgttgtaaatgcacaaaacaaatatttagttaataatcaactccaagaataaagctgtaacaataatagttaaaaaaaa

SEQ ID NO: 326449 - DNA, 981 bp, Homo sapiens
  misc_feature (198)..(198): n is a, c, g, or t
ttttgctgcggaagtcacctcgtggcgtaggggagaggtaacaccgagaagaggcagcggcggtggcccaagacgattggtgccaaacagggcagaacgcaactcagctctggggtgggttcctgtccagaggggtagagaagagtggctgagggcgcgcctgatctcagcgggaagagtgcgaccccgagggccgcntagtttgtgaatagcacaatggaagaagctggactttgtgggttaagagagaaagcagatatgttgtgtaactctgaatcacatgatattcttcaacatcaagactcaaattgcagtgccacaagtaataaacatttattggaagatgaagaaggccgtgactttataacaaagaacaggagttgggtgagcccagtgcactgcacacaagagtcaagaagggagcttcctgagcaagaagtagcccctccgtctggtcagcaagctttacaatgcaacaggaacaaagaaaaagtcttagagagacaaggtctttccctgtcacccaggctggagcgcggtggaaaagaagttttattattgatgcaagccctaaacactctttcgactccagaggagaagctggcagctctctgtaagaaatatgctgatcttggaaattcacctcttctatagaagagtttgttttgaactatacgatttgaaacaaaattctttttttggagactatggaaacattctcaacagggaaaccctactagactttgtaaagcaaataatggaaaagatacagaactttttgaagaatcatgggaaatttttataattaaataaatgctaaaattctgttttgtgaaacatttatgggaattatcactgacagtttttgtacactttcaaatagtgttaaagcagcaactccatgttgtaaatgcacaaaacaaatatttagttaataatcaactccaagaataaagctgtaacaataatagttaaaaaaaa

SEQ ID NO: 326450 - DNA, 772 bp, Homo sapiens
ttttgctgcggaagtcacctcgtggcgtaggggagaggtaacaccgagaagaggcagcggcggtggcccaagacgattggtgccaaacagggcagaacgcaactcagctctgggtttgtgaatagcacaatggaagaagctggactttgtgggttaagagagaaagcagatatgttgtgtaactctgaatcacatgatattcttcaacatcaagactcaaattgcagtgccacaagtaataaacatttattggaagatgaagaaggccgtgactttataacaaagaacaggagttgggtgagcccagtgcactgcacacaagagtcaagaagggagcttcctgagcaagaagtagcccctccgtctggtcagcaagctttacaatgcaacaggaacaaagaaaaagtcttagagagacaaggtctttccctgtcacccaggctggagcgcggtggtacattcatgggtcatggcagccttaaactccctgagctcgtgatcctgtctcttcagactctagagtagctggggctacaggcgtacaccaccacacatggctaattttttatttttcttttgttgtagagatgggctgtcattctcttgcccaggctggtcttggtatactgtcctgtagcagtatattttggctacctgtactggcattggcttttccaagtgtcaagattacaggtgtgagctagtataccctgcccagtgtttctttcttacttggctttggtgtgaatgagaaaagaatttagtactaaaa

SEQ ID NO: 326451 - DNA, 1200 bp, Homo sapiens
  misc_feature (198)..(198): n is a, c, g, or t
ttttgctgcggaagtcacctcgtggcgtaggggagaggtaacaccgagaagaggcagcggcggtggcccaagacgattggtgccaaacagggcagaacgcaactcagctctggggtgggttcctgtccagaggggtagagaagagtggctgagggcgcgcctgatctcagcgggaagagtgcgaccccgagggccgcntagtttgtgaatagcacaatggaagaagctggactttgtgggttaagagagaaagcagatatgttgtgtaactctgaatcacatgatattcttcaacatcaagactcaaattgcagtgccacaagtaataaacatttattggaagatgaagaaggccgtgactttataacaaagaacaggagttgggtgagcccagtgcactgcacacaagagtcaagaagggagcttcctgagcaagaagtagcccctccgtctggtcagcaagctttacaatgcaacaggaacaaagaaaaagtcttaggtaataatctctgctctgtggttggatgttgtcacatactggtctttttgttttacattttctgcagcatgagtgattatgaacttggcctgtttggaggtaaatgttgcctggtaaacttgtttcttcacttggtttagtccacctatcatctccagttatgtgtagggaacaaaaatagcaaaatacgaagcccagttataagaaacttaattatttctctgtgtaacaagaactgaagttttaagaaagtttgaggccaatatgatgtaattagtatttgatttaccttgctttttgtacctttgaaaataacctaatagtatgaaaacaatatgtatgctaattttgcttaaaagattatacactgaaatttagagaggatataatgttatctgtagtgtagaaagagttaaataagactgatttttagaatttgttttatcccttccactcttagcttgacaattaggattaagaatatgatatgtcaaatttcatgactgaaatctgaaatgccttaatagttgccctcagtgtttcatccttatactaacatttacattgatatatatgacttatatgtgacactgaaacttggaatttttattcttaatccattttctgttaccctggaagacaaaaaaaaagtatggtaatatataaagtaattgtaattccttgaaaataagacagatatc

SEQ ID NO: 326452 - DNA, 1111 bp, Homo sapiens
gtggccgcagccagtcggtgagaccgactgagctctggggcttcagttcttgacgctacctacatggctacatctccagccaaggatgagagtttgtgaatagcacaatggaagaagctggactttgtgggttaagagagaaagcagatatgttgtgtaactctgaatcacatgatattcttcaacatcaagactcaaattgcagtgccacaagtaataaacatttattggaagatgaagaaggccgtgactttataacaaagaacaggagttgggtgagcccagtgcactgcacacaagagtcaagaagggagcttcctgagcaagaagtagcccctccgtctggtcagcaagctttacaatgcaacaggaacaaagaaaaagtcttagagagacaaggtctttccctgtcacccaggctggagcgcggtggtacattcatgggtcatggcagccttaaactccctgagctcgtgatcctgtctcttcagactctagagtagctggggctacaggcgtacaccaccacacatggctaattttttatttttcttttgttgtagagatgggctgtcattctcttgcccaggctggtcttggtatactgtcctgtagcagtatattttggctacctgtactggcattggcttttccaagtgtcaagattacaggaaaagaagttttattattgatgcaagccctaaacactctttcgactccagaggagaagctggcagctctctgtaagaaatatgctgatcttggaaattcacctcttctatagaagagtttgttttgaactatacgatttgaaacaaaattctttttttggagactatggaaacattctcaacagggaaaccctactagactttgtaaagcaaataatggaaaagatacagaactttttgaagaatcatgggaaatttttataattaaataaatgctaaaattctgttttgtgaaacatttatgggaattatcactgacagtttttgtacactttcaaatagtgttaaagcagcaactccatgttgtaaatgcacaaaacaaatatttagttaataatcaactccaagaataaagctgtaacaataatagttaaaaaaaa

SEQ ID NO: 326453 - DNA, 3260 bp, Homo sapiens
  misc_feature (1)..(1): n is a, c, g, or t
  misc_feature (5)..(5): n is a, c, g, or t
  misc_feature (7)..(7): n is a, c, g, or t
ngcangnggggcaggggcgcatccctcgccacccgcggtcgcccagcacgccgggacgcgcgtggccatccagctccccgggggcgttggggggctccgcgggcctgggcctcgggattcgcccgccgcttccccggggagccgctgctgcaaagccaggttggggcgccgggcccggccagcgccctctaggcagcggaagtgcagcttgctttacatccgtcctccccgcctcgcagagttgggagaaggcagggtggggggtgtggaaaaataaaaggaaaagtccttgcaccatgtagatcagcgtcccccactttggcatcccggccggccggggacctcccagtctgcggccatgaacgcgagcagcgagggcgagagcttcgcgggctcggtgcaaattccaggtggcacaacggtgctggtggagctgactcccgacatccatatctgcggcatctgcaagcagcagtttaacaacctggatgcctttgtagctcacaagcaaagtggctgccagctgacaggcacatccgcagcagcccccagcacggtccagtttgtatcggaggaaacagtgcctgccacccagactcagaccaccaccagaaccatcacctcggagacccagacaatcacagtttcagctccagaatttgtttttgaacatggctatcaaacttacctgcccacggaaagtaatgaaaaccagacagccactgtcatctctctccctgccaagtcacgcaccaaaaagcccacaacaccacctgctcagaaaaggcttaactgttgctatccaggttgccaattcaagactgcttatggcatgaaggacatggagcggcatttaaaaattcacacgggagacaaaccccataagtgtgaagtctgtggcaagtgctttagccggaaagacaagctgaaaactcacatgcggtgccacacgggcgtgaagccctacaagtgtaagacgtgtgactacgccgctgccgacagcagcagcctcaacaagcacctgaggatccactcggacgagcggcccttcaaatgccagatctgcccctacgccagccgcaactccagccagctcactgtccacctgcgatcccacacgggggatacccccttccagtgctggctctgtagcgccaagttcaaaatcagctcggacttgaaaaggcacatgatcgtgcactcgggggagaagcctttcaagtgcgagttctgcgacgtccgctgcaccatgaaggcgaatctcaaatcgcacatccgcatcaagcacaccttcaaatgtctgcactgtgccttccagggccgggaccgggctgacctcctggagcacagccggctgcaccaggccgaccacccggagaagtgtccagagtgcagctactcctgctccagcaaggccgccctgcgcatccacgagcgtatccactgcaccgaccgccctttcaagtgcaactactgcagcttcgacaccaaacagcccagcaacctgagcaagcacatgaagaagttccacggggacatggttaagactgaggctctagagaggaaggacaccggcaggcagagcagccggcaggtggccaagctggatgccaagaagagtttccactgcgatatatgcgatgcctccttcatgcgggaggactcgctccgcagccacaagagacagcacagtgagtacaatgagagtaagaactcggacgtgaccgttctccagtttcagatcgaccccagcaagcagcccgccacgcccctcactgtgggacacctccaggtgcccctccagcccagccaagtgccccagttcagcgagggaagagtcaaaatcatcgttgggcatcaggtgccccaggcgaacaccatcgtccaggctgccgccgctgcagtgaacatcgtcccgcctgccttggtggcccagaacccagaggaactcccagggaacagccggctgcagatcctgcgccaggtcagtctgatcgccccccctcagtcctcgcggtgtccgagcgaggcgggcgcaatgacccagccggctgtcctgctgaccacccacgagcagacggacggagccactctgcaccagactctcatccccacggcctcaggtggcccccaggaaggctctggcaatcaaactttcattaccagttcgggtattacttgcactgactttgaaggcctaaacgccttgattcaggaggggacagcagaagtgacagtggtgagcgatggaggccagaacatcgcagtggccaccacagcgccaccggtcttctcctcctcttcccagcaagaactacccaagcagacctactccatcattcaaggggcagcccatccagctttgctctgtcccgccgactccattccagattagtgcttaaaaaacaaaaggagtgggggaaaggaattgagaaaaagaaatcttaagtagaattctctaaaaggtttgctcttaatgttttctttgttttgttttgtttttgagacggagtctcgctctgtttcccaggctggagtgcagtggcgctatcttggctcactgcaacgtccgcctcccaggttcaagcgattctcatgcctcagccctccgagtagctgggaccacaggtgtacgacatcatgactggctaatttttgtatatttagtagagacggggtttcatcatgttgaactcctgacctcaagtgatctgcccacctcagcctcccaaagtgctgggattacaggtgtgagccaccatgcctggccgtggtttgctcttaatgtttttaaggatggttgtgaatccccctggccccataataaattgtaattttatactgcttactataatttttttaacactgtaacaactttgagaccacctctgaatcgtcgcattataactgttgtagaatcttaaatgttaccaagatgattccaatgaggggttggaattaaatgcattaagtagtgaattcatgtgtttgtttccaacttgattttccaactctaataaaggtttctgtccatcttattacatttgtgtagtaaatggtacttcccagcctctcttttgccccattctggaatactccccagagtttgggggtgttcatgttttatacatgtaagtctgttggcatgaaggaccattttctacataatatgacatggatacttgacccaaaaaaaaatgtttagtgctaatgagcagaaaatgaatggttccataataaattgatatctgattaaaata

SEQ ID NO: 326454 - DNA, 918 bp, Homo sapiens
aggcagagctggggcgtggtcagggcttccaacagggcagcgccactcacccctggggagggacatttgggccggtctaacgcccactgtggacggtaaaggccgtttgggaacagctttcagctccagaatttgtttttgaacatggctatcaaacttacctgcccacggaaagtaatgaaaaccagacagccactgtcatctctctccctgccaagtcacgcaccaaaaagcccacaacaccacctgctcagaaaaggcttaactgttgctatccaggttgccaattcaagactgcttatggcatgaaggacatggagcggcatttaaaaattcacacgggagacaaaccccataagtgtgaagtctgtggcaagtgctttagccggaaagacaagctgaaaactcacatgcggtgccacacgggcgtgaagccctacaagtgtaagacgtgtgactacgccgctgccgacagcagcagcctcaacaagcacctgaggatccactcggacgagcggcccttcaaatgccagatctgcccctacgccagccgcaactccagccagctcactgtccacctgcgatcccacacggcttcagaacttgatgatgatgttccaaaagcaaactgcctctccactgaaagcactgacactccgaaggcccctgtcatcactcttccctcagaggcaagggaacaaatggccacccttggagagaggacgttcaactgttgctacccaggttgccacttcaaaactgtccatggcatgaaagacttggaccgccatctcagaatccacacggcaccctttgaccaacagcctagggggagatgccgtgctgcttgctgtttggaagaagtgagaggaaggggtccacctgaccattctccatgtggttcatgaagctgcccaa

SEQ ID NO: 326455 - DNA, 366 bp, Homo sapiens
tcctctcaggctcaagtagtcctcccacctcaacctcccacatagctgggaccacaggcgtgcaccaccacacctggctaattttttcatgtgtttgtttccaacttgattttccaactctaataaaggtttctgtccatcttattacatttgtgtagtaaatggtacttcccagcctctcttttgccccattctggaatactccccagagtttgggggtgttcatgttttatacatgtaagtctgttggcatgaaggaccattttctacataatatgacatggatacttgacccaaaaaaaaatgtttagtgctaatgagcagaaaatgaatggttccataataaattgatatctgattaaaata

SEQ ID NO: 326456 - DNA, 3098 bp, Homo sapiens
  misc_feature (1)..(1): n is a, c, g, or t
  misc_feature (5)..(5): n is a, c, g, or t
  misc_feature (7)..(7): n is a, c, g, or t
ngcangnggggcaggggcgcatccctcgccacccgcggtcgcccagcacgccgggacgcgcgtggccatccagctccccgggggcgttggggggctccgcgggcctgggcctcgggattcgcccgccgcttccccggggagccgctgctgcaaagccaggttggggcgccgggcccggccagcgccctctaggcagcggaagtgcagcttgctttacatccgtcctccccgcctcgcagagttgggagaaggcagggtggggggtgtggaaaaataaaaggaaaagtccttgcaccatgtagatcagcgtcccccactttggcatcccggccggccggggacctcccagtctgcggccatgaacgcgagcagcgagggcgagagcttcgcgggctcggtgcaaattccaggtggcacaacggtgctggtggagctgactcccgacatccatatctgcggcatctgcaagcagcagtttaacaacctggatgcctttgtagctcacaagcaaagtggctgccagctgacaggcacatccgcagcagcccccagcacggtccagtttgtatcggaggaaacagtgcctgccacccagactcagaccaccaccagaaccatcacctcggagacccagacaatcacaggttgccaattcaagactgcttatggcatgaaggacatggagcggcatttaaaaattcacacgggagacaaaccccataagtgtgaagtctgtggcaagtgctttagccggaaagacaagctgaaaactcacatgcggtgccacacgggcgtgaagccctacaagtgtaagacgtgtgactacgccgctgccgacagcagcagcctcaacaagcacctgaggatccactcggacgagcggcccttcaaatgccagatctgcccctacgccagccgcaactccagccagctcactgtccacctgcgatcccacacgggggatacccccttccagtgctggctctgtagcgccaagttcaaaatcagctcggacttgaaaaggcacatgatcgtgcactcgggggagaagcctttcaagtgcgagttctgcgacgtccgctgcaccatgaaggcgaatctcaaatcgcacatccgcatcaagcacaccttcaaatgtctgcactgtgccttccagggccgggaccgggctgacctcctggagcacagccggctgcaccaggccgaccacccggagaagtgtccagagtgcagctactcctgctccagcaaggccgccctgcgcatccacgagcgtatccactgcaccgaccgccctttcaagtgcaactactgcagcttcgacaccaaacagcccagcaacctgagcaagcacatgaagaagttccacggggacatggttaagactgaggctctagagaggaaggacaccggcaggcagagcagccggcaggtggccaagctggatgccaagaagagtttccactgcgatatatgcgatgcctccttcatgcgggaggactcgctccgcagccacaagagacagcacagtgagtacaatgagagtaagaactcggacgtgaccgttctccagtttcagatcgaccccagcaagcagcccgccacgcccctcactgtgggacacctccaggtgcccctccagcccagccaagtgccccagttcagcgagggaagagtcaaaatcatcgttgggcatcaggtgccccaggcgaacaccatcgtccaggctgccgccgctgcagtgaacatcgtcccgcctgccttggtggcccagaacccagaggaactcccagggaacagccggctgcagatcctgcgccaggtcagtctgatcgccccccctcagtcctcgcggtgtccgagcgaggcgggcgcaatgacccagccggctgtcctgctgaccacccacgagcagacggacggagccactctgcaccagactctcatccccacggcctcaggtggcccccaggaaggctctggcaatcaaactttcattaccagttcgggtattacttgcactgactttgaaggcctaaacgccttgattcaggaggggacagcagaagtgacagtggtgagcgatggaggccagaacatcgcagtggccaccacagcgccaccggtcttctcctcctcttcccagcaagaactacccaagcagacctactccatcattcaaggggcagcccatccagctttgctctgtcccgccgactccattccagattagtgcttaaaaaacaaaaggagtgggggaaaggaattgagaaaaagaaatcttaagtagaattctctaaaaggtttgctcttaatgttttctttgttttgttttgtttttgagacggagtctcgctctgtttcccaggctggagtgcagtggcgctatcttggctcactgcaacgtccgcctcccaggttcaagcgattctcatgcctcagccctccgagtagctgggaccacaggtgtacgacatcatgactggctaatttttgtatatttagtagagacggggtttcatcatgttgaactcctgacctcaagtgatctgcccacctcagcctcccaaagtgctgggattacaggtgtgagccaccatgcctggccgtggtttgctcttaatgtttttaaggatggttgtgaatccccctggccccataataaattgtaattttatactgcttactataatttttttaacactgtaacaactttgagaccacctctgaatcgtcgcattataactgttgtagaatcttaaatgttaccaagatgattccaatgaggggttggaattaaatgcattaagtagtgaattcatgtgtttgtttccaacttgattttccaactctaataaaggtttctgtccatcttattacatttgtgtagtaaatggtacttcccagcctctcttttgccccattctggaatactccccagagtttgggggtgttcatgttttatacatgtaagtctgttggcatgaaggaccattttctacataatatgacatggatacttgacccaaaaaaaaatgtttagtgctaatgagcagaaaatgaatggttccataataaattgatatctgattaaaata

SEQ ID NO: 326457 - DNA, 2599 bp, Homo sapiens
atttctaacgagctcccaggtggcgcgggctgcccgggagcggaccgcaagtccgcgggactcctggggtcttggctccaggccaatcagccgtcaggactcttgataaatcgccctgctcggctaatgagcagaattgccgggacatgcgcgttccggccgaaggggggtaatttccgaactccgggaattcgttgtgtgaagtaggccactcctagggacgcgcggggagcccggtcctcgcgccatgtcgcggcgcaagcaggccaagccccagcacctcaactccgaggagccgcggcctgcgcgccgggagtgtgcggaggtggccccgcaggtggcgggggagccggcttcagaacttgatgatgatgttccaaaagcaaactgcctctccactgaaagcactgacactccgaaggcccctgtcatcactcttccctcagaggcaagggaacaaatggccacccttggagagaggacgttcaactgttgctacccaggttgccacttcaaaactgtccatggcatgaaagacttggaccgccatctcagaatccacacgggagacaaaccgcacaagtgtgagttctgtgacaagtgcttcagccggaaggacaacctgaccatgcacatgcggtgccacaccagtgtgaagccacacaagtgtcacctgtgtgactacgctgccgtggacagcagtagcctcaagaagcacctgcggatccactctgatgagcggccgtacaaatgccagctctgcccctatgccagccgcaactccagccagctcaccgtccacctgcgatctcacacgggggatacccccttccagtgctggctctgtagcgccaagttcaaaatcagctcggacttgaaaaggcacatgatcgtgcactcgggggagaagcctttcaagtgcgagttctgcgacgtccgctgcaccatgaaggcgaatctcaaatcgcacatccgcatcaagcacaccttcaaatgtctgcactgtgccttccagggccgggaccgggctgacctcctggagcacagccggctgcaccaggccgaccacccggagaagtgtccagagtgcagctactcctgctccagcgcggccgccctgcgcgtgcacagcagagtccactgtaaggaccgtcccttcaagtgtgacttctgcagcttcgacacgaagcggcccagcagcctggccaagcacgtcgacaaggtgcacagggacgaggccaagacggagaaccgggcccctctgggcaaggaagggctcagagagggcagctcccagcacgtggccaagatcgtgacgcagagggccttccgctgtgagacctgcggcgcctccttcgtcagggatgactctctgagatgccacaagaagcagcacagtgatcagagtgagaacaagaactcagacttggtcaccttcccaccggaaagcggtgcctcgggacagctcagcaccctggtctccgtggggcagctcgaggctcccctagagcccagccaagacctctagctcagccgaagagggtggtcagctgtcggaacttctgaccagtgctgttgcccagccctccagaggtgaggccactgagagacaggctttgggcaccacttctggggctggccgctccaacttcacaggccttcagaggcgatggctgggcgacagtgacgaaagcaaagcaaagcagggctgtggagacactcctcgcatttgtctcttccctccaaggattatctgagcaagtcgacttgttcattcaaaggcggggtctgccaagccctgctctatccaatggggatagcttctacgtaacggattccaattttaaaactgatccatctctgatggaattattaaacttagacgatatagaaaactaaaactaatctctagagtggaaagggttaaagtgaggaaggtgtacgtgaagggtctggggttgctggaaaacttctatttcataacctgggtgatcgttctaagagtgtttgccttatatgtttgtgtggtttcttttacctgttgtcttacaataaaaaaggcagactcatggtagcatgatgtaaggaacactcaattttgcagccctccacagacagttacggtagaaggttctccatccccagcccgcgccccattcagtaacttaattataaacgccacattggatttctcaatgagttcctactgtagtaaaacgaaatgcagtttgatctggaggtggcgccaaagatcaagctaactagcccagcctgtgcttgtctgttgtggaattcaaaattctgtttaattctatttggagagaaaagtccaggggcccagtgggccctgagcttggtgctgggtgctgggatatgtgatacgtgggacagcctcacaccagcatctgtttcatcacggaaagcatttagtgtttgctgaacccacaaactactgaaaatccaacctcttctcatagatggacccttaggaggttatgaaatctcagtggatataatacttacccaaagttgcttggtttctacttttggcatctttccttcaaatactctttttaaatataaagtcttgtgtgccctc

SEQ ID NO: 326458 - DNA, 3069 bp, Homo sapiens
gcccacgatagacctactgtccaggtcggggacctcccagtctgcttgccatgaactcgattcaccgagggcgagaagctatcgcagggctcaggtgcaatatttccatggtgcgctagcgaaacggctgcatggatggaagacatgagcgtcccggagcgagtcgcgagtatcgtgcggcgatcatgcgaagtcagcagtttagatgaagcctgtgatgcctcttgtagcgtcacaaggcaagagtggcgtgccagctgacaggcacatcgcggagcaggccacacaagtacgggtccaagtttgtatcgggcaggaaaccacgtgcgcgtgcgcggacaccgaggacgtgcagaccaacacaaccaatgaaccgagtcaaccgtcgggaagaccctaggacgagatcaccaggtttgcgaggcgttgcgcgaggaagtttggttctactttgaagcgagtggctatcgagagagctttagctcgtggcccagcgggacaaggtaactggaaaagagccaggacaagccactgtcatctctctccctgccaagtcacgcaccaaaaagcccacaacaccacctgctcagaaaaggcttaactgttgctatccaggttgccaattcaagactgcttatggcatgaaggacatggagcggcatttaaaaattcacacgggagacaaaccccataagtgtgaagtctgtggcaagtgctttagccggaaagacaagctgaaaactcacatgcggtgccacacgggcgtgaagccctacaagtgtaagacgtgtgactacgccgctgccgacagcagcagcctcaacaagcacctgaggatccactcggacgagcggcccttcaaatgccagatctgcccctacgccagccgcaactccagccagctcactgtccacctgcgatcccacacgggggatacccccttccagtgctggctctgtagcgccaagttcaaaatcagctcggacttgaaaaggcacatgatcgtgcactcgggggagaagcctttcaagtgcgagttctgcgacgtccgctgcaccatgaaggcgaatctcaaatcgcacatccgcatcaagcacaccttcaaatgtctgcactgtgccttccagggccgggaccgggctgacctcctggagcacagccggctgcaccaggccgaccacccggagaagtgtccagagtgcagctactcctgctccagcaaggccgccctgcgcatccacgagcgtatccactgcaccgaccgccctttcaagtgcaactactgcagcttcgacaccaaacagcccagcaacctgagcaagcacatgaagaagttccacggggacatggttaagactgaggctctagagaggaaggacaccggcaggcagagcagccggcaggtggccaagctggatgccaagaagagtttccactgcgatatatgcgatgcctccttcatgcgggaggactcgctccgcagccacaagagacagcacagtgagtacaatgagagtaagaactcggacgtgaccgttctccagtttcagatcgaccccagcaagcagcccgccacgcccctcactgtgggacacctccaggtgcccctccagcccagccaagtgccccagttcagcgagggaagagtcaaaatcatcgttgggcatcaggtgccccaggcgaacaccatcgtccaggctgccgccgctgcagtgaacatcgtcccgcctgccttggtggcccagaacccagaggaactcccagggaacagccggctgcagatcctgcgccaggtcagtctgatcgccccccctcagtcctcgcggtgtccgagcgaggcgggcgcaatgacccagccggctgtcctgctgaccacccacgagcagacggacggagccactctgcaccagactctcatccccacggcctcaggtggcccccaggaaggctctggcaatcaaactttcattaccagttcgggtattacttgcactgactttgaaggcctaaacgccttgattcaggaggggacagcagaagtgacagtggtgagcgatggaggccagaacatcgcagtggccaccacagcgccaccggtcttctcctcctcttcccagcaagaactacccaagcagacctactccatcattcaaggggcagcccatccagctttgctctgtcccgccgactccattccagattagtgcttaaaaaacaaaaggagtgggggaaaggaattgagaaaaagaaatcttaagtagaattctctaaaaggtttgctcttaatgttttctttgttttgttttgtttttgagacggagtctcgctctgtttcccaggctggagtgcagtggcgctatcttggctcactgcaacgtccgcctcccaggttcaagcgattctcatgcctcagccctccgagtagctgggaccacaggtgtacgacatcatgactggctaatttttgtatatttagtagagacggggtttcatcatgttgaactcctgacctcaagtgatctgcccacctcagcctcccaaagtgctgggattacaggtgtgagccaccatgcctggccgtggtttgctcttaatgtttttaaggatggttgtgaatccccctggccccataataaattgtaattttatactgcttactataatttttttaacactgtaacaactttgagaccacctctgaatcgtcgcattataactgttgtagaatcttaaatgttaccaagatgattccaatgaggggttggaattaaatgcattaagtagtgaattcatgtgtttgtttccaacttgattttccaactctaataaaggtttctgtccatcttattacatttgtgtagtaaatggtacttcccagcctctcttttgccccattctggaatactccccagagtttgggggtgttcatgttttatacatgtaagtctgttggcatgaaggaccattttctacataatatgacatggatacttgacccaaaaaaaaatgtttagtgctaatgagcagaaaatgaatggttccataataaattgatatctgattaaaata

SEQ ID NO: 326459 - DNA, 2332 bp, Homo sapiens
  misc_feature (1)..(1): n is a, c, g, or t
  misc_feature (5)..(5): n is a, c, g, or t
  misc_feature (7)..(7): n is a, c, g, or t
ngcangnggggcaggggcgcatccctcgccacccgcggtcgcccagcacgccgggacgcgcgtggccatccagctccccgggggcgttggggggctccgcgggcctgggcctcgggattcgcccgccgcttccccggggagccgctgctgcaaagccaggttggggcgccgggcccggccagcgccctctaggcagcggaagtgcagcttgctttacatccgtcctccccgcctcgcagagttgggagaaggcagggtggggggtgtggaaaaataaaaggaaaagtccttgcaccatgtagatcagcgtcccccactttggcatcccggccggccggggacctcccagtctgcggccatgaacgcgagcagcgagggcgagagcttcgcgggctcggtgcaaattccaggtggcacaacggtgctggtggagctgactcccgacatccatatctgcggcatctgcaagcagcagtttaacaacctggatgcctttgtagctcacaagcaaagtggctgccagctgacaggcacatccgcagcagcccccagcacggtccagtttgtatcggaggaaacagtgcctgccacccagactcagaccaccaccagaaccatcacctcggagacccagacaatcacagtttcagctccagaatttgtttttgaacatggctatcaaacttacctgcccacggaaagtaatgaaaaccagacagccactgtcatctctctccctgccaagtcacgcaccaaaaagcccacaacaccacctgctcagaaaaggcttaactgttgctatccaggttgccaattcaagactgcttatggcatgaaggacatggagcggcatttaaaaattcacacgggagacaaaccccataagtgtgaagtctgtggcaagtgctttagccggaaagacaagctgaaaactcacatgcggtgccacacgggcgtgaagccctacaagtgtaagacgtgtgactacgccgctgccgacagcagcagcctcaacaagcacctgaggatccactcggacgagcggcccttcaaatgccagatctgcccctacgccagccgcaactccagccagctcactgtccacctgcgatcccacacgggggatacccccttccagtgctggctctgtagcgccaagttcaaaatcagctcggacttgaaaaggcacatgatcgtgcactcgggggagaagcctttcaagtgcgagttctgcgacgtccgctgcaccatgaaggcgaatctcaaatcgcacatccgcatcaagcacaccttcaaatgtctgcactgtgccttccagggccgggaccgggctgacctcctggagcacagccggctgcaccaggccgaccacccggagaagtgtccagagtgcagctactcctgctccagcaaggccgccctgcgcatccacgagcgtatccactgcaccgaccgccctttcaagtgcaactactgcagcttcgacaccaaacagcccagcaacctgagcaagcacatgaagaagttccacggggacatggttaagactgaggctctagagaggaaggacaccggcaggcagagcagccggcaggtggccaagctggagtgcagtggcgctatcttggctcactgcaacgtccgcctcccaggttcaagcgattctcatgcctcagccctccgagtagctgggaccacaggtgtacgacatcatgactggctaatttttgtatatttagtagagacggggtttcatcatgttgaactcctgacctcaagtgatctgcccacctcagcctcccaaagtgctgggattacaggtgtgagccaccatgcctggccgtggtttgctcttaatgtttttaaggatggttgtgaatccccctggccccataataaattgtaattttatactgcttactataatttttttaacactgtaacaactttgagaccacctctgaatcgtcgcattataactgttgtagaatcttaaatgttaccaagatgattccaatgaggggttggaattaaatgcattaagtagtgaattcatgtgtttgtttccaacttgattttccaactctaataaaggtttctgtccatcttattacatttgtgtagtaaatggtacttcccagcctctcttttgccccattctggaatactccccagagtttgggggtgttcatgttttatacatgtaagtctgttggcatgaaggaccattttctacataatatgacatggatacttgacccaaaaaaaaatgtttagtgctaatgagcagaaaatgaatggttccataataaattgatatctgattaaaata

SEQ ID NO: 326460 - DNA, 2705 bp, Homo sapiens
  misc_feature (1)..(1): n is a, c, g, or t
  misc_feature (5)..(5): n is a, c, g, or t
  misc_feature (7)..(7): n is a, c, g, or t
ngcangnggggcaggggcgcatccctcgccacccgcggtcgcccagcacgccgggacgcgcgtggccatccagctccccgggggcgttggggggctccgcgggcctgggcctcgggattcgcccgccgcttccccggggagccgctgctgcaaagccaggttggggcgccgggcccggccagcgccctctaggcagcggaagtgcagcttgctttacatccgtcctccccgcctcgcagagttgggagaaggcagggtggggggtgtggaaaaataaaaggaaaagtccttgcaccatgtagatcagcgtcccccactttggcatcccggccggccggggacctcccagtctgcggccatgaacgcgagcagcgagggcgagagcttcgcgggctcggtgcaaattccaggtggcacaacggtgctggtggagctgactcccgacatccatatctgcggcatctgcaagcagcagtttaacaacctggatgcctttgtagctcacaagcaaagtggctgccagctgacaggcacatccgcagcagcccccagcacggtccagtttgtatcggaggaaacagtgcctgccacccagactcagaccaccaccagaaccatcacctcggagacccagacaatcacagtttcagctccagaatttgtttttgaacatggctatcaaacttacctgcccacggaaagtaatgaaaaccagacagccactgtcatctctctccctgccaagtcacgcaccaaaaagcccacaacaccacctgctcagaaaaggcttaactgttgctatccaggttgccaattcaagactgcttatggcatgaaggacatggagcggcatttaaaaattcacacgggagacaaaccccataagtgtgaagtctgtggcaagtgctttagccggaaagacaagctgaaaactcacatgcggtgccacacgggcgtgaagccctacaagtgtaagacgtgtgactacgccgctgccgacagcagcagcctcaacaagcacctgaggatccactcggacgagcggcccttcaaatgccagatctgcccctacgccagccgcaactccagccagctcactgtccacctgcgatcccacacggggccgggaccgggctgacctcctggagcacagccggctgcaccaggccgaccacccggagaagtgtccagagtgcagctactcctgctccagcgcggccgccctgcgcgtgcacagcagagtccactgtaaggaccgtcccttcaagtgtgacttctgcagcttcgacacgaagcggcccagcagcctggccaagcacgtcgacaaggtgcacagggacgaggccaagacggagaaccgggcccctctgggcaaggaagggctcagagagggcagctcccagcacgtggccaagatcgtgacgcagagggccttccgctgtgagacctgcggcgcctccttcgtcagggatgactctctgagatgccacaagaagcagcacagtgatcagagtgagaacaagaactcagacttggtcaccttcccaccggaaagcggtgcctcgggacagctcagcaccctggtctccgtggggcagctcgaggctcccctagagcccagccaagacctctagctcagccgaagagggtggtcagctgtcggaacttctgaccagtgctgttgcccagccctccagaggtgaggccactgagagacaggctttgggcaccacttctggggctggccgctccaacttcacaggccttcagaggcgatggctgggcgacagtgacgaaagcaaagcaaagcagggctgtggagacactcctcgcatttgtctcttccctccaaggattatctgagcaagtcgacttgttcattcaaaggcggggtctgccaagccctgctctatccaatggggatagcttctacgtaacggattccaattttaaaactgatccatctctgatggaattattaaacttagacgatatagaaaactaaaactaatctctagagtggaaagggttaaagtgaggaaggtgtacgtgaagggtctggggttgctggaaaacttctatttcataacctgggtgatcgttctaagagtgtttgccttatatgtttgtgtggtttcttttacctgttgtcttacaataaaaaaggcagactcatggtagcatgatgtaaggaacactcaattttgcagccctccacagacagttacggtagaaggttctccatccccagcccgcgccccattcagtaacttaattataaacgccacattggatttctcaatgagttcctactgtagtaaaacgaaatgcagtttgatctggaggtggcgccaaagatcaagctaactagcccagcctgtgcttgtctgttgtggaattcaaaattctgtttaattctatttggagagaaaagtccaggggcccagtgggccctgagcttggtgctgggtgctgggatatgtgatacgtgggacagcctcacaccagcatctgtttcatcacggaaagcatttagtgtttgctgaacccacaaactactgaaaatccaacctcttctcatagatggacccttaggaggttatgaaatctcagtggatataatacttacccaaagttgcttggtttctacttttggcatctttccttcaaatactctttttaaatataaagtcttgtgtgccctc

SEQ ID NO: 326461 - DNA, 3205 bp, Homo sapiens
  misc_feature (1)..(1): n is a, c, g, or t
  misc_feature (5)..(5): n is a, c, g, or t
  misc_feature (7)..(7): n is a, c, g, or t
ngcangnggggcaggggcgcatccctcgccacccgcggtcgcccagcacgccgggacgcgcgtggccatccagctccccgggggcgttggggggctccgcgggcctgggcctcgggattcgcccgccgcttccccggggagccgctgctgcaaagccaggttggggcgccgggcccggccagcgccctctaggcagcggaagtgcagcttgctttacatccgtcctccccgcctcgcagagttgggagaaggcagggtggggggtgtggaaaaataaaaggaaaagtccttgcaccatgtagatcagcgtcccccactttggcatcccggccggccggggacctcccagtctgcggccatgaacgcgagcagcgagggcgagagcttcgcgggctcggtgcaaattccaggtggcacaacggtgctggtggagctgactcccgacatccatatctgcggcatctgcaagcagcagtttaacaacctggatgcctttgtagctcacaagcaaagtggctgccagctgacaggcacatccgcagcagcccccagcacggtccagtttgtatcggaggaaacagtgcctgccacccagactcagaccaccaccagaaccatcacctcggagacccagacaatcacaggttgccaattcaagactgcttatggcatgaaggacatggagcggcatttaaaaattcacacgggagacaaaccccataagtgtgaagtctgtggcaagtgctttagccggaaagacaagctgaaaactcacatgcggtgccacacgggcgtgaagccctacaagtgtaagacgtgtgactacgccgctgccgacagcagcagcctcaacaagcacctgaggatccactcggacgagcggcccttcaaatgccagatctgcccctacgccagccgcaactccagccagctcactgtccacctgcgatcccacacggcttcagaacttgatgatgatgttccaaaagcaaactgcctctccactgaaagcactgacactccgaaggcccctgtcatcactcttccctcagaggcaagggaacaaatggccacccttggagagaggacgttcaactgttgctacccaggttgccacttcaaaactgtccatggcatgaaagacttggaccgccatctcagaatccacacgggagacaaaccgcacaagtgtgagttctgtgacaagtgcttcagccggaaggacaacctgaccatgcacatgcggtgccacaccagtgtgaagccacacaagtgtcacctgtgtgactacgctgccgtggacagcagtagcctcaagaagcacctgcggatccactctgatgagcggccgtacaaatgccagctctgcccctatgccagccgcaactccagccagctcaccgtccacctgcgatctcacacgggggatacccccttccagtgctggctctgtagcgccaagttcaaaatcagctcggacttgaaaaggcacatgatcgtgcactcgggggagaagcctttcaagtgcgagttctgcgacgtccgctgcaccatgaaggcgaatctcaaatcgcacatccgcatcaagcacaccttcaaatgtctgcactgtgccttccagggccgggaccgggctgacctcctggagcacagccggctgcaccaggccgaccacccggagaagtgtccagagtgcagctactcctgctccagcgcggccgccctgcgcgtgcacagcagagtccactgtaaggaccgtcccttcaagtgtgacttctgcagcttcgacacgaagcggcccagcagcctggccaagcacgtcgacaaggtgcacagggacgaggccaagacggagaaccgggcccctctgggcaaggaagggctcagagagggcagctcccagcacgtggccaagatcgtgacgcagagggccttccgctgtgagacctgcggcgcctccttcgtcagggatgactctctgagatgccacaagaagcagcacagtgatcagagtgagaacaagaactcagacttggtcaccttcccaccggaaagcggtgcctcgggacagctcagcaccctggtctccgtggggcagctcgaggctcccctagagcccagccaagacctctagctcagccgaagagggtggtcagctgtcggaacttctgaccagtgctgttgcccagccctccagaggtgaggccactgagagacaggctttgggcaccacttctggggctggccgctccaacttcacaggccttcagaggcgatggctgggcgacagtgacgaaagcaaagcaaagcagggctgtggagacactcctcgcatttgtctcttccctccaaggattatctgagcaagtcgacttgttcattcaaaggcggggtctgccaagccctgctctatccaatggggatagcttctacgtaacggattccaattttaaaactgatccatctctgatggaattattaaacttagacgatatagaaaactaaaactaatctctagagtggaaagggttaaagtgaggaaggtgtacgtgaagggtctggggttgctggaaaacttctatttcataacctgggtgatcgttctaagagtgtttgccttatatgtttgtgtggtttcttttacctgttgtcttacaataaaaaaggcagactcatggtagcatgatgtaaggaacactcaattttgcagccctccacagacagttacggtagaaggttctccatccccagcccgcgccccattcagtaacttaattataaacgccacattggatttctcaatgagttcctactgtagtaaaacgaaatgcagtttgatctggaggtggcgccaaagatcaagctaactagcccagcctgtgcttgtctgttgtggaattcaaaattctgtttaattctatttggagagaaaagtccaggggcccagtgggccctgagcttggtgctgggtgctgggatatgtgatacgtgggacagcctcacaccagcatctgtttcatcacggaaagcatttagtgtttgctgaacccacaaactactgaaaatccaacctcttctcatagatggacccttaggaggttatgaaatctcagtggatataatacttacccaaagttgcttggtttctacttttggcatctttccttcaaatactctttttaaatataaagtcttgtgtgccctc

SEQ ID NO: 326462 - DNA, 1998 bp, Homo sapiens
cagttgtcccatctgtaaagtgggggtaatagtacccactcataggattgttgtgaggattgcattaatatgcacaacaagtgttgtcattaggaggttgggtttagagttcacaaaacccaaccatctcatggcggccaagtgtgctaaggcaggttggggtgggagggtctgttttgcctgcctgttctaatggaaacacaccttccattgctaggggatacccccttccagtgctggctctgtagcgccaagttcaaaatcagctcggacttgaaaaggcacatgatcgtgcactcgggggagaagcctttcaagtgcgagttctgcgacgtccgctgcaccatgaaggcgaatctcaaatcgcacatccgcatcaagcacaccttcaaatgtctgcactgtgccttccagggccgggaccgggctgacctcctggagcacagccggctgcaccaggccgaccacccggagaagtgtccagagtgcagctactcctgctccagcgcggccgccctgcgcgtgcacagcagagtccactgtaaggaccgtcccttcaagtgtgacttctgcagcttcgacacgaagcggcccagcagcctggccaagcacgtcgacaaggtgcacagggacgaggccaagacggagaaccgggcccctctgggcaaggaagggctcagagagggcagctcccagcacgtggccaagatcgtgacgcagagggccttccgctgtgagacctgcggcgcctccttcgtcagggatgactctctgagatgccacaagaagcagcacagtgatcagagtgagaacaagaactcagacttggtcaccttcccaccggaaagcggtgcctcgggacagctcagcaccctggtctccgtggggcagctcgaggctcccctagagcccagccaagacctctagctcagccgaagagggtggtcagctgtcggaacttctgaccagtgctgttgcccagccctccagaggtgaggccactgagagacaggctttgggcaccacttctggggctggccgctccaacttcacaggccttcagaggcgatggctgggcgacagtgacgaaagcaaagcaaagcagggctgtggagacactcctcgcatttgtctcttccctccaaggattatctgagcaagtcgacttgttcattcaaaggcggggtctgccaagccctgctctatccaatggggatagcttctacgtaacggattccaattttaaaactgatccatctctgatggaattattaaacttagacgatatagaaaactaaaactaatctctagagtggaaagggttaaagtgaggaaggtgtacgtgaagggtctggggttgctggaaaacttctatttcataacctgggtgatcgttctaagagtgtttgccttatatgtttgtgtggtttcttttacctgttgtcttacaataaaaaaggcagactcatggtagcatgatgtaaggaacactcaattttgcagccctccacagacagttacggtagaaggttctccatccccagcccgcgccccattcagtaacttaattataaacgccacattggatttctcaatgagttcctactgtagtaaaacgaaatgcagtttgatctggaggtggcgccaaagatcaagctaactagcccagcctgtgcttgtctgttgtggaattcaaaattctgtttaattctatttggagagaaaagtccaggggcccagtgggccctgagcttggtgctgggtgctgggatatgtgatacgtgggacagcctcacaccagcatctgtttcatcacggaaagcatttagtgtttgctgaacccacaaactactgaaaatccaacctcttctcatagatggacccttaggaggttatgaaatctcagtggatataatacttacccaaagttgcttggtttctacttttggcatctttccttcaaatactctttttaaatataaagtcttgtgtgccctc

SEQ ID NO: 326463 - DNA, 453 bp, Homo sapiens
tttcgtaaggcagtgggaaataagccttttccttttttaatcttgtttcctgctgccatctgtgtgtgtatgtgtttgaaggagacaaaccccataagtgtgaagtctgtggcaagtgctttagccggaaagacaagctgaaaactcacatgcggtgccacacgggcgtgaagccctacaagtgtaagacgtgtgactacgccgctgccgacagcagcagcctcaacaagcacctgaggatccactcggacgagcggcccttcaaatgccagatctgcccctacgccagccgcaactccagccagctcactgtccacctgcgatcccacacggggtgagtcctgcctgttatttgctctctacgctcctcactttctatggcataaatcataagcaccttaaagcattcagccacaatgtaagaaatcgagttggaacctttgctcatcccgt

SEQ ID NO: 326464 - DNA, 1104 bp, Homo sapiens
  misc_feature (1)..(1): n is a, c, g, or t
  misc_feature (5)..(5): n is a, c, g, or t
  misc_feature (7)..(7): n is a, c, g, or t
ngcangnggggcaggggcgcatccctcgccacccgcggtcgcccagcacgccgggacgcgcgtggccatccagctccccgggggcgttggggggctccgcgggcctgggcctcgggattcgcccgccgcttccccggggagccgctgctgcaaagccaggttggggcgccgggcccggccagcgccctctaggcagcggaagtgcagcttgctttacatccgtcctccccgcctcgcagagttgggagaaggcagggtggggggtgtggaaaaataaaaggaaaagtccttgcaccatgtagatcagcgtcccccactttggcatcccggccggccggggacctcccagtctgcggccatgaacgcgagcagcgagggcgagagcttcgcgggctcggtgcaaattccaggtggcacaacggtgctggtggagctgactcccgacatccatatctgcggcatctgcaagcagcagtttaacaacctggatgcctttgtagctcacaagcaaagtggctgccagctgacaggcacatccgcagcagcccccagcacggtccagtttgtatcggaggaaacagtgcctgccacccagactcagaccaccaccagaaccatcacctcggagacccagacaatcacagatggagcctcgctctgttgcccaggctggagcgcaatgacgcgatcttggcccactgcaacctccgcctcccgggttcaagcaattctgcctcagcctcccgagtggctgggattacaggtacccaccacacgcccagctaattttgtatttttagtagagacaaagttttgccatgttggccaggctggtctcgaactcccgacctcaggtgatccgctgctcagcaccaaaagtgttgggattacaggcgtgagccaccgtcccggccctaaaatatattttctatatataaaagaggttagccctttagctgatcattaattaacaatgttctttgagctcctccccttcacctggtctgtggtggtggccggggcacgcggggccgaaacacggtggggcccttatctctcgcaaaaaaaaagctttaatttaaatttacacgaggagggggtaag

SEQ ID NO: 326465 - DNA, 3597 bp, Homo sapiens
  misc_feature (1)..(1): n is a, c, g, or t
  misc_feature (5)..(5): n is a, c, g, or t
  misc_feature (7)..(7): n is a, c, g, or t
ngcangnggggcaggggcgcatccctcgccacccgcggtcgcccagcacgccgggacgcgcgtggccatccagctccccgggggcgttggggggctccgcgggcctgggcctcgggattcgcccgccgcttccccggggagccgctgctgcaaagccaggttggggcgccgggcccggccagcgccctctaggcagcggaagtgcagcttgctttacatccgtcctccccgcctcgcagagttgggagaaggcagggtggggggtgtggaaaaataaaaggaaaagtccttgcaccatgtagatcagcgtcccccactttggcatcccggccggccggggacctcccagtctgcggccatgaacgcgagcagcgagggcgagagcttcgcgggctcggtgcaaattccaggtggcacaacggtgctggtggagctgactcccgacatccatatctgcggcatctgcaagcagcagtttaacaacctggatgcctttgtagctcacaagcaaagtggctgccagctgacaggcacatccgcagcagcccccagcacggtccagtttgtatcggaggaaacagtgcctgccacccagactcagaccaccaccagaaccatcacctcggagacccagacaatcacaggttgccaattcaagactgcttatggcatgaaggacatggagcggcatttaaaaattcacacgggagacaaaccccataagtgtgaagtctgtggcaagtgctttagccggaaagacaagctgaaaactcacatgcggtgccacacgggcgtgaagccctacaagtgtaagacgtgtgactacgccgctgccgacagcagcagcctcaacaagcacctgaggatccactcggacgagcggcccttcaaatgccagatctgcccctacgccagccgcaactccagccagctcactgtccacctgcgatcccacacgggggatacccccttccagtgctggctctgtagcgccaagttcaaaatcagctcggacttgaaaaggcacatgatcgtgcactcgggggagaagcctttcaagtgcgagttctgcgacgtccgctgcaccatgaaggcgaatctcaaatcgcacatccgcatcaagcacaccttcaaatgtctgcactgtgccttccagggccgggaccgggctgacctcctggagcacagccggctgcaccaggccgaccacccggagaagtgtccagagtgcagctactcctgctccagcaaggccgccctgcgcatccacgagcgtatccactgcaccgaccgccctttcaagtgcaactactgcagcttcgacaccaaacagcccagcaacctgagcaagcacatgaagaagttccacggggacatggttaagactgaggctctagagaggaaggacaccggcaggcagagcagccggcaggtggccaagctggatgccaagaagagtttccactgcgatatatgcgatgcctccttcatgcgggaggactcgctccgcagccacaagagacagcacagtgagtacaatgagagtaagaactcggacgtgaccgttctccagtttcagatcgaccccagcaagcagcccgccacgcccctcactgtgggacacctccaggtgcccctccagcccagccaagtgccccagttcagcgagggaagagtcaaaatcatcgttgggcatcaggtgccccaggcgaacaccatcgtccaggctgccgccgctgcagtgaacatcgtcccgcctgccttggtggcccagaacccagaggaactcccagggaacagccggctgcagatcctgcgccaggtcagtctgatcgccccccctcagtcctcgcggtgtccgagcgaggcgggcgcaatgacccagccggctgtcctgctgaccacccacgagcagacggacggagccactctgcaccagactctcatccccacggcctcaggtggcccccaggaaggctctggcaatcaaactttcattaccagttcgggtattacttgcactgactttgaaggcctaaacgccttgattcaggaggggacagcagaagtgacagtggtgagcgatggaggccagaacatcgcagtggccaccacagcgccaccggtcttctcctcctcttcccagcaagaactacccaagcagacctactccatcattcaaggggcagcccatccagctttgctctgtcccgccgactccattccagattagtgcttaaaaaacaaaaggagtgggggaaaggaattgagaaaaagaaatcttaagtagaattctctaaaaggtttgctcttaatgttttctttgttttgttttgtttttgagacggagtctcgctctgtttcccaggctggagtgcagtggcgctatcttggctcactgcaacgtccgcctcccaggttcaagcgattctcatgcctcagccctccgagtagctgggaccacaggtgtacgacatcatgactggctaatttttgtatatttagtagagacggggtttcatcatgttgaactcctgacctcaagtgatctgcccacctcagcctcccaaagtgctgggattacaggtgtgagccaccatgcctggccgtggtttgctcttaatgtttttaaggatggttgtgaatccccctggccccataataaattgtaattttatactgcttactataatttttttaacactgtaacaactttgagaccacctctgaatcgtcgcattataactgttgtagaatcttaaatgttaccaagatgattccaatgaggggttggaattaaatgcattaagtagtgaattcatgtgtttgtttccaacttgattttccaactctaataaaggtttctgtccatcttattacatttgtgtagtaaatggtacttcccagcctctcttttgccccattctggaatactccccagagtttgggggtgttcatgttttatacatgtaagtctgttggcatgaaggaccattttctacataatatgacatggatacttgacccaaaaaaaaatgtttagtgctaatgagcagaaaatgaatggttccataataaattgatatctgattaaaataaaaaaaaaaaaaaaaaaaaaaaaaaaaaaaaaaaaaaaaaaaaaaaaggggggggggggaaaaatatatcccacgagaggggggcccacagtttaagcggggcgaccaaaggtttcttggaacaaggggggcccacataagagggagagggcagtattataaaacagatgaagcaaggggcgcggggtttacaaacaagtgggtgagggggaaaacaggtgaacagggggaaacctgcgggagagagagaaaaccctcaagacggcgggggggagggacaacacaaggggggggcaacaacgtatctcctacagagagaaagtttttatgaggcgccttaagaggggagaaaattgtacaaattttcaagggggtggataaatggggggggtaaaaaacacgagggtggaacaataatgtgcgatcggggcatagaaaaaattgtgcgctacaaggagaaattatgtgattcttgatagaagatttttttacagggagc

SEQ ID NO: 326466 - DNA, 2969 bp, Homo sapiens
ggcagacaaagcctgtaggaagtgagtggccttctccaagccaagccccaagggatgacagagccataagacagaaggggtccgggcctttgatggagaacctcctactgacgttccaggtggcacaacggtgctggtggagctgactcccgacatccatatctgcggcatctgcaagcagcagtttaacaacctggatgcctttgtagctcacaagcaaagtggctgccagctgacaggcacatccgcagcagcccccagcacggtccagtttgtatcggaggaaacagtgcctgccacccagactcagaccaccaccagaaccatcacctcggagacccagacaatcacagtttcagctccagaatttgtttttgaacatggctatcaaacttacctgcccacggaaagtaatgaaaaccagacagccactgtcatctctctccctgccaagtcacgcaccaaaaagcccacaacaccacctgctcagaaaaggcttaactgttgctatccaggttgccaattcaagactgcttatggcatgaaggacatggagcggcatttaaaaattcacacgggagacaaaccccataagtgtgaagtctgtggcaagtgctttagccggaaagacaagctgaaaactcacatgcggtgccacacgggcgtgaagccctacaagtgtaagacgtgtgactacgccgctgccgacagcagcagcctcaacaagcacctgaggatccactcggacgagcggcccttcaaatgccagatctgcccctacgccagccgcaactccagccagctcactgtccacctgcgatcccacacgggggatacccccttccagtgctggctctgtagcgccaagttcaaaatcagctcggacttgaaaaggcacatgatcgtgcactcgggggagaagcctttcaagtgcgagttctgcgacgtccgctgcaccatgaaggcgaatctcaaatcgcacatccgcatcaagcacaccttcaaatgtctgcactgtgccttccagggccgggaccgggctgacctcctggagcacagccggctgcaccaggccgaccacccggagaagtgtccagagtgcagctactcctgctccagcaaggccgccctgcgcatccacgagcgtatccactgcaccgaccgccctttcaagtgcaactactgcagcttcgacaccaaacagcccagcaacctgagcaagcacatgaagaagttccacggggacatggttaagactgaggctctagagaggaaggacaccggcaggcagagcagccggcaggtggccaagctggatgccaagaagagtttccactgcgatatatgcgatgcctccttcatgcgggaggactcgctccgcagccacaagagacagcacagtgagtacaatgagagtaagaactcggacgtgaccgttctccagtttcagatcgaccccagcaagcagcccgccacgcccctcactgtgggacacctccaggtgcccctccagcccagccaagtgccccagttcagcgagggaagagtcaaaatcatcgttgggcatcaggtgccccaggcgaacaccatcgtccaggctgccgccgctgcagtgaacatcgtcccgcctgccttggtggcccagaacccagaggaactcccagggaacagccggctgcagatcctgcgccaggtcagtctgatcgccccccctcagtcctcgcggtgtccgagcgaggcgggcgcaatgacccagccggctgtcctgctgaccacccacgagcagacggacggagccactctgcaccagactctcatccccacggcctcaggtggcccccaggaaggctctggcaatcaaactttcattaccagttcgggtattacttgcactgactttgaaggcctaaacgccttgattcaggaggggacagcagaagtgacagtggtgagcgatggaggccagaacatcgcagtggccaccacagcgccaccggtcttctcctcctcttcccagcaagaactacccaagcagacctactccatcattcaaggggcagcccatccagctttgctctgtcccgccgactccattccagattagtgcttaaaaaacaaaaggagtgggggaaaggaattgagaaaaagaaatcttaagtagaattctctaaaaggtttgctcttaatgttttctttgttttgttttgtttttgagacggagtctcgctctgtttcccaggctggagtgcagtggcgctatcttggctcactgcaacgtccgcctcccaggttcaagcgattctcatgcctcagccctccgagtagctgggaccacaggtgtacgacatcatgactggctaatttttgtatatttagtagagacggggtttcatcatgttgaactcctgacctcaagtgatctgcccacctcagcctcccaaagtgctgggattacaggtgtgagccaccatgcctggccgtggtttgctcttaatgtttttaaggatggttgtgaatccccctggccccataataaattgtaattttatactgcttactataatttttttaacactgtaacaactttgagaccacctctgaatcgtcgcattataactgttgtagaatcttaaatgttaccaagatgattccaatgaggggttggaattaaatgcattaagtagtgaattcatgtgtttgtttccaacttgattttccaactctaataaaggtttctgtccatcttattacatttgtgtagtaaatggtacttcccagcctctcttttgccccattctggaatactccccagagtttgggggtgttcatgttttatacatgtaagtctgttggcatgaaggaccattttctacataatatgacatggatacttgacccaaaaaaaaatgtttagtgctaatgagcagaaaatgaatggttccataataaattgatatctgattaaaata

SEQ ID NO: 326467 - DNA, 3367 bp, Homo sapiens
  misc_feature (1)..(1): n is a, c, g, or t
  misc_feature (5)..(5): n is a, c, g, or t
  misc_feature (7)..(7): n is a, c, g, or t
ngcangnggggcaggggcgcatccctcgccacccgcggtcgcccagcacgccgggacgcgcgtggccatccagctccccgggggcgttggggggctccgcgggcctgggcctcgggattcgcccgccgcttccccggggagccgctgctgcaaagccaggttggggcgccgggcccggccagcgccctctaggcagcggaagtgcagcttgctttacatccgtcctccccgcctcgcagagttgggagaaggcagggtggggggtgtggaaaaataaaaggaaaagtccttgcaccatgtagatcagcgtcccccactttggcatcccggccggccggggacctcccagtctgcggccatgaacgcgagcagcgagggcgagagcttcgcgggctcggtgcaaattccaggtggcacaacggtgctggtggagctgactcccgacatccatatctgcggcatctgcaagcagcagtttaacaacctggatgcctttgtagctcacaagcaaagtggctgccagctgacaggcacatccgcagcagcccccagcacggtccagtttgtatcggaggaaacagtgcctgccacccagactcagaccaccaccagaaccatcacctcggagacccagacaatcacagtttcagctccagaatttgtttttgaacatggctatcaaacttacctgcccacggaaagtaatgaaaaccagacagccactgtcatctctctccctgccaagtcacgcaccaaaaagcccacaacaccacctgctcagaaaaggcttaactgttgctatccaggttgccaattcaagactgcttatggcatgaaggacatggagcggcatttaaaaattcacacgggagacaaaccccataagtgtgaagtctgtggcaagtgctttagccggaaagacaagctgaaaactcacatgcggtgccacacgggcgtgaagccctacaagtgtaagacgtgtgactacgccgctgccgacagcagcagcctcaacaagcacctgaggatccactcggacgagcggcccttcaaatgccagatctgcccctacgccagccgcaactccagccagctcactgtccacctgcgatcccacacggcttcagaacttgatgatgatgttccaaaagcaaactgcctctccactgaaagcactgacactccgaaggcccctgtcatcactcttccctcagaggcaagggaacaaatggccacccttggagagaggacgttcaactgttgctacccaggttgccacttcaaaactgtccatggcatgaaagacttggaccgccatctcagaatccacacgggagacaaaccgcacaagtgtgagttctgtgacaagtgcttcagccggaaggacaacctgaccatgcacatgcggtgccacaccagtgtgaagccacacaagtgtcacctgtgtgactacgctgccgtggacagcagtagcctcaagaagcacctgcggatccactctgatgagcggccgtacaaatgccagctctgcccctatgccagccgcaactccagccagctcaccgtccacctgcgatctcacacgggggatacccccttccagtgctggctctgtagcgccaagttcaaaatcagctcggacttgaaaaggcacatgatcgtgcactcgggggagaagcctttcaagtgcgagttctgcgacgtccgctgcaccatgaaggcgaatctcaaatcgcacatccgcatcaagcacaccttcaaatgtctgcactgtgccttccagggccgggaccgggctgacctcctggagcacagccggctgcaccaggccgaccacccggagaagtgtccagagtgcagctactcctgctccagcgcggccgccctgcgcgtgcacagcagagtccactgtaaggaccgtcccttcaagtgtgacttctgcagcttcgacacgaagcggcccagcagcctggccaagcacgtcgacaaggtgcacagggacgaggccaagacggagaaccgggcccctctgggcaaggaagggctcagagagggcagctcccagcacgtggccaagatcgtgacgcagagggccttccgctgtgagacctgcggcgcctccttcgtcagggatgactctctgagatgccacaagaagcagcacagtgatcagagtgagaacaagaactcagacttggtcaccttcccaccggaaagcggtgcctcgggacagctcagcaccctggtctccgtggggcagctcgaggctcccctagagcccagccaagacctctagctcagccgaagagggtggtcagctgtcggaacttctgaccagtgctgttgcccagccctccagaggtgaggccactgagagacaggctttgggcaccacttctggggctggccgctccaacttcacaggccttcagaggcgatggctgggcgacagtgacgaaagcaaagcaaagcagggctgtggagacactcctcgcatttgtctcttccctccaaggattatctgagcaagtcgacttgttcattcaaaggcggggtctgccaagccctgctctatccaatggggatagcttctacgtaacggattccaattttaaaactgatccatctctgatggaattattaaacttagacgatatagaaaactaaaactaatctctagagtggaaagggttaaagtgaggaaggtgtacgtgaagggtctggggttgctggaaaacttctatttcataacctgggtgatcgttctaagagtgtttgccttatatgtttgtgtggtttcttttacctgttgtcttacaataaaaaaggcagactcatggtagcatgatgtaaggaacactcaattttgcagccctccacagacagttacggtagaaggttctccatccccagcccgcgccccattcagtaacttaattataaacgccacattggatttctcaatgagttcctactgtagtaaaacgaaatgcagtttgatctggaggtggcgccaaagatcaagctaactagcccagcctgtgcttgtctgttgtggaattcaaaattctgtttaattctatttggagagaaaagtccaggggcccagtgggccctgagcttggtgctgggtgctgggatatgtgatacgtgggacagcctcacaccagcatctgtttcatcacggaaagcatttagtgtttgctgaacccacaaactactgaaaatccaacctcttctcatagatggacccttaggaggttatgaaatctcagtggatataatacttacccaaagttgcttggtttctacttttggcatctttccttcaaatactctttttaaatataaagtcttgtgtgccctc

SEQ ID NO: 326468 - DNA, 2840 bp, Homo sapiens
aggcagagctggggcgtggtcagggcttccaacagggcagcgccactcacccctggggagggacatttgggccggtctaacgcccactgtggacggtaaaggccgtttgggaacagctttcagctccagaatttgtttttgaacatggctatcaaacttacctgcccacggaaagtaatgaaaaccagacagccactgtcatctctctccctgccaagtcacgcaccaaaaagcccacaacaccacctgctcagaaaaggcttaactgttgctatccaggttgccaattcaagactgcttatggcatgaaggacatggagcggcatttaaaaattcacacgggagacaaaccccataagtgtgaagtctgtggcaagtgctttagccggaaagacaagctgaaaactcacatgcggtgccacacgggcgtgaagccctacaagtgtaagacgtgtgactacgccgctgccgacagcagcagcctcaacaagcacctgaggatccactcggacgagcggcccttcaaatgccagatctgcccctacgccagccgcaactccagccagctcactgtccacctgcgatcccacacggcttcagaacttgatgatgatgttccaaaagcaaactgcctctccactgaaagcactgacactccgaaggcccctgtcatcactcttccctcagaggcaagggaacaaatggccacccttggagagaggacgttcaactgttgctacccaggttgccacttcaaaactgtccatggcatgaaagacttggaccgccatctcagaatccacacgggagacaaaccgcacaagtgtgagttctgtgacaagtgcttcagccggaaggacaacctgaccatgcacatgcggtgccacaccagtgtgaagccacacaagtgtcacctgtgtgactacgctgccgtggacagcagtagcctcaagaagcacctgcggatccactctgatgagcggccgtacaaatgccagctctgcccctatgccagccgcaactccagccagctcaccgtccacctgcgatctcacacgggggatacccccttccagtgctggctctgtagcgccaagttcaaaatcagctcggacttgaaaaggcacatgatcgtgcactcgggggagaagcctttcaagtgcgagttctgcgacgtccgctgcaccatgaaggcgaatctcaaatcgcacatccgcatcaagcacaccttcaaatgtctgcactgtgccttccagggccgggaccgggctgacctcctggagcacagccggctgcaccaggccgaccacccggagaagtgtccagagtgcagctactcctgctccagcgcggccgccctgcgcgtgcacagcagagtccactgtaaggaccgtcccttcaagtgtgacttctgcagcttcgacacgaagcggcccagcagcctggccaagcacgtcgacaaggtgcacagggacgaggccaagacggagaaccgggcccctctgggcaaggaagggctcagagagggcagctcccagcacgtggccaagatcgtgacgcagagggccttccgctgtgagacctgcggcgcctccttcgtcagggatgactctctgagatgccacaagaagcagcacagtgatcagagtgagaacaagaactcagacttggtcaccttcccaccggaaagcggtgcctcgggacagctcagcaccctggtctccgtggggcagctcgaggctcccctagagcccagccaagacctctagctcagccgaagagggtggtcagctgtcggaacttctgaccagtgctgttgcccagccctccagaggtgaggccactgagagacaggctttgggcaccacttctggggctggccgctccaacttcacaggccttcagaggcgatggctgggcgacagtgacgaaagcaaagcaaagcagggctgtggagacactcctcgcatttgtctcttccctccaaggattatctgagcaagtcgacttgttcattcaaaggcggggtctgccaagccctgctctatccaatggggatagcttctacgtaacggattccaattttaaaactgatccatctctgatggaattattaaacttagacgatatagaaaactaaaactaatctctagagtggaaagggttaaagtgaggaaggtgtacgtgaagggtctggggttgctggaaaacttctatttcataacctgggtgatcgttctaagagtgtttgccttatatgtttgtgtggtttcttttacctgttgtcttacaataaaaaaggcagactcatggtagcatgatgtaaggaacactcaattttgcagccctccacagacagttacggtagaaggttctccatccccagcccgcgccccattcagtaacttaattataaacgccacattggatttctcaatgagttcctactgtagtaaaacgaaatgcagtttgatctggaggtggcgccaaagatcaagctaactagcccagcctgtgcttgtctgttgtggaattcaaaattctgtttaattctatttggagagaaaagtccaggggcccagtgggccctgagcttggtgctgggtgctgggatatgtgatacgtgggacagcctcacaccagcatctgtttcatcacggaaagcatttagtgtttgctgaacccacaaactactgaaaatccaacctcttctcatagatggacccttaggaggttatgaaatctcagtggatataatacttacccaaagttgcttggtttctacttttggcatctttccttcaaatactctttttaaatataaagtcttgtgtgccctc

SEQ ID NO: 326469 - DNA, 1713 bp, Homo sapiens
  misc_feature (1)..(1): n is a, c, g, or t
  misc_feature (5)..(5): n is a, c, g, or t
  misc_feature (7)..(7): n is a, c, g, or t
ngcangnggggcaggggcgcatccctcgccacccgcggtcgcccagcacgccgggacgcgcgtggccatccagctccccgggggcgttggggggctccgcgggcctgggcctcgggattcgcccgccgcttccccggggagccgctgctgcaaagccaggttggggcgccgggcccggccagcgccctctaggcagcggaagtgcagcttgctttacatccgtcctccccgcctcgcagagttgggagaaggcagggtggggggtgtggaaaaataaaaggaaaagtccttgcaccatgtagatcagcgtcccccactttggcatcccggccggccggggacctcccagtctgcggccatgaacgcgagcagcgagggcgagagcttcgcgggctcggtgcaaattccaggtggcacaacggtgctggtggagctgactcccgacatccatatctgcggcatctgcaagcagcagtttaacaacctggatgcctttgtagctcacaagcaaagtggctgccagctgacaggcacatccgcagcagcccccagcacggtccagtttgtatcggaggaaacagtgcctgccacccagactcagaccaccaccagaaccatcacctcggagacccagacaatcacagtttcagctccagaatttgtttttgaacatggctatcaaacttacctgcccacggaaagtaatgaaaaccagacagccactgtcatctctctccctgccaagtcacgcaccaaaaagcccacaacaccacctgctcagaaaaggcttaactgttgctatccaggttgccaattcaagactgcttatggcatgaaggacatggagcggcatttaaaaattcacacgggagacaaaccccataagtgtgaagtctgtggcaagtgctttagccggaaagacaagctgaaaactcacatgcggtgccacacgggcgtgaagccctacaagtgtaagacgtgtgactacgccgctgccgacagcagcagcctcaacaagcacctgaggatccactcggacgagcggcccttcaaatgccagatctgcccctacgccagccgcaactccagccagctcactgtccacctgcgatcccacacggcttcagaacttgatgatgatgttccaaaagcaaactgcctctccactgaaagcactgacactccgaaggcccctgtcatcactcttccctcagaggcaagggaacaaatggccacccttggagagaggacgttcaactgttgctacccaggttgccacttcaaaactgtccatggcatgaaagacttggaccgccatctcagaatccacacgggagacaaaccgcacaagtgtgagttctgtgacaagtgcttcagccggaaggacaacctgaccatgcacatgcggtgccacaccagtgtgaagccacacaagtgtcacctgtgtgactacgctgccgtggacagcagtagcctcaagaagcacctgcggatccactctgatgagcggccgtacaaatgccagctctgcccctatgccagccgcaactccagccagctcaccgtccacctgcgatctcacacgggtgagtccctgaccaggaaacctcaatcccttactttttctctaatttcttaaccttcatttacttaacaacacaagcaacttaaatgacttggtgtggtagaagtacaagaatttggaacttctgt

SEQ ID NO: 326470 - DNA, 324 bp, Homo sapiens
gggacagcattgagcatattttgacatcctcagctttgccgttttgtggttataatgatgtgttgggtcagttatttaaggatgcatttgatggtgagaggacagaggtgcggaagagtattctagatgttatacactggtaaatagggtagcttctggagaagtcagcagagagagcacccaaataattctgcagcactgacaggcgagtggagtctcggtgaacttctctacccgtctctgccctggaggactggagtcagcactgggcattgctcttaatttacagacaaggtgacagactggtgggtccagaggaagatg

SEQ ID NO: 326471 - DNA, 877 bp, Homo sapiens
gggctcagagctcgccgccaaggggcgtggcctccgggccgcggcggcctctgggagttgtagtcccgcctcaacttgtggtggcctctttaaaaaaacaaaaaacaaacaaacaaaaaaacactggcgcttgggtccgtcgctgcctcggtgtccctgtcgggcttcccagcagcggcctagtggaaaagtaaaagatgtctgaatatattcgggtaaccgaagatgagaacgatgagcccattgaaataccatcggaagacgatgggacggtgctgctgtccacggttacagcccagtttccaggggcgtgtgggcttcgctgcaggaatccggtgtctcaatgtatgagaggtgtccggctggtagaaggaattctgcatgcccccgatgctggctggagaaatccggtgtatgttgtcaactatccgaaagataacaaaagaaaaatgggtgagacagaagcttcatcagcagtgaaagtgaaaagaccagtccgatttaatagtgttgggtctcccatggaaaacaactgaacaggacctgaaagagtactgtagtacctttggagacgttcttatggtgcggcaaagccaagatgagcctttgagaagcagaaaagtgtttgtggggcgccgtacggaggacatgactgaggatgagctgtgggagttcttctctcagtatggggatgtgatggatgtcttcgtccccaagccgttcagggcctttgcctttgttccatttgcagatgatcagattgcgcggtctctttgtggagaggactcgatgaaaggaatcagcgttcacatatccaatgccgaacccaagcgcaatagcaatagacagcaagaagtggaagatttggtggtaatcc

SEQ ID NO: 326472 - DNA, 743 bp, Homo sapiens
tccagacggctactgatccatcatgcctcaaacagtgcctggcacataataaatattgttgactcaaagaaaagtgaatttgtttggagaattatctcttggttgacacttggttgactgctctgtcttttctaggtatgcagtgccattcagaatcaggatttcactgtgatcgaagactactgcactggcctcaaagccctgctttatctgaaaagcattgaagaactacaagactgggatggacagagtccagctactgtgagtcaccagaaagggaaaccagttccacgtatagctgaactcatggacaaggtatgtgcttaaatctcctgtgttattcttgagaactcagccttggtttctatttcagatcttatttaccatctcacattctcactaacaaaggaaacacagtgcctcctggatgtgatttcttcagtggactctttctgaaggagacttgattacagccatatgatgggtctgtgagttacctttttataaaccaatacaacacaagattatataaaaggaaaagaccaatgtttgcagtgtaaagtgcctccaaattcttgcttactgtggtgatgactggcattcttcccagtgggagtctggagatttctttatgctttctggaaattataacattacctttctattttcaagacaatcaaatcactgtagtcttgaataatataaggaagtttttaaaattaaaatctaatcagtatcttttg

SEQ ID NO: 326473 - DNA, 2211 bp, Homo sapiens
gttgtcagagtagagcatacgatgggggtttctgctctggagcaatgtatccacatgacttcccaacaactttccacactgagcttggggcctgtgaggactgggggaccctcctgtagcaataaaatgtgccactcacatctgtggtagtgatggggaccaccaagggtctctagattacctttttgctgcaagaataagtcccctttgactccaatctgatccctgcaggagagatagtgtggccaaggcagaatgctttgctctcctctctatgttggtatactaggtttctgtggtccagaggtattttgtcatttccgtgttgcttcataacatacttcctcagtcactgcagtcaaacagtagttgtagttgtttatttgttgttttgtttcctttttgtcaggggatgagagccaaataagtctagttagcctcttgctgacatcactctagctctctgaaacagttattttccttgttctctaacaatgtcaattttcttaaaatttctaaactgccaagttttggaccttatctggaacagcgcaagaaaatcatagcagaaaacaagattagactgaaagaacaaaatgtagctttttcaccacttaagagaaactgttttatccccaaaaggcctattcctaccatcaaggatgtaataggaaaagcactgcagtaccttggaacatttggtgaattgagcaacgtagagcaagttgtggctatgattgatgaagaaatgtgtatcaactgtggtaaatgctacatgacctgtaatgattctggctaccaggctatacagtttgatccagaaacccacctgcccaccataaccgacacttgtacaggctgtactctgtgtctcagtgtttgccctattgtcgactgcatcaaaatggtttccaggacaacaccttatgaaccaaagagaggcgtacccttatctgtgaatccggtgtgttaaggtgatttgtgaaacagttgctgtgaactttcatgtcacctacatatgctgatcttttaaaatcatgatccttgtgttcagctctttccaaattaaaacaaatatacattttctaaataaaaatatgtaatttcaaaatacatttgtaagtgtaaaaaatgtctcatgtcaatgaccattcaattagtggtcataaaatagaataattcttttctgaggatagtagttaaataactgtgtggcagttaattggatgttcactgccagttgtcttatgtgaaaaattaacttttttgtggcaattagtgtgacagtttccaaattgccctatgctgtgctccatatttgatttctaattgtaagtgaaattaagcattttgaaacaaagtactctttaacatacaagaaaatgtatccaaggaaacattttatcattaaaaattacctttaattttaatgctgtttctaagaaaatgtagttagctccataaagtacaaatgaagaaagtcaaaaaattatttgctatggcaggataagaaagcctaaaattgagtttgtagaactttattaagtaaaatccccttcgctgaaattgcttatttttggtgttggatagaggatagggagaatatttactaactaaataccattcactactcatgcgtgagatgggtgtacaaactcatcctcttttaatggcatttctctttaaactatgttcctaacaaaatgagatgataggatagatcctggttaccactcttttactgtgcacatacgggctctgactggttttaatagtcaccttcatgattatagcaactaatgtttgaacaaagctcaaagtatgcaatgcttcattattcaagaatgaaaaatataatgttgataatatatattaagtgtgccaaatcagtttgactactctctgttttagtgtttatgtttaaaagaaatatattttttgttattattagataatatttttgtatttctctattttcataatcagtaaatagtgtcatataaactcatttatctcctcttcatggcatcttcaatatgaatctataagtagtaaatcagaaagtaacaatctatggcttatttctatgacaaattcaagagctagaaaaataaaatgtttcattatgcacttttagaaatgcatatttgccacaaaacctgtattactgaataatatcaaataaaatatcataaagcattttaaaaaagg

SEQ ID NO: 326474 - DNA, 1038 bp, Homo sapiens
  misc_feature (57)..(57): n is a, c, g, or t
gatcttattatgaccatatcatctggtgcgtggcaccttgattggtgtacgtgtatncctggatctagtcactagtgtctgctgtcgtccaatatactcttggatcctcgtacatatgtgctgtggaatatcttacaagcattttagaaaccagacagctgactgctttaaacgatacgatgcatgaatgtattccaaggtagagacgattcttgatcgattcataactttgtgacctttttcatttgagtgtctcgtagtctaacacgaatgtcagatttgactccataaagtacaaatgaagaaagtcaaaaaattatttgctatggcaggataagaaagcctaaaattgagtttgtagaactttattaagtaaaatccccttcgctgaaattgcttatttttggtgttggatagaggatagggagaatatttactaactaaataccattcactactcatgcgtgagatgggtgtacaaactcatcctcttttaatggcatttctctttaaactatgttcctaacaaaatgagatgataggatagatcctggttaccactcttttactgtgcacatacgggctctgactggttttaatagtcaccttcatgattatagcaactaatgtttgaacaaagctcaaagtatgcaatgcttcattattcaagaatgaaaaatataatgttgataatatatattaagtgtgccaaatcagtttgactactctctgttttagtgtttatgtttaaaagaaatatattttttgttattattagataatatttttgtatttctctattttcataatcagtaaatagtgtcatataaactcatttatctcctcttcatggcatcttcaatatgaatctataagtagtaaatcagaaagtaacaatctatggcttatttctatgacaaattcaagagctagaaaaataaaatgtttcattatgcacttttagaaatgcatatttgccacaaaacctgtattactgaataatatcaaataaaatatcataaagcattttaaaaaagg

SEQ ID NO: 326475 - DNA, 2009 bp, Homo sapiens
tccagacggctactgatccatcatgcctcaaacagtgcctggcacataataaatattgttgactcaaagaaaagtgaatttgtttggagaattatctcttggttgacacttggttgactgctctgtcttttctaggtatgcagtgccattcagaatcaggatttcactgtgatcgaagactactgcactggcctcaaagccctgctttatctgaaaagcattgaagaactacaagactgggatggacagagtccagctactgtgagtcaccagaaagggaaaccagttccacgtatagctgaactcatggacaagaaactgccaagttttggaccttatctggaacagcgcaagaaaatcatagcagaaaacaagattagactgaaagaacaaaatgtagctttttcaccacttaagagaaactgttttatccccaaaaggcctattcctaccatcaaggatgtaataggaaaagcactgcagtaccttggaacatttggtgaattgagcaacgtagagcaagttgtggctatgattgatgaagaaatgtgtatcaactgtggtaaatgctacatgacctgtaatgattctggctaccaggctatacagtttgatccagaaacccacctgcccaccataaccgacacttgtacaggctgtactctgtgtctcagtgtttgccctattgtcgactgcatcaaaatggtttccaggacaacaccttatgaaccaaagagaggcgtacccttatctgtgaatccggtgtgttaaggtgatttgtgaaacagttgctgtgaactttcatgtcacctacatatgctgatcttttaaaatcatgatccttgtgttcagctctttccaaattaaaacaaatatacattttctaaataaaaatatgtaatttcaaaatacatttgtaagtgtaaaaaatgtctcatgtcaatgaccattcaattagtggtcataaaatagaataattcttttctgaggatagtagttaaataactgtgtggcagttaattggatgttcactgccagttgtcttatgtgaaaaattaacttttttgtggcaattagtgtgacagtttccaaattgccctatgctgtgctccatatttgatttctaattgtaagtgaaattaagcattttgaaacaaagtactctttaacatacaagaaaatgtatccaaggaaacattttatcattaaaaattacctttaattttaatgctgtttctaagaaaatgtagttagctccataaagtacaaatgaagaaagtcaaaaaattatttgctatggcaggataagaaagcctaaaattgagtttgtagaactttattaagtaaaatccccttcgctgaaattgcttatttttggtgttggatagaggatagggagaatatttactaactaaataccattcactactcatgcgtgagatgggtgtacaaactcatcctcttttaatggcatttctctttaaactatgttcctaacaaaatgagatgataggatagatcctggttaccactcttttactgtgcacatacgggctctgactggttttaatagtcaccttcatgattatagcaactaatgtttgaacaaagctcaaagtatgcaatgcttcattattcaagaatgaaaaatataatgttgataatatatattaagtgtgccaaatcagtttgactactctctgttttagtgtttatgtttaaaagaaatatattttttgttattattagataatatttttgtatttctctattttcataatcagtaaatagtgtcatataaactcatttatctcctcttcatggcatcttcaatatgaatctataagtagtaaatcagaaagtaacaatctatggcttatttctatgacaaattcaagagctagaaaaataaaatgtttcattatgcacttttagaaatgcatatttgccacaaaacctgtattactgaataatatcaaataaaatatcataaagcattttaaaaaagg

SEQ ID NO: 326476 - DNA, 591 bp, Homo sapiens
tcttttttttgagacgttagaaattttgtataaaaaggaggataaaacagttcattctctgtccagtcaatagctatggtaactatttagtatgatgaagatgccgtaagatatgaaattaatgaacaattgtcctaattttcagtaaacattattattttaaggcctctattgctcaagtctcctattgtttaaatttttatcttcctttccttttgaatgctagatttaatgactcaagtgttcacgtcagaattttccccttttatgtagccctctcaaaccccacagttcacatccacttgaaacacacataattataaaagatgagagaccaattattatcttctctcctcccctgtatcctcacaggtgcctggctacttcaagagttgagctaatcacagggaagattcagtctcagttcagctgcctcatttgatcagctcaagactgagtccaacaaaagtggtctgtctaatgaaactcattttcattttttctcattagtctatacacgattgagactgtagaacgacaaaagaataaaaagaagaatgacaattaaaaatcattttctctggcccttga

SEQ ID NO: 326477 - DNA, 316 bp, Homo sapiens
gctttccccaggggcaaccagcccagttcaatttgcctgggggcttttgactctacaatctcttccaacattaaacaagtgaatcctgcgcaccctggtgcctggctacttcaagagttgagctaatcacagggaagattcagtctcagttcagctgcctcatttgatcagctcaagactgagtccaacaaaagtggtctgtctaatgaaactcattttcattttttctcattagtctatacacgattgagactgtagaacgacaaaagaataaaaagaagaatgacaattaaaaatcattttctctggcccttga

SEQ ID NO: 326478 - DNA, 289 bp, Homo sapiens
agacttcagaagaactgacccaaggacaaaggtccacccaggccatggaagaggctcctcaaccgtttgggtgcctggctacttcaagagttgagctaatcacagggaagattcagtctcagttcagctgcctcatttgatcagctcaagactgagtccaacaaaagtggtctgtctaatgaaactcattttcattttttctcattagtctatacacgattgagactgtagaacgacaaaagaataaaaagaagaatgacaattaaaaatcattttctctggcccttga

SEQ ID NO: 326479 - DNA, 574 bp, Homo sapiens
gtattgatattaagaattacgtatatagatggacatttacaatttgtcagaggtttttctcaagtaaattattaaattagtattacttttttctctggagaaacaaaaccgttgcaaaatgtaatcttctataatgatttttttaaaaaaagtttctactgttgaaatatgtgcctggtgtaatgaaagggaggttgtacaataatccaaacaaaattaaattaacttctgtgaaggaaaagtcatttagtttttgagagattatattcctttgaactggaatgattttaaagtgatttatattaccaagaaaattaccatgtcaaaacggaaaaggaaatccttgcattggacactggtgattttgcccatttaagacatctttggggtgactttttaacttgagagaaaactcagggcatacaaacgattgtgaagaaaaaaatagaagaggcttctattctctagttcattactccttagctttaaaaattatttctttcacaaggatattttattgatgacttacctgaaggcacaaaacatttggtgtttttaaaaacacaccatctgc

SEQ ID NO: 326480 - DNA, 455 bp, Homo sapiens
agaactcagtatgtttgttgaatgattcttacatgatacctcttaacacaggtgattacatggatccaacacctgatccccaagattgaagatggaaatgattttggggtagcaatccaggagaaggtgctggagagggtgaatgccgtcaagaccaaagtggaagctttccagacaaccatttccaagtacttctcagaacgtggggatgctgtggccaaggcctccaaggagactcatgtaatggattaccgggccttggtgcatgagcgagatgaggcagcctatggggagctcagggccatggtgctggacctgagggccttctatgctgagctttatcatatcatcagcagcaacctggagaaaattgtcaacccaaagggtgaagaaaagccatctatgtactgaacccgggactagaaggaaaataaatgatctatatgttgtgtgga

SEQ ID NO: 326481 - DNA, 978 bp, Homo sapiens
aaaaaaaaaaaaaaaaaaaactggggagtgaaagcgaaagcccgggcgactagccgggagaccagagatctagcgactgaagcagcatggccaagccgtgtggggtgcgcctgagcggggaagcccgcaaacaggtggaggtcttcagacagaatcttttccaggagttcaggtcttcagtttcctcatttgcaagtcttggacccagtgatttccaaaggcccttccagttccatttgtcagacatctcattgagcatattctgtgattcccctcccttgcaatgtaacccacagctgaggaattcctctacagattcttgccacagaaaatcatatacctgaatcagctcttgcaagaggactccctcaatgtggctgacttgacttccctccgggccccactggacatccccatcccagaccctccacccaaggatgatgagatggaaacagataagcaggagaagaaagaagtccctaagtgtggatttctccctgggaatgagaaagtcctgtccctgcttgccctggttaagccagaagtctggactctcaaagagaaatgcattctggtgattacatggatccaacacctgatccccaagattgaagatggaaatgattttggggtagcaatccaggagaaggtgctggagagggtgaatgccgtcaagaccaaagtggaagctttccagacaaccatttccaagtacttctcagaacgtggggatgctgtggccaaggcctccaaggagactcatgtaatggattaccgggccttggtgcatgagcgagatgaggcagcctatggggagctcagggccatggtgctggacctgagggccttctatgctgagctttatcatatcatcagcagcaacctggagaaaattgtcaacccaaagggtgaagaaaagccatctatgtactgaacccgggactagaaggaaaataaatgatctatatgttgtgtgga

SEQ ID NO: 326482 - DNA, 1055 bp, Homo sapiens
aaaaaaaaaaaaaaaaaaaactggggagtgaaagcgaaagcccgggcgactagccgggagaccagagatctagcgactgaagcagcatggccaagccgtgtggggtgcgcctgagcggggaagcccgcaaacaggtggaggtcttcagacagaatcttttccaggaggctgaggaattcctctacagattcttgccacagaaaatcatatacctgaatcagctcttgcaagaggactccctcaatgtggctgacttgacttccctccgggccccactggacatccccatcccagaccctccacccaaggatgatgagatggaaacagataagcaggagaagaaagaagtccctaagtgtggatttctccctgggaatgagaaagtcctgtccctgcttgccctggttaagccagaagtctggactctcaaagagaaatgcattctggtgattacatggatccaacacctgatccccaagattgaagatggaaatgattttggggtagcaatccaggagaaggtgctggagagggtgaatgccgtcaagaccaaagtggaagctttccagacaaccatttccaagtacttctcagaacgtggggatgctgtggccaaggcctccaaggagactcatgtaatggattaccgggccttggtgcatgagcgagatgaggcagcctatggggagctcagggccatggtgctggacctgagggccttctatgctgagctttatcatatcatcagcagcaacctggagaaaattgtcaacccaaagggtgaagaaaagccatctatgtactgaacccgggactagaaggaaaataaatgatctatatgttgtgtggaaaaaaaaaaaaaaaaaaaaaataaaaaataaaaaaaaaaaaccccggggaggcacacagagcggggggaggaaacacaagggtttaaaagcgaccaggagaaaatagtagtgtcacaggacccaactctatggtcacgagggggaaacaggcgggccacaataggagacgcgagaatcggacaccgaggtcgtgatacggcaaca

SEQ ID NO: 326483 - DNA, 817 bp, Homo sapiens
aaaaaaaaaaaaaaaaaaaactggggagtgaaagcgaaagcccgggcgactagccgggagaccagagatctagcgactgaagcagcatggccaagccgtgtggggtgcgcctgagcggggaagcccgcaaacaggctgaggaattcctctacagattcttgccacagaaaatcatatacctgaatcagctcttgcaagaggactccctcaatgtggctgacttgacttccctccgggccccactggacatccccatcccagaccctccacccaaggatgatgagatggaaacagataagcaggagaagaaagaagtccctaagtgtggatttctccctgggaatgagaaagtcctgtccctgcttgccctggttaagccagaagtctggactctcaaagagaaatgcattctggtgattacatggatccaacacctgatccccaagattgaagatggaaatgattttggggtagcaatccaggagaaggtgctggagagggtgaatgccgtcaagaccaaagtggaagctttccagacaaccatttccaagtacttctcagaacgtggggatgctgtggccaaggcctccaaggagactcatgtaatggattaccgggccttggtgcatgagcgagatgaggcagcctatggggagctcagggccatggtgctggacctgagggccttctatgctgagctttatcatatcatcagcagcaacctggagaaaattgtcaacccaaagggtgaagaaaagccatctatgtactgaacccgggactagaaggaaaataaatgatctatatgttgtgtgga

SEQ ID NO: 326484 - DNA, 930 bp, Homo sapiens
aaaaaaaaaaaaaaaaaaaactggggagtgaaagcgaaagcccgggcgactagccgggagaccagagatctagcgactgaagcagcatggccaagccgtgtggggtgcgcctgagcggggaagcccgcaaacaggtggaggtcttcagacagaatcttttccaggaggctgaggaattcctctacagattcttgccacagaaaatcatatacctgaatcagctcttgcaagaggactccctcaatgtggctgacttgacttccctccgggccccactggacatccccatcccagaccctccacccaaggatgatgagatggaaacagataagcaggagaagaaagaagtccctaagtgtggatttctccctgggaatgagaaagtcctgtccctgcttgccctggttaagccagaagtctggactctcaaagagaaatgcattctggtgattacatggatccaacacctgatccccaagattgaagatggaaatgattttggggtagcaatccaggagaaggtgctggagagggtgaatgccgtcaagaccaaagtggaagctttccagacaaccatttccaagtacttctcagaacgtggggatgctgtggccaaggcctccaaggagactcatgtaatggattaccgggccttggtgcatgagcgagatgaggcagcctatggggagctcagggccatggtgctggacctgagggccttctatgctgagctttatcatatcatcagcagcaacctggagaaaattgtcaacccaaagggtgaagaaaagccatctatgtactgaacccgggactagaaggaaaataaatgatctatatgttgtgtggacacaaccagaacacaaaaacgggggggcggcaaaaatacccgaaggggccgttacgcgccccttcttggacagggcctag

SEQ ID NO: 326485 - DNA, 1304 bp, Homo sapiens
  misc_feature (931)..(931): n is a, c, g, or t
  misc_feature (1081)..(1081): n is a, c, g, or t
  misc_feature (1176)..(1176): n is a, c, g, or t
  misc_feature (1237)..(1237): n is a, c, g, or t
  misc_feature (1256)..(1256): n is a, c, g, or t
aaaaaaaaaaaaaaaaaaaactggggagtgaaagcgaaagcccgggcgactagccgggagaccagagatctagcgactgaagcagcatggccaagccgtgtggggtgcgcctgagcggggaagcccgcaaacaggtggaggtcttcagacagaatcttttccaggaggctgaggaattcctctacagattcttgccacagaaaatcatatacctgaatcagctcttgcaagaggactccctcaatgtggctgacttgacttccctccgggccccactggacatccccatcccagaccctccacccaaggatgatgagatggaaacagataagcaggagaagaaagaagtccctaagtgtggatttctccctgggaatgagaaagtcctgtccctgcttgccctggttaagccagaagtctggactctcaaagagaaatgcattctggtgattacatggatccaacacctgatccccaagattgaagatggaaatgattttggggtagcaatccaggagaaggtgctggagagggtgaatgccgtcaagaccaaagtggaagctttccagacaaccatttccaagtacttctcagaacgtggggatgctgtggccaaggcctccaaggagactcatgtaatggattaccgggccttggtgcatgagcgagatgaggcagcctatggggagctcagggccatggtgctggacctgagggccttctatgctgagctttatcatatcatcagcagcaacctggagaaaattgtcaacccaaagggtgaagaaaagccatctatgtactgaacccgggactagaaggaaaataaatgatctatatgttgtgtggaacctccacgagggttcagctgtctcttacttttaaccagtgaaattgacctgcccgtgaagaggcgggcatgacacagcangacgagaagaccctatggagctttaatttattaatgcaaacagtacctaacaaacccacaggtcctaaactaccaaacctgcattaaaaatttcggttggggcgacctcggagcagaacccaaccttcgagcagtacatgctaagacttnaccagtcaaagcgaactactatactcaattgatccaataacttgaccaacggaacatgttaccctagggataacagcgcaatcctattctagagnccatatcaacaatagggtttacgaccttgatgtggatcaagacatcccgatggtgcagccngtattaaggtccgttcgtncaacgtttaaagccttacggatctgagttcagaccggggaaattcagg

SEQ ID NO: 326486 - DNA, 1250 bp, Homo sapiens
  misc_feature (931)..(931): n is a, c, g, or t
  misc_feature (1027)..(1027): n is a, c, g, or t
  misc_feature (1122)..(1122): n is a, c, g, or t
  misc_feature (1183)..(1183): n is a, c, g, or t
  misc_feature (1202)..(1202): n is a, c, g, or t
aaaaaaaaaaaaaaaaaaaactggggagtgaaagcgaaagcccgggcgactagccgggagaccagagatctagcgactgaagcagcatggccaagccgtgtggggtgcgcctgagcggggaagcccgcaaacaggtggaggtcttcagacagaatcttttccaggaggctgaggaattcctctacagattcttgccacagaaaatcatatacctgaatcagctcttgcaagaggactccctcaatgtggctgacttgacttccctccgggccccactggacatccccatcccagaccctccacccaaggatgatgagatggaaacagataagcaggagaagaaagaagtccctaagtgtggatttctccctgggaatgagaaagtcctgtccctgcttgccctggttaagccagaagtctggactctcaaagagaaatgcattctggtgattacatggatccaacacctgatccccaagattgaagatggaaatgattttggggtagcaatccaggagaaggtgctggagagggtgaatgccgtcaagaccaaagtggaagctttccagacaaccatttccaagtacttctcagaacgtggggatgctgtggccaaggcctccaaggagactcatgtaatggattaccgggccttggtgcatgagcgagatgaggcagcctatggggagctcagggccatggtgctggacctgagggccttctatgctgagctttatcatatcatcagcagcaacctggagaaaattgtcaacccaaagggtgaagaaaagccatctatgtactgaacccgggactagaaggaaaataaatgatctatatgttgtgtggaacctccacgagggttcagctgtctcttacttttaaccagtgaaattgacctgcccgtgaagaggcgggcatgacacagcangacgagaagaccctatggagctttaatttattaatgcaaacagtacctaacaaacccacaggtcctaaactaccaaacctgcattactaagacttnaccagtcaaagcgaactactatactcaattgatccaataacttgaccaacggaacatgttaccctagggataacagcgcaatcctattctagagnccatatcaacaatagggtttacgaccttgatgtggatcaagacatcccgatggtgcagccngtattaaggtccgttcgtncaacgtttaaagccttacggatctgagttcagaccggggaaattcagg

SEQ ID NO: 326487 - DNA, 1529 bp, Homo sapiens
aaaaaaaaaaaaaaaaaaaactggggagtgaaagcgaaagcccgggcgactagccgggagaccagagatctagcgactgaagcagcatggccaagccgtgtggggtgcgcctgagcggggaagcccgcaaacaggtggaggtcttcagacagaatcttttccaggaggtaagtctctggatttgagcgatttgacccagaatcttggaccaatacttgaggataacagcctctcagaatgacccccccaagtcaccctagacttaaccctacttcccttaccaagccttcacccaaagtaaccccggaattattgatagctacctttaatctgacctttcttatgactctcccgacttctggcacttctcccgtcttttgatgtggaggaaaaaaaccatggcttccaaagcaggaatatcacagtcctaaccttcgttctgccatttaccagcttgggcaagtcctttcattttcaggtcttcagtttcctcatttgcaagtcttggacccagtgatttccaaaggcccttccagttccatttgtcagacatctcattgagcatattctgtgattcccctcccttgcaatgtaacccacagctgaggaattcctctacagattcttgccacagaaaatcatatacctgaatcagctcttgcaaagtgagtagtgtgggccccttctgccccatcctatgtcctctatcccctttgcccaccctctctagctaacaactggattcagcatgcagagaatagtttcaaatagtggattaggaacattaggatggcgtgaggcatgagcctaggttgggaggcagagtgcaagtgggatgtatggagggaaggctgtgacctaggatgaagggaagaggttgggcagcccttgacagtgagctctgtgcaggaggactccctcaatgtggctgacttgacttccctccgggccccactggacatccccatcccagaccctccacccaaggatgatgagatggaaacagataagcaggagaagaaagaagtccctaagtgtggatttctccctgggaatgagaaagtcctgtccctgcttgccctggttaagccagaagtctggactctcaaagagaaatgcattctggtgattacatggatccaacacctgatccccaagattgaagatggaaatgattttggggtagcaatccaggagaaggtgctggagagggtgaatgccgtcaagaccaaagtggaagctttccagacaaccatttccaagtacttctcagaacgtggggatgctgtggccaaggcctccaaggagactcatgtaatggattaccgggccttggtgcatgagcgagatgaggcagcctatggggagctcagggccatggtgctggacctgagggccttctatgctgagctttatcatatcatcagcagcaacctggagaaaattgtcaacccaaagggtgaagaaaagccatctatgtactgaacccgggactagaaggaaaataaatgatctatatgttgtgtgga

SEQ ID NO: 326488 - DNA, 796 bp, Homo sapiens
aaaaaaaaaaaaaaaaaaaactggggagtgaaagcgaaagcccgggcgactagccgggagaccagagatctagcgactgaagcagcatggccaagccgtgtggggtgcgcctgagcggggaagcccgcaaacaggtggaggtcttcagacagaatcttttccaggaggctgaggaattcctctacagattcttgccacagttgacttccctccgggccccactggacatccccatcccagaccctccacccaaggatgatgagatggaaacagataagcaggagaagaaagaagtccctaagtgtggatttctccctgggaatgagaaagtcctgtccctgcttgccctggttaagccagaagtctggactctcaaagagaaatgcattctggtgattacatggatccaacacctgatccccaagattgaagatggaaatgattttggggtagcaatccaggagaaggtgctggagagggtgaatgccgtcaagaccaaagtggaagctttccagacaaccatttccaagtacttctcagaacgtggggatgctgtggccaaggcctccaaggagactcatgtaatggattaccgggccttggtgcatgagcgagatgaggcagcctatggggagctcagggccatggtgctggacctgagggccttctatgctgagctttatcatatcatcagcagcaacctggagaaaattgtcaacccaaagggtgaagaaaagccatctatgtactgaacccgggactagaaggaaaataaatgatctatatgttgtgtgga

SEQ ID NO: 326489 - DNA, 1371 bp, Homo sapiens
aaaaaaaaaaaaaaaaaaaactggggagtgaaagcgaaagcccgggcgactagccgggagaccagagatctagcgactgaagcagcatggccaagccgtgtggggtgcgcctgagcggggaagcccgcaaacaggtggaggtcttcagacagaatcttttccaggaggtaagtctctggatttgagcgatttgacccagaatcttggaccaatacttgaggataacagcctctcagaatgacccccccaagtcaccctagacttaaccctacttcccttaccaagccttcacccaaagtaaccccggaattattgatagctacctttaatctgacctttcttatgactctcccgacttctggcacttctcccgtcttttgatgtggaggaaaaaaaccatggcttccaaagcaggaatatcacagtcctaaccttcgttctgccatttaccagcttgggcaagtcctttcattttcaggtcttcagtttcctcatttgcaagtcttggacccagtgatttccaaaggcccttccagttccatttgtcagacatctcattgagcatattctgtgattcccctcccttgcaatgtaacccacagctgaggaattcctctacagattcttgccacagaaaatcatatacctgaatcagctcttgcaagaggactccctcaatgtggctgacttgacttccctccgggccccactggacatccccatcccagaccctccacccaaggatgatgagatggaaacagataagcaggagaagaaagaaggtaagagagataagaggtgactagggaaggggtgatggcacactgactactggatgagaaagggcctgaatcccctctttctcacagtccctaagtgtggatttctccctgggaatgagaaagtcctgtccctgcttgccctggttaagccagaagtctggactctcaaagagaaatgcattctggtgattacatggatccaacacctgatccccaagattgaagatggaaatgattttggggtagcaatccaggagaaggtgctggagagggtgaatgccgtcaagaccaaagtggaagctttccagacaaccatttccaagtacttctcagaacgtggggatgctgtggccaaggcctccaaggagactcatgtaatggattaccgggccttggtgcatgagcgagatgaggcagcctatggggagctcagggccatggtgctggacctgagggccttctatgctgagctttatcatatcatcagcagcaacctggagaaaattgtcaacccaaagggtgaagaaaagccatctatgtactgaacccgggactagaaggaaaataaatgatctatatgttgtgtgga

SEQ ID NO: 326490 - DNA, 1287 bp, Homo sapiens
aaaaaaaaaaaaaaaaaaaactggggagtgaaagcgaaagcccgggcgactagccgggagaccagagatctagcgactgaagcagcatggccaagccgtgtggggtgcgcctgagcggggaagcccgcaaacaggtggaggtcttcagacagaatcttttccaggaggctgaggaattcctctacagattcttgccacagaaaatcatatacctgaatcagctcttgcaaagtgagtagtgtgggccccttctgccccatcctatgtcctctatcccctttgcccaccctctctagctaacaactggattcagcatgcagagaatagtttcaaatagtggattaggaacattaggatggcgtgaggcatgagcctaggttgggaggcagagtgcaagtgggatgtatggagggaaggctgtgacctaggatgaagggaagaggttgggcagcccttgacagtgagctctgtgcaggaggactccctcaatgtggctgacttgacttccctccgggccccactggacatccccatcccagaccctccacccaaggatgatgaggtgaggcactcagggtgcaggacttggactataaacccaatggagaagatagcccttcaacctctgtgacttttctaaagctactttcccccctttttgccttagatggaaacagataagcaggagaagaaagaaggtaagagagataagaggtgactagggaaggggtgatggcacactgactactggatgagaaagggcctgaatcccctctttctcacagtccctaagtgtggatttctccctgggaatgagaaagtcctgtccctgcttgccctggttaagccagaagtctggactctcaaagagaaatgcattctggtgattacatggatccaacacctgatccccaagattgaagatggaaatgattttggggtagcaatccaggagaaggtgctggagagggtgaatgccgtcaagaccaaagtggaagctttccagacaaccatttccaagtacttctcagaacgtggggatgctgtggccaaggcctccaaggagactcatgtaatggattaccgggccttggtgcatgagcgagatgaggcagcctatggggagctcagggccatggtgctggacctgagggccttctatgctgagctttatcatatcatcagcagcaacctggagaaaattgtcaacccaaagggtgaagaaaagccatctatgtactgaacccgggactagaaggaaaataaatgatctatatgttgtgtgga

SEQ ID NO: 326491 - DNA, 1153 bp, Homo sapiens
aaaaaaaaaaaaaaaaaaaactggggagtgaaagcgaaagcccgggcgactagccgggagaccagagatctagcgactgaagcagcatggccaagccgtgtggggtgcgcctgagcggggaagcccgcaaacaggtggaggtcttcagacagaatcttttccaggaggctgaggaattcctctacagattcttgccacagaaaatcatatacctgaatcagctcttgcaagaggactccctcaatgtggctgacttgacttccctccgggccccactggacatccccatcccagaccctccacccaaggatgatgagatggaaacagataagcaggagaagaaagaagtccctaagtgtggatttctccctgggaatgagaaagtcctgtccctgcttgccctggttaagccagaagtctggactctcaaagagaaatgcattctggtgattacatggatccaacacctgatccccaagattgaagatggaaatgattttggggtagcaatccaggagaaggtgctggagagggtgaatgccgtcaagaccaaagtggaagctttccagacaaccatttccaagtacttctcagaacgtggggatgctgtggccaaggcctccaaggagactcatgtagtgagtggatagtccaccagccttttagctgggtgtgggacgaggaggtgtggaggaagaagtcctccttgtcttgtttgtgactttcccaatgtggagaatattaagctaaaagcattacctagaaaaactggtttgggcttcaacaaccttgacccttttctctgctcagtcctttgggatcctatttcttggtgctaagaaggggttcattctcaagttaacctatttcctataaaaggaaaccagactcatgtcccagcctcccatgggactgactcagctttgcctcccacattgcagatggattaccgggccttggtgcatgagcgagatgaggcagcctatggggagctcagggccatggtgctggacctgagggccttctatgctgagctttatcatatcatcagcagcaacctggagaaaattgtcaacccaaagggtgaagaaaagccatctatgtactgaacccgggactagaaggaaaataaatgatctatatgttgtgtgga

SEQ ID NO: 326492 - DNA, 1315 bp, Homo sapiens
aaaaaaaaaaaaaaaaaaaactggggagtgaaagcgaaagcccgggcgactagccgggagaccagagatctagcgactgaagcagcatggccaagccgtgtggggtgcgcctgagcggggaagcccgcaaacaggtggaggtcttcagacagaatcttttccaggaggctgaggaattcctctacagattcttgccacagaaaatcatatacctgaatcagctcttgcaagaggactccctcaatgtggctgacttgacttccctccgggccccactggacatccccatcccagaccctccacccaaggatgatgagatggaaacagataagcaggagaagaaagaagtccctaagtgtggatttctccctgggaatgagaaagtcctgtccctgcttgccctggttaagccagaagtctggactctcaaagagaaatgcattctggtgattacatggatccaacacctgatccccaagattgaagatggaaatgattttggggtagcaatccaggagaaggtgctggagagggtgaatgccgtcaagaccaaagtggaagctttccagacaaccatttccaagtgagggcagctggaggaccagcattgggggcagtaggagcatttctttgggacccccagagctgggcagccctatcaggatgatgggagactttgggaagggtctgagggagtacatctccctgaacactcattcctgtggtattcccttgcttctggcaggtacttctcagaacgtggggatgctgtggccaaggcctccaaggagactcatgtagtgagtggatagtccaccagccttttagctgggtgtgggacgaggaggtgtggaggaagaagtcctccttgtcttgtttgtgactttcccaatgtggagaatattaagctaaaagcattacctagaaaaactggtttgggcttcaacaaccttgacccttttctctgctcagtcctttgggatcctatttcttggtgctaagaaggggttcattctcaagttaacctatttcctataaaaggaaaccagactcatgtcccagcctcccatgggactgactcagctttgcctcccacattgcagatggattaccgggccttggtgcatgagcgagatgaggcagcctatggggagctcagggccatggtgctggacctgagggccttctatgctgagctttatcatatcatcagcagcaacctggagaaaattgtcaacccaaagggtgaagaaaagccatctatgtactgaacccgggactagaaggaaaataaatgatctatatgttgtgtgga

SEQ ID NO: 326493 - DNA, 1488 bp, Homo sapiens
aaaaaaaaaaaaaaaaaaaactggggagtgaaagcgaaagcccgggcgactagccgggagaccagagatctagcgactgaagcagcatggccaagccgtgtggggtgcgcctgagcggggaagcccgcaaacaggtggaggtcttcagacagaatcttttccaggaggtaagtctctggatttgagcgatttgacccagaatcttggaccaatacttgaggataacagcctctcagaatgacccccccaagtcaccctagacttaaccctacttcccttaccaagccttcacccaaagtaaccccggaattattgatagctacctttaatctgacctttcttatgactctcccgacttctggcacttctcccgtcttttgatgtggaggaaaaaaaccatggcttccaaagcaggaatatcacagtcctaaccttcgttctgccatttaccagcttgggcaagtcctttcattttcaggtcttcagtttcctcatttgcaagtcttggacccagtgatttccaaaggcccttccagttccatttgtcagacatctcattgagcatattctgtgattcccctcccttgcaatgtaacccacagctgaggaattcctctacagattcttgccacagaaaatcatatacctgaatcagctcttgcaagaggactccctcaatgtggctgacttgacttccctccgggccccactggacatccccatcccagaccctccacccaaggatgatgagatggaaacagataagcaggagaagaaagaaggtaagagagataagaggtgactagggaaggggtgatggcacactgactactggatgagaaagggcctgaatcccctctttctcacagtccctaagtgtggatttctccctgggaatgagaaagtcctgtccctgcttgccctggttaagccagaagtctggactctcaaagagaaatgcattctggtaagcctgggaaatgggggaagcagaaagagaagacacacaaggtgaggccctggactcctccgtagatacaagtccttcatacagagacctagtcctgaaaaagaaaacttccttctgtgccttgggcttagatcccctttgttctcctcgttctgttagacctctcttatcacaacggtacccccaaaattagagactgtgcagtatccactctgtaacctcagaacctactgctgtattgggttcatagtagaggtggtatgatatagtgagtgaattgttttaaaagattggaccctagagagagactgcttaggttcaaatcgtgattctatcagttacctagctggtagccttaagtaagtcacttagacattctgtgactcagttttttcatctgttaaatggggtacaataaatacatatctctggaaggttgctgtgatggattacatgaaattaaatacatggcacagtacctggtatgtaataagtacccaattaaatataactttttt

SEQ ID NO: 326494 - DNA, 1220 bp, Homo sapiens
aaaaaaaaaaaaaaaaaaaactggggagtgaaagcgaaagcccgggcgactagccgggagaccagagatctagcgactgaagcagcatggccaagccgtgtggggtgcgcctgagcggggaagcccgcaaacaggtggaggtcttcagacagaatcttttccaggaggtaagtctctggatttgagcgatttgacccagaatcttggaccaatacttgaggataacagcctctcagaatgacccccccaagtcaccctagacttaaccctacttcccttaccaagccttcacccaaagtaaccccggaattattgatagctacctttaatctgacctttcttatgactctcccgacttctggcacttctcccgtcttttgatgtggaggaaaaaaaccatggcttccaaagcaggaatatcacagtcctaaccttcgttctgccatttaccagcttgggcaagtcctttcattttcaggtcttcagtttcctcatttgcaagtcttggacccagtgatttccaaaggcccttccagttccatttgtcagacatctcattgagcatattctgtgattcccctcccttgcaatgtaacccacagctgaggaattcctctacagattcttgccacagaaaatcatatacctgaatcagctcttgcaagaggactccctcaatgtggctgacttgacttccctccgggccccactggacatccccatcccagaccctccacccaaggatgatgaggtgaggcactcagggtgcaggatccctaagtgtggatttctccctgggaatgagaaagtcctgtccctgcttgccctggttaagccagaagtctggactctcaaagagaaatgcattctggtgattacatggatccaacacctgatccccaagattgaagatggaaatgattttggggtagcaatccaggagaaggtgctggagagggtgaatgccgtcaagaccaaagtggaagctttccagacaaccatttccaaatggattaccgggccttggtgcatgagcgagatgaggcagcctatggggagctcagggccatggtgctggacctgagggccttctatgctgagctttatcatatcatcagcagcaacctggagaaaattgtcaacccaaagggtgaagaaaagccatctatgtactgaacccgggactagaaggaaaataaatgatctatatgttgtgtgga

SEQ ID NO: 326495 - DNA, 1107 bp, Homo sapiens
tgatacacccttccaccttttcacttaaagggagcatttaaagcttctgaatgccagcatcacaactcttgtgtttgggggccattataagtaaaataaggttacttgaacataagcactgtgataccacagcagtcgagctgataaccgagatggctacacagtgactaacggcaggtggtatagtataccaccgggagaccagagatctagcgactgaagcagcatggccaagccgtgtggggtgcgcctgagcggggaagcccgcaaacaggtggaggtcttcagacagaatcttttccaggaggctgaggaattcctctacagattcttgccacagaaaatcatatacctgaatcagctcttgcaagaggactccctcaatgtggctgacttgacttccctccgggccccactggacatccccatcccagaccctccacccaaggatgatgagatggaaacagataagcaggagaagaaagaagtccctaagtgtggatttctccctgggaatgagaaagtcctgtccctgcttgccctggttaagccagaagtctggactctcaaagagaaatgcattctggtaagcctgggaaatgggggaagcagaaagagaagacacacaaggtgaggccctggactcctccgtagatacaagtccttcatacagagacctagtcctgaaaaagaaaacttccttctgtgccttgggcttagatcccctttgttctcctcgttctgttagacctctcttatcacaacggtacccccaaaattagagactgtgcagtatccactctgtaacctcagaacctactgctgtattgggttcatagtagaggtggtatgatatagtgagtgaattgttttaaaagattggaccctagagagagactgcttaggttcaaatcgtgattctatcagttacctagctggtagccttaagtaagtcacttagacattctgtgactcagttttttcatctgttaaatggggtacaataaatacatatctctggaaggttgctgtgatggattacatgaaattaaatacatggcacagtacctggtatgtaataagtacccaattaaatataactttttt

SEQ ID NO: 326496 - DNA, 1032 bp, Homo sapiens
aaaaaaaaaaaaaaaaaaaactggggagtgaaagcgaaagcccgggcgactagccgggagaccagagatctagcgactgaagcagcatggccaagccgtgtggggtgcgcctgagcggggaagcccgcaaacaggtggaggtcttcagacagaatcttttccaggaggtaagtctctggatttgagcgatttgacccagaatcttggaccaatacttgaggataacagcctctcagaatgacccccccaagtcaccctagacttaaccctacttcccttaccaagccttcacccaaagtaaccccggaattattgatagctacctttaatctgacctttcttatgactctcccgacttctggcacttctcccgtcttttgatgtggaggaaaaaaaccatggcttccaaagcaggaatatcacagtcctaaccttcgttctgccatttaccagcttgggcaagtcctttcattttcaggtcttcagtttcctcatttgcaagtcttggacccagtgatttccaaaggcccttccagttccatttgtcagacatctcattgagcatattctgtgattcccctcccttgcaatgtaacccacagctgaggaattcctctacagattcttgccacagaaaatcatatacctgaatcagctcttgcaagaggactccctcaatgtggctgacttgacttccctccgggccccactggacatccccatcccagaccctccacccaaggatgatgagatggaaacagataagcaggagaagaaagaagtccctaagtgtggatttctccctggggcaaggagaagtgatgtaaatgggggagtaacatgatgagataaatggattagagacatggctcaggctgctgtagagaaggcaccagggagagcagatggctcaatgggtgtgcatggagacctctcactgagctaagggagaggtttttaccccacgacgaacttcgacgtacatttaaatgatgatgggaaggagctaaaagtaggggataggttacagat

SEQ ID NO: 326497 - DNA, 638 bp, Homo sapiens
aaaaaaaaaaaaaaaaaaaactggggagtgaaagcgaaagcccgggcgactagccgggagaccagagatctagcgactgaagcagcatggccaagccgtgtggggtgcgcctgagcggggaagcccgcaaacaggtggaggtcttcagacagaatcttttccaggaggtaagtctctggatttgagcgatttgacccagaatcttggaccaatacttgaggataacagcctctcagaatgacccccccaagtcaccctagacttaaccctacttcccttaccaagccttcacccaaagtaaccccggaattattgatagctacctttaatctgacctttcttatgactctcccgacttctggcacttctcccgtcttttgatgtggaggaaaaaaaccatggcttccaaagcaggaatatcacagtcctaaccttcgttctgccatttaccagcttgggcaagtcctttcattttcaggtcttcagtttcctcatttgcaagtcttggacccagctgagctttatcatatcatcagcagcaacctggagaaaattgtcaacccaaagggtgaagaaaagccatctatgtactgaacccgggactagaaggaaaataaatgatctatatgttgtgtgga

SEQ ID NO: 326498 - DNA, 886 bp, Homo sapiens
aaaaaaaaaaaaaaaaaaaactggggagtgaaagcgaaagcccgggcgactagccgggagaccagagatctagcgactgaagcagcatggccaagccgtgtggggtgcgcctgagcggggaagcccgcaaacaggtggaggtcttcagacagaatcttttccaggagttcaggtcttcagtttcctcatttgcaagtcttggacccagtgatttccaaaggcccttccagttccatttgtcagacatctcattgagcatattctgtgattcccctcccttgcaatgtaacccacagctgaggaattcctctacagattcttgccacagaaaatcatatacctgaatcagctcttgcaactcagggccatggtgctggacctgagggccttctatgtgagtgtggagtaaggctttaggggaggtggatgagtgggggcaggcaggggattggctaagaacctgactcttgcactctggccttctcccagctgagctttatcatatcatcagcagcaacctggagaaaattgtcaacccaaagggtgaagaaaagccatctatgtactgaacccgggactagaaggaaaataaatgatctatatgttgtgtggaattcccttctggcgtgtgtcattcattcaaaaagcatttattgagtggcacctatgtccagcctgaagatgaatgtggtgggaaggggtgggtgtcacaaagacaaagatgacttagatgcccactgtaatcttgactgtgagaaagaggggattcaggccctttctcatccagtagtcaatgtgccatctccccttccctagtcacctcttatctcacttaccttctttcttctcctgcttatctgtttccatctaaggcaaaaagggggga

SEQ ID NO: 326499 - DNA, 565 bp, Homo sapiens
aaaaaaaaaaaaaaaaaaaactggggagtgaaagcgaaagcccgggcgactagccgggagaccagagatctagcgactgaagcagcatggccaagccgtgtggggtgcgcctgagcggggaagcccgcaaacaggctgaggaattcctctacagattcttgccacagaaaatcatatacctgaatcagctcttgcaagaggactccctcaatgtggctgacttgacttccctccgggccccactggacatccccatcccagaccctccacccaaggatgatgagatggaaacagataagcaggagaagaaagaagtccctaagtgtggatttctccctggggcaaggagaagtgatgtaaatgggggagtaacatgatgagataaatggattagagacatggctcaggctgctgtagagaaggcaccagggagagcagatggctcaatgggtgtgcatggagacctctcactgagctaagggagaggtttttaccccacgacgaacttcgacgtacatttaaatgatgatgggaaggagctaaaagtaggggataggttacagat

SEQ ID NO: 326500 - DNA, 850 bp, Homo sapiens
aaaaaaaaaaaaaaaaaaaactggggagtgaaagcgaaagcccgggcgactagccgggagaccagagatctagcgactgaagcagcatggccaagccgtgtggggtgcgcctgagcggggaagcccgcaaacaggtggaggtcttcagacagaatcttttccaggaggctgaggaattcctctacagattcttgccacagaaaatcatatacctgaatcagctcttgcaagaggactccctcaatgtggctgacttgacttccctccgggccccactggacatccccatcccagaccctccacccaaggatgatgagatggaaacagataagcaggagaagaaagaagtccctaagtgtggatttctccctgggaatgagaaagtcctgtccctgcttgccctggttaagccagaagtctggactctcaaagagaaatgcattctggtgattacatggatccaacacctgatccccaagattgaagatggaaatgattttggggtagcaatccaggagaaggtgctggagagggtgaatgccgtcaagaccaaagtggaagctttccagacaaccatttccaagtacttctcagaacgtggggatgctgtggccaaggcctccaaggagactcatgtaatggattaccgggccttggtgcatgagcgagatgaggcagcctatggggagctcagggccatggtgctggacctgagggccttctatgctgagctttatcatatcatcagcagcaacctggagaaaattgtcaacccaaagggtgaagaaaagccatctatgtactgaacccgggactagaaggaaaataaatgatctatatgttgtgtgga

SEQ ID NO: 326501 - DNA, 990 bp, Homo sapiens
tgatacacccttccaccttttcacttaaagggagcatttaaagcttctgaatgccagcatcacaactcttgtgtttgggggccattataagtaaaataaggttacttgaacataagcactgtgataccacagcagtcgagctgataaccgagatggctacacagtgactaacggcaggtggtatagtataccaccgggagaccagagatctagcgactgaagcagcatggccaagccgtgtggggtgcgcctgagcggggaagcccgcaaacaggtggaggtcttcagacagaatcttttccaggaggctgaggaattcctctacagattcttgccacagaaaatcatatacctgaatcagctcttgcaagaggactccctcaatgtggctgacttgacttccctccgggccccactggacatccccatcccagaccctccacccaaggatgatgagatggaaacagataagcaggagaagaaagaagtccctaagtgtggatttctccctgggaatgagaaagtcctgtccctgcttgccctggttaagccagaagtctggactctcaaagagaaatgcattctggtgattacatggatccaacacctgatccccaagattgaagatggaaatgattttggggtagcaatccaggagaaggtgctggagagggtgaatgccgtcaagaccaaagtggaagctttccagacaaccatttccaagtacttctcagaacgtggggatgctgtggccaaggcctccaaggagactcatgtaatggattaccgggccttggtgcatgagcgagatgaggcagcctatggggagctcagggccatggtgctggacctgagggccttctatgctgagctttatcatatcatcagcagcaacctggagaaaattgtcaacccaaagggtgaagaaaagccatctatgtactgaacccgggactagaaggaaaataaatgatctatatgttgtgtgga

SEQ ID NO: 326502 - DNA, 912 bp, Homo sapiens
  misc_feature (872)..(872): n is a, c, g, or t
  misc_feature (882)..(882): n is a, c, g, or t
  misc_feature (889)..(889): n is a, c, g, or t
  misc_feature (892)..(892): n is a, c, g, or t
  misc_feature (897)..(897): n is a, c, g, or t
aaaaaaaaaaaaaaaaaaaactggggagtgaaagcgaaagcccgggcgactagccgggagaccagagatctagcgactgaagcagcatggccaagccgtgtggggtgcgcctgagcggggaagcccgcaaacaggtggaggtcttcagacagaatcttttccaggaggctgaggaattcctctacagattcttgccacagaaaatcatatacctgaatcagctcttgcaagaggactccctcaatgtggctgacttgacttccctccgggccccactggacatccccatcccagaccctccacccaaggatgatgagatggaaacagataagcaggagaagaaagaagtccctaagtgtggatttctccctgggaatgagaaagtcctgtccctgcttgccctggttaagccagaagtctggactctcaaagagaaatgcattctggtgattacatggatccaacacctgatccccaagattgaagatggaaatgattttggggtagcaatccaggagaaggtgctggagagggtgaatgccgtcaagaccaaagtggaagctttccagacaaccatttccaagtacttctcagaacgtggggatgctgtggccaaggcctccaaggagactcatgtaatggattaccgggccttggtgcatgagcgagatgaggcagcctatggggagctcagggccatggtgctggacctgagggccttctatgctgagctttatcatatcatcagcagcaacctggagaaaattgtcaacccaaagggtgaagaaaagccatctatgtactgaacccgggactagaaggaaaataaatgatctatatgttgtgtggacacacacacaacacccaaaaanacccgggccncttttgnggnggggnaaacacggtttaaag

SEQ ID NO: 326503 - DNA, 1284 bp, Homo sapiens
aaaaaaaaaaaaaaaaaaaactggggagtgaaagcgaaagcccgggcgactagccgggagaccagagatctagcgactgaagcagcatggccaagccgtgtggggtgcgcctgagcggggaagcccgcaaacaggtggaggtcttcagacagaatcttttccaggaggtaagtctctggatttgagcgatttgacccagaatcttggaccaatacttgaggataacagcctctcagaatgacccccccaagtcaccctagacttaaccctacttcccttaccaagccttcacccaaagtaaccccggaattattgatagctacctttaatctgacctttcttatgactctcccgacttctggcacttctcccgtcttttgatgtggaggaaaaaaaccatggcttccaaagcaggaatatcacagtcctaaccttcgttctgccatttaccagcttgggcaagtcctttcattttcaggtcttcagtttcctcatttgcaagtcttggacccagtgatttccaaaggcccttccagttccatttgtcagacatctcattgagcatattctgtgattcccctcccttgcaatgtaacccacagctgaggaattcctctacagattcttgccacagaaaatcatatacctgaatcagctcttgcaagaggactccctcaatgtggctgacttgacttccctccgggccccactggacatccccatcccagaccctccacccaaggatgatgagatggaaacagataagcaggagaagaaagaagtccctaagtgtggatttctccctgggaatgagaaagtcctgtccctgcttgccctggttaagccagaagtctggactctcaaagagaaatgcattctggtgattacatggatccaacacctgatccccaagattgaagatggaaatgattttggggtagcaatccaggagaaggtgctggagagggtgaatgccgtcaagaccaaagtggaagctttccagacaaccatttccaagtacttctcagaacgtggggatgctgtggccaaggcctccaaggagactcatgtaatggattaccgggccttggtgcatgagcgagatgaggcagcctatggggagctcagggccatggtgctggacctgagggccttctatgctgagctttatcatatcatcagcagcaacctggagaaaattgtcaacccaaagggtgaagaaaagccatctatgtactgaacccgggactagaaggaaaataaatgatctatatgttgtgtgga

SEQ ID NO: 326504 - DNA, 1278 bp, Homo sapiens
  misc_feature (959)..(959): n is a, c, g, or t
  misc_feature (1055)..(1055): n is a, c, g, or t
  misc_feature (1150)..(1150): n is a, c, g, or t
  misc_feature (1211)..(1211): n is a, c, g, or t
  misc_feature (1230)..(1230): n is a, c, g, or t
aaaaaaaaaaaaaaaaaaaactggggagtgaaagcgaaagcccgggcgactagccgggagaccagagatctagcgactgaagcagcatggccaagccgtgtggggtgcgcctgagcggggaagcccgcaaacaggtggaggtcttcagacagaatcttttccaggaggctgaggaattcctctacagattcttgccacagaaaatcatatacctgaatcagctcttgcaagaggactccctcaatgtggctgacttgacttccctccgggccccactggacatccccatcccagaccctccacccaaggatgatgagatggaaacagataagcaggagaagaaagaagtccctaagtgtggatttctccctgggaatgagaaagtcctgtccctgcttgccctggttaagccagaagtctggactctcaaagagaaatgcattctggtgattacatggatccaacacctgatccccaagattgaagatggaaatgattttggggtagcaatccaggagaaggtgctggagagggtgaatgccgtcaagaccaaagtggaagctttccagacaaccatttccaagtacttctcagaacgtggggatgctgtggccaaggcctccaaggagactcatgtaatggattaccgggccttggtgcatgagcgagatgaggcagcctatggggagctcagggccatggtgctggacctgagggccttctatgctgagctttatcatatcatcagcagcaacctggagaaaattgtcaacccaaagggtgaagaaaagccatctatgtactgaacccgggactagaaggaaaataaatgatctatatgttgtgtggaaaaaaaaaaaaaaaaaaaaaataaaaaaacctccacgagggttcagctgtctcttacttttaaccagtgaaattgacctgcccgtgaagaggcgggcatgacacagcangacgagaagaccctatggagctttaatttattaatgcaaacagtacctaacaaacccacaggtcctaaactaccaaacctgcattactaagacttnaccagtcaaagcgaactactatactcaattgatccaataacttgaccaacggaacatgttaccctagggataacagcgcaatcctattctagagnccatatcaacaatagggtttacgaccttgatgtggatcaagacatcccgatggtgcagccngtattaaggtccgttcgtncaacgtttaaagccttacggatctgagttcagaccggggaaattcagg

SEQ ID NO: 326505 - DNA, 1059 bp, Homo sapiens
  misc_feature (854)..(855): n is a, c, g, or t
aaaaaaaaaaaaaaaaaaaactggggagtgaaagcgaaagcccgggcgactagccgggagaccagagatctagcgactgaagcagcatggccaagccgtgtggggtgcgcctgagcggggaagcccgcaaacaggtggaggtcttcagacagaatcttttccaggaggctgaggaattcctctacagattcttgccacagaaaatcatatacctgaatcagctcttgcaagaggactccctcaatgtggctgacttgacttccctccgggccccactggacatccccatcccagaccctccacccaaggatgatgagatggaaacagataagcaggagaagaaagaagtccctaagtgtggatttctccctgggaatgagaaagtcctgtccctgcttgccctggttaagccagaagtctggactctcaaagagaaatgcattctggtgattacatggatccaacacctgatccccaagattgaagatggaaatgattttggggtagcaatccaggagaaggtgctggagagggtgaatgccgtcaagaccaaagtggaagctttccagacaaccatttccaagtacttctcagaacgtggggatgctgtggccaaggcctccaaggagactcatgtaatggattaccgggccttggtgcatgagcgagatgaggcagcctatggggagctcagggccatggtgctggacctgagggccttctatgctgagctttatcatatcatcagcagcaacctggagaaaattgtcaacccaaagggtgaagaaaagccatctatgtactgaacccgggactagaaggaaaataaatgatctatatgttgtgtggaaaannacaaccacacaaacaaaaaacaaacaacacacaacataccacaacacaaccacacagatacacacaacaaaacacccgcgcggcaccaatatacgcggggggacaaaaaagaataaagcagcccacagacactctgctaccccccctgtgtaacaaggggagaaccggggcccaaaggaggaaaaaaaccacagcgtccaaaca

SEQ ID NO: 326506 - DNA, 1616 bp, Homo sapiens
aaaaaaaaaaaaaaaaaaaactggggagtgaaagcgaaagcccgggcgactagccgggagaccagagatctagcgactgaagcagcatggccaagccgtgtggggtgcgcctgagcggggaagcccgcaaacaggtggaggtcttcagacagaatcttttccaggaggtaagtctctggatttgagcgatttgacccagaatcttggaccaatacttgaggataacagcctctcagaatgacccccccaagtcaccctagacttaaccctacttcccttaccaagccttcacccaaagtaaccccggaattattgatagctacctttaatctgacctttcttatgactctcccgacttctggcacttctcccgtcttttgatgtggaggaaaaaaaccatggcttccaaagcaggaatatcacagtcctaaccttcgttctgccatttaccagcttgggcaagtcctttcattttcaggtcttcagtttcctcatttgcaagtcttggacccagtgatttccaaaggcccttccagttccatttgtcagacatctcattgagcatattctgtgattcccctcccttgcaatgtaacccacagctgaggaattcctctacagattcttgccacagaaaatcatatacctgaatcagctcttgcaaagtgagtagtgtgggccccttctgccccatcctatgtcctctatcccctttgcccaccctctctagctaacaactggattcagcatgcagagaatagtttcaaatagtggattaggaacattaggatggcgtgaggcatgagcctaggttgggaggcagagtgcaagtgggatgtatggagggaaggctgtgacctaggatgaagggaagaggttgggcagcccttgacagtgagctctgtgcaggaggactccctcaatgtggctgacttgacttccctccgggccccactggacatccccatcccagaccctccacccaaggatgatgagatggaaacagataagcaggagaagaaagaaggtaagagagataagaggtgactagggaaggggtgatggcacactgactactggatgagaaagggcctgaatcccctctttctcacagtccctaagtgtggatttctccctgggaatgagaaagtcctgtccctgcttgccctggttaagccagaagtctggactctcaaagagaaatgcattctggtgattacatggatccaacacctgatccccaagattgaagatggaaatgattttggggtagcaatccaggagaaggtgctggagagggtgaatgccgtcaagaccaaagtggaagctttccagacaaccatttccaagtacttctcagaacgtggggatgctgtggccaaggcctccaaggagactcatgtaatggattaccgggccttggtgcatgagcgagatgaggcagcctatggggagctcagggccatggtgctggacctgagggccttctatgctgagctttatcatatcatcagcagcaacctggagaaaattgtcaacccaaagggtgaagaaaagccatctatgtactgaacccgggactagaaggaaaataaatgatctatatgttgtgtgga

SEQ ID NO: 326507 - DNA, 1217 bp, Homo sapiens
aaaaaaaaaaaaaaaaaaaactggggagtgaaagcgaaagcccgggcgactagccgggagaccagagatctagcgactgaagcagcatggccaagccgtgtggggtgcgcctgagcggggaagcccgcaaacaggtggaggtcttcagacagaatcttttccaggaggctgaggaattcctctacagattcttgccacagaaaatcatatacctgaatcagctcttgcaagaggactccctcaatgtggctgacttgacttccctccgggccccactggacatccccatcccagaccctccacccaaggatgatgagatggaaacagataagcaggagaagaaagaagtccctaagtgtggatttctccctgggaatgagaaagtcctgtccctgcttgccctggttaagccagaagtctggactctcaaagagaaatgcattctggtgattacatggatccaacacctgatccccaagattgaagatggaaatgattttggggtagcaatccaggagaaggtgctggagagggtgaatgccgtcaagaccaaagtggaagctttccagacaaccatttccaagtacttctcagaacgtggggatgctgtggccaaggcctccaaggagactcatgtaatggattaccgggccttggtgcatgagcgagatgaggcagcctatggggagctcagggccatggtgctggacctgagggccttctatgtgagtgtggagtaaggctttaggggaggtggatgagtgggggcaggcaggggattggctaagaacctgactcttgcactctggccttctcccagctgagctttatcatatcatcagcagcaacctggagaaaattgtcaacccaaagggtgaagaaaagccatctatgtactgaacccgggactagaaggaaaataaatgatctatatgttgtgtggaattcccttctggcgtgtgtcattcattcaaaaagcatttattgagtggcacctatgtccagcctgaagatgaatgtggtgggaaggggtgggtgtcacaaagacaaagatgacttagatgcccactgtaatcttgactgtgagaaagaggggattcaggccctttctcatccagtagtcaatgtgccatctccccttccctagtcacctcttatctcacttaccttctttcttctcctgcttatctgtttccatctaaggcaaaaagggggga

SEQ ID NO: 326508 - DNA, 1247 bp, Homo sapiens
aaaaaaaaaaaaaaaaaaaactggggagtgaaagcgaaagcccgggcgactagccgggagaccagagatctagcgactgaagcagcatggccaagccgtgtggggtgcgcctgagcggggaagcccgcaaacaggtggaggtcttcagacagaatcttttccaggaggctgaggaattcctctacagattcttgccacagaaaatcatatacctgaatcagctcttgcaagaggactccctcaatgtggctgacttgacttccctccgggccccactggacatccccatcccagaccctccacccaaggatgatgagatggaaacagataagcaggagaagaaagaagtccctaagtgtggatttctccctgggaatgagaaagtcctgtccctgcttgccctggttaagccagaagtctggactctcaaagagaaatgcattctggtgattacatggatccaacacctgatccccaagattgaagatggaaatgattttggggtagcaatccaggagaaggtgctggagagggtgaatgccgtcaagaccaaagtggaagctttccagacaaccatttccaagtacttctcagaacgtggggatgctgtggccaaggcctccaaggagactcatgtagtgagtggatagtccaccagccttttagctgggtgtgggacgaggaggtgtggaggaagaagtcctccttgtcttgtttgtgactttcccaatgtggagaatattaagctaaaagcattacctagaaaaactggtttgggcttcaacaaccttgacccttttctctgctcagtcctttgggatcctatttcttggtgctaagaaggggttcattctcaagttaacctatttcctataaaaggaaaccagactcatgtcccagcctcccatgggactgactcagctttgcctcccacattgcagatggattaccgggccttggtgcatgagcgagatgaggcagcctatggggagctcagggccatggtgctggacctgagggccttctatgtgagtgtggagtaaggctttaggggaggtggatgagtgggggcaggcaggggattggctaagaacctgactcttgcactctggccttctcccagctgagctttatcatatcatcagcagcaacctggagaaaattgtcaacccaaagggtgaagaaaagccatctatgtactgaacccgggactagaaggaaaataaatgatctatatgttgtgtgga

SEQ ID NO: 326509 - DNA, 2078 bp, Homo sapiens
  misc_feature (2)..(2): n is a, c, g, or t
  misc_feature (7)..(7): n is a, c, g, or t
  misc_feature (9)..(9): n is a, c, g, or t
  misc_feature (41)..(41): n is a, c, g, or t
tnacaantnttaatgaggcaatgttaaatatggacccaatntcagacaaatacatagaaaggagtaagggccaactctcatgcataaggtatcccatcctatagcaaatcagatatataggtacgcttgatgccacaaattttttaaaaaattgtccattttgttgcgtgtgcacctcttgccataaatttgagtcagcaccagcgacagctctgcagtcctcctatgtggtactgatcaggtggttgcagagcttcagctcacagcaacacaatgcagctgagcaggcaagcacagcccacagccagaaacagttccgactctacagaacaagacgacctttaagtttcccagagaaaatgagatgctgatgttgaagacgacaccacggctttgatggaatatcagatattgaaaatgtctctctgcctgttcatccttctgtttctcacacctggtattttatgcatttgtcctctccaatgtatatgcacagagaggcacaggcatgtggactgttcaggcagaaacttgtctacattaccatctggactgcaagagaatattatacatttaaacctgtcttataaccactttactgatctgcataaccagttaacccaatataccaatctgaggaccctggacatttcaaacaacaggcttgaaagcctgcctgctcacttacctcggtctctgtggaacatgtctgctgctaacaacaacattaaacttcttgacaaatctgatactgcttatcagtggaatcttaaatatctggatgtttctaagaacatgctggaaaaggttgtcctcattaaaaatacactaagaagtctcgaggttctcaacctcagtagtaacaaactttggacagttccaaccaacatgccctccaaactacatatcgtggacctgtctaataattctttgacacaaattcttccaggtacattaataaacctgacaaatctcacacatctttacctgcacaacaataagttcacattcattccagaccaatcttttgaccaactctttcagttgcaagagataaccctttacaataacaggtggtcatgtgaccacaaacaaaacattacttacttactgaagtggatgatggaaacaaaagcccatgtgatagggactccatgttctacccaaatatcatctttaaaggaacataacatgtatcccacaccttctggatttacctcaagcttattcactgtaagtgggatgcagacagtggacaccattaactctctgagtgtggtaactcaacccaaagtgaccaaaatacccaaacaatatcgaacaaaggaaacaacgtttggtgccactctaagcaaagacaccacctttactagcactgataaggcgttttgtgccctatccagaagatacatccacagagactatcaattcacatgaagcagcagctgcaactctaactattcatctccaagatggaatggtcacaaacacaagcctcactagctcaacaaaatcatccccaacacccatgaccctaagtatcactagtggcatgccaaataatttctctgaaatgcctcaacaaagcacaacccttaacttatggagggaagagacaaccacaaatgtaaagactccattaccttctgtggcaaatgcttggaaagtaaatgcttcatttctcttattgctcaatgttgtggtcatgctggctgtctgagggtctgcattttctgaaactaatgaaagcactcctccctgatgtacagttgggaaaatatgtccatatctaaccagtgattcgagctatatttaagtattcaagaaagccagtcttaacatttctaactctgatgtaaatgaagtaacttgtcttaaataaaagaaatgcacaatgtcttggtacttgctgctattttactgtcttaattaagtaaactaatgagtttcttttataaaaaaaatgaaatgttttaaggcttcaatttattgcacaaaatataaagcatctaaactttaatatgtattttatgtatgtttacactgtcaaacatctggaaaataaaaggtctatgctc

SEQ ID NO: 326510 - DNA, 2101 bp, Homo sapiens
  misc_feature (2)..(2): n is a, c, g, or t
  misc_feature (7)..(7): n is a, c, g, or t
  misc_feature (9)..(9): n is a, c, g, or t
  misc_feature (41)..(41): n is a, c, g, or t
tnacaantnttaatgaggcaatgttaaatatggacccaatntcagacaaatacatagaaaggagtaagggccaactctcatgcataaggtatcccatcctatagcaaatcagatatataggtacgcttgatgccacaaattttttaaaaaattgtccattttgttgcgtgtgcacctcttgccataaatttgagtcagcaccagcgacagctctgcagtcctcctatgtggtactgatcaggtggttgcagagcttcagctcacagcaacacaatgcagctgagcaggcaagcacagcccacagccagaaacagttccgactctacagaacaagacgacctttaagtttcccagagaaaatgagatgctgatgttgaagacgacaccacggctttgatggaatatcagatattgaaaatgtctctctgcctgttcatccttctgtttctcacacctggtattttatgcatttgtcctctccaatgtatatgcacagagaggcacaggcatgtggactgttcaggcagaaacttgtctacattaccatctggactgcaagagaatattatacatttaaacctgtcttataaccactttactgatctgcataaccagttaacccaatataccaatctgaggaccctggacatttcaaacaacaggcttgaaagcctgcctgctcacttacctcggtctctgtggaacatgtctgctgctaacaacaacattaaacttcttgacaaatctgatactgcttatcagtggaatcttaaatatctggatgtttctaagaacatgctggaaaaggttgtcctcattaaagttccaaccaacatgccctccaaactacatatcgtggacctgtctaataattctttgacacaaattcttccaggtacattaataaacctgacaaatctcacacatctttacctgcacaacaataagttcacattcattccagaccaatcttttgaccaactctttcagttgcaagagataaccctttacaataacaggtggtcatgtgaccacaaacaaaacattacttacttactgaagtggatgatggaaacaaaagcccatgtgatagggactccatgttctacccaaatatcatctttaaaggaacataacatgtatcccacaccttctggatttacctcaagcttattcactgtaagtgggatgcagacagtggacaccattaactctctgagtgtggtaactcaacccaaagtgaccaaaatacccaaacaatatcgaacaaaggaaacaacgtttggtgccactctaagcaaagacaccacctttactagcactgataaggcgttttgtgccctatccagaagatacatccacagagactatcaattcacatgaagcagcagctgcaactctaactattcatctccaagatggaatggtcacaaacacaagcctcactagctcaacaaaatcatccccaacacccatgaccctaagtatcactagtggcatgccaaataatttctctgaaatgcctcaacaaagcacaacccttaacttatggagggaagagacaaccacaaatgtaaagactccattaccttctgtggcaaatgcttggaaagtaaatgcttcatttctcttattgctcaatgttgtggtcatgctggctgtctgagggtctgcattttctgaaactaatgaaagcactcctccctgatgtacagttgggaaaatatgtccatatctaaccagtgattcgagctatatttaagtattcaagaaagccagtcttaacatttctaactctgatgtaaatgaagtaacttgtcttaaataaaagaaatgcacaatgtcttggtacttgctgctattttactgtcttaattaagtaaactaatgagtttcttttataaaaaaaatgaaatgttttaaggcttcaatttattgcacaaaatataaagcatctaaactttaatatgtattttatgtatgtttacactgtcaaacatctggaaaataaaaggtctatgctcataactgtgtcatttggctttccagtcataccaactttagcagaatcaaaatgacctcaccatttttgttctagggt

SEQ ID NO: 326511 - DNA, 938 bp, Homo sapiens
ttcttactctgatgttaatgaagtaacttgtcttttattatagaaatgcaccatgtcttggtacgtgctgctatttttctgtctttattaagtaaactaatgagtttcttctatttaaaacatgtaatgttttaaggcttccatctattgcaccaaatccccctacgggttttgtgccctatccagaagatacatccacagagactatcaattcacatgaagcagcagctgcaactctaactattcatctccaagatggaatggtcacaaacacaagcctcactagctcaacaaaatcatccccaacacccatgaccctaagtatcactagtggcatgccaaataatttctctgaaatgcctcaacaaagcacaacccttaacttatggagggaagagacaaccacaaatgtaaagactccattaccttctgtggcaaatgcttggaaagtaaatgcttcatttctcttattgctcaatgttgtggtcatgctggctgtctgagggtctgcattttctgaaactaatgaaagcactcctccctgatgtacagttgggaaaatatgtccatatctaaccagtgattcgagctatatttaagtattcaagaaagccagtcttaacatttctaactctgatgtaaatgaagtaacttgtcttaaataaaagaaatgcacaatgtcttggtacttgctgctattttactgtcttaattaagtaaactaatgagtttcttttataaaaaaaatgaaatgttttaaggcttcaatttattgcacaaaatataaagcatctaaactttaatatgtattttatgtatgtttacactgtcaaacatctggaaaataaaaggtctatgctcataactgtgtcatttggctttccagtcataccaactttagcagaatcaaaatgacctcaccatttttgttctagggt

SEQ ID NO: 326512 - DNA, 808 bp, Homo sapiens
cgcaggtgcatgctgaggtgatctagaggatcccacgggttttgtgccctatccagaagatacatccacagagactatcaattcacatgaagcagcagctgcaactctaactattcatctccaagatggaatggtcacaaacacaagcctcactagctcaacaaaatcatccccaacacccatgaccctaagtatcactagtggcatgccaaataatttctctgaaatgcctcaacaaagcacaacccttaacttatggagggaagagacaaccacaaatgtaaagactccattaccttctgtggcaaatgcttggaaagtaaatgcttcatttctcttattgctcaatgttgtggtcatgctggctgtctgagggtctgcattttctgaaactaatgaaagcactcctccctgatgtacagttgggaaaatatgtccatatctaaccagtgattcgagctatatttaagtattcaagaaagccagtcttaacatttctaactctgatgtaaatgaagtaacttgtcttaaataaaagaaatgcacaatgtcttggtacttgctgctattttactgtcttaattaagtaaactaatgagtttcttttataaaaaaaatgaaatgttttaaggcttcaatttattgcacaaaatataaagcatctaaactttaatatgtattttatgtatgtttacactgtcaaacatctggaaaataaaaggtctatgctcataactgtgtcatttggctttccagtcataccaactttagcagaatcaaaatgacctcaccatttttgttctagggt

SEQ ID NO: 326513 - DNA, 2028 bp, Homo sapiens
  misc_feature (2)..(2): n is a, c, g, or t
  misc_feature (7)..(7): n is a, c, g, or t
  misc_feature (9)..(9): n is a, c, g, or t
  misc_feature (41)..(41): n is a, c, g, or t
tnacaantnttaatgaggcaatgttaaatatggacccaatntcagacaaatacatagaaaggagtaagggccaactctcatgcataaggtatcccatcctatagcaaatcagatatataggtacgcttgatgccacaaattttttaaaaaattgtccattttgttgcgtgtgcacctcttgccataaatttgagtcagcaccagcgacagctctgcagtcctcctatgtggtactgatcaggtggttgcagagcttcagctcacagcaacacaatgcagctgagcaggcaagcacagcccacagccagaaacagttccgactctacagaacaagacgacctttaagtttcccagagaaaatgagatgctgatgttgaagacgacaccacggctttgatggaatatcagatattgaaaatgtctctctgcctgttcatccttctgtttctcacacctggtattttatgcatttgtcctctccaatgtatatgcacagagaggcacaggcatgtggactgttcaggcagaaacttgtctacattaccatctggactgcaagagaatattatacatttaaacctgtcttataaccactttactgatctgcataaccagttaacccaatataccaatctgaggaccctggacatttcaaacaacaggcttgaaagcctgcctgctcacttacctcggtctctgtggaacatgtctgctgctaacaacaacattaaacttcttgacaaatctgatactgcttatcagtggaatcttaaatatctggatgtttctaagaacatgctggaaaaggttgtcctcattaaaaatacactaagaagtctcgaggttctcaacctcagtagtaacaaactttggacagttccaaccaacatgccctccaaactacatatcgtggacctgtctaataattctttgacacaaattcttccaggtacattaataaacctgacaaatctcacacatctttacctgcacaacaataagttcacattcattccagaccaatcttttgaccaactctttcagttgcaagagataaccctttacaataacaggtggtcatgtgaccacaaacaaaacattacttacttactgaagtggatgatggaaacaaaagcccatgtgatagggactccatgttctacccaaatatcatctttaaaggaacataacatgtatcccacaccttctggatttacctcaagcttattcactgtaagtgggatgcagacagtggacaccattaactctctgagtgtggtaactcaacccaaagtgaccaaaatacccaaacaatatcgaacaaaggaaacaacgtttggtgccactctaagcaaagacaccacctttactagcactgataaggcgttttgtgccctatccagaagatacatccacagagactatcaattcacatgaagcagcagctgcaactctaactattcatctccaagatggaatggtcacaaacacaagcctcactagctcaacaaaatcatccccaacacccatgaccctaagtatcactagtggcatgccaaataatttctctgaaatgcctcaacaaagcacaacccttaacttatggagggaagagacaaccacaaatgtaaagactccattaccttctgtggcaaatgcttggaaagtaaatgcttcatttctcttattgctcaatgttgtggtcatgctggctgtctgagggtctgcattttctgaaactaatgaaagcactcctccctgatgtacagttgggaaaatatgtccatatctaaccagtgattcgagctatatttaagtattcaagaaagccagtcttaacatttctaactctgatgtaaatgaagtaacttgtcttaaataaaagaaatgcacaatgtcttggtacttgctgctattttactgtcttaattaagtaaactaatgagtttcttttataaaaaaaatgaaatgttttaaggcttcaatttattgcacaggaatccccgtgggaccctctagactcactca

SEQ ID NO: 326514 - DNA, 803 bp, Homo sapiens
acgtgtgctctagaggtgtccccagggggatccgttttgtgccctatccagaagatacatccacagagactatcaattcacatgaagcagcagctgcaactctaactattcatctccaagatggaatggtcacaaacacaagcctcactagctcaacaaaatcatccccaacacccatgaccctaagtatcactagtggcatgccaaataatttctctgaaatgcctcaacaaagcacaacccttaacttatggagggaagagacaaccacaaatgtaaagactccattaccttctgtggcaaatgcttggaaagtaaatgcttcatttctcttattgctcaatgttgtggtcatgctggctgtctgagggtctgcattttctgaaactaatgaaagcactcctccctgatgtacagttgggaaaatatgtccatatctaaccagtgattcgagctatatttaagtattcaagaaagccagtcttaacatttctaactctgatgtaaatgaagtaacttgtcttaaataaaagaaatgcacaatgtcttggtacttgctgctattttactgtcttaattaagtaaactaatgagtttcttttataaaaaaaatgaaatgttttaaggcttcaatttattgcacaaaatataaagcatctaaactttaatatgtattttatgtatgtttacactgtcaaacatctggaaaataaaaggtctatgctcataactgtgtcatttggctttccagtcataccaactttagcagaatcaaaatgacctcaccatttttgttctagggt

SEQ ID NO: 326515 - DNA, 2967 bp, Homo sapiens
  misc_feature (2)..(2): n is a, c, g, or t
  misc_feature (7)..(7): n is a, c, g, or t
  misc_feature (9)..(9): n is a, c, g, or t
  misc_feature (41)..(41): n is a, c, g, or t
tnacaantnttaatgaggcaatgttaaatatggacccaatntcagacaaatacatagaaaggagtaagggccaactctcatgcataaggtatcccatcctatagcaaatcagatatataggtacgcttgatgccacaaattttttaaaaaattgtccattttgttgcgtgtgcacctcttgccataaatttgagtcagcaccagcgacagctctgcagtcctcctatgtggtactgatcaggtggttgcagagcttcagctcacagcaacacaatgcagctgagcaggcaagcacagcccacagccagaaacagttccgactctacagaacaagacgacctttaagtttcccagagaaaatgagatgctgatgttgaagacgacaccacggtaagatgttatttaaatcagtaaaaggctgactttggaatctttttcctttttcttttaagaaaaagtcaacgttaggattaaatatatattcaatagcaagtgcatgcaccagaaatttgctgcagtgtcagttgagggatattttttatacattcagtcactctgtaaatatacatattgttttcctttaaaatgggcactgaaatatacagaaaaaaatcactttataaaatgtgaggtttataggtactgtgttggtctggatttttcaagtgctttttacaaagatatatttatcctaaaaacatacagataaaatttcgaagactgctttaatatctaaataaaatctaccctatatacacacattgaattacattactgcagagattaaaaaaaaaagacacgacagccatttttctcatctgagtaagaaagcatatcatcaaaaatagtaatagcctacaactgcaactatttatttgcaaagaatgctattttatcatattaaggctctagaaagataaataagaaagaatatggttagaaaaggggggagggagagagaaaataaaggagaaaatgcaggagagagtagggagagagtctctctctaccacatagcccaatgaaggattaagcattgactataaatgaagggagctttgttagtttaatcactggaacaattataaaaggactcgacaacaacgaggtttattgaaaattttgcctaatgctaactgacccatgcagatgcctaaactgtatttgcatattaaaagaagggtgtatctgtttgtttctaggctttgatggaatatcagatattgaaaatgtctctctgcctgttcatccttctgtttctcacacctggtattttatgcatttgtcctctccaatgtatatgcacagagaggcacaggcatgtggactgttcaggcagaaacttgtctacattaccatctggactgcaagagaatattatacatttaaacctgtcttataaccactttactgatctgcataaccagttaacccaatataccaatctgaggaccctggacatttcaaacaacaggcttgaaagcctgcctgctcacttacctcggtctctgtggaacatgtctgctgctaacaacaacattaaacttcttgacaaatctgatactgcttatcagtggaatcttaaatatctggatgtttctaagaacatgctggaaaaggttgtcctcattaaaaatacactaagaagtctcgaggttctcaacctcagtagtaacaaactttggacagttccaaccaacatgccctccaaactacatatcgtggacctgtctaataattctttgacacaaattcttccaggtacattaataaacctgacaaatctcacacatctttacctgcacaacaataagttcacattcattccagaccaatcttttgaccaactctttcagttgcaagagataaccctttacaataacaggtggtcatgtgaccacaaacaaaacattacttacttactgaagtggatgatggaaacaaaagcccatgtgatagggactccatgttctacccaaatatcatctttaaaggaacataacatgtatcccacaccttctggatttacctcaagcttattcactgtaagtgggatgcagacagtggacaccattaactctctgagtgtggtaactcaacccaaagtgaccaaaatacccaaacaatatcgaacaaaggaaacaacgtttggtgccactctaagcaaagacaccacctttactagcactgataaggcgttttgtgccctatccagaagatacatccacagagactatcaattcacatgaagcagcagctgcaactctaactattcatctccaagatggaatggtcacaaacacaagcctcactagctcaacaaaatcatccccaacacccatgaccctaagtatcactagtggcatgccaaataatttctctgaaatgcctcaacaaagcacaacccttaacttatggagggaagagacaaccacaaatgtaaagactccattaccttctgtggcaaatgcttggaaagtaaatgcttcatttctcttattgctcaatgttgtggtcatgctggctgtctgagggtctgcattttctgaaactaatgaaagcactcctccctgatgtacagttgggaaaatatgtccatatctaaccagtgattcgagctatatttaagtattcaagaaagccagtcttaacatttctaactctgatgtaaatgaagtaacttgtcttaaataaaagaaatgcacaatgtcttggtacttgctgctattttactgtcttaattaagtaaactaatgagtttcttttataaaaaaaatgaaatgttttaaggcttcaatttattgcacaaaatataaagcatctaaactttaatatgtattttatgtatgtttacactgtcaaacatctggaaaataaaaggtctatgctcataactgtgtcatttggctttccagtcataccaactttagcagaatcaaaatgacctcaccatttttgttctagggt

SEQ ID NO: 326516 - DNA, 2559 bp, Homo sapiens
tggccttatatgggcagccgcgtcacggacggcactcattcacataaaacgctgcgcggccggcggaatccccggcttctagggcggcgagcggccgcgctggctatcgagcgagcggggcgggaacgcggagttgcgccgccgctcgggcgccgggctccgtcgcggccgcagccccgcgggtcgccctcccgtgcctcgcccgcggacaccctggccgtggacaccctggccgtgggcacccgcggggcgcgcggcgcggggccgctggccggcggcggcggcggcatgaaggtcacgtcgctcgacgggcgccagctgcgcaagatgctccgcaaggaggcggcggcgcgctgcgtggtgctcgactgccggccctatctggccttcgctgcctcgaacgtgcgcggctcgctcaacgtcaacctcaactcggtggtgctgcggcgggcccggggcggcgcggtgtcggcgcgctacgtgctgcccgacgaggcggcgcgcgcgcggctcctgcaggagggcggcggcggcgtcgcggccgtggtggtgctggaccagggcagccgccactggcagaagctgcgagaggagagcgccgcgcgtgtcgtcctcacctcgctactcgcttgcctacccgccggcccgcgggtctacttcctcaaagggggatatgagactttctactcggaatatcctgagtgttgcgtggatgtaaaacccatttcacaagagaagattgagagtgagagagccctcatcagccagtgtggaaaaccagtggtaaatgtcagctacaggccagcttatgaccagggtggcccagttgaaatccttcccttcctctaccttggaagtgcctaccatgcatccaagtgcgagttcctcgccaacctgcacatcacagccctgctgaatgtctcccgacggacctccgaggcctgcatgacccacctacactacaaatggatccctgtggaagacagccacacggctgacattagctcccactttcaagaagcaatagacttcattgactgtgtcagggaaaagggaggcaaggtcctggtccactgtgaggctgggatctcccgttcacccaccatctgcatggcttaccttatgaagaccaagcagttccgcctgaaggaggccttcgattacatcaagcagaggaggagcatggtctcgcccaactttggcttcatgggccagctcctgcagtacgaatctgagaatcctgccctccacgcccaacccccagcctccctcctgccaaggggaggcagcaggctcttcactgataggccatttgcagacactgagccctgacatgcagggtgcctactgcacattccctgcctcggtgctggcaccggtgcctacccactcaacagtctcagagctcagcagaagccctgtggcaacggccacatcctgctaaaactgggatggaggaatcggcccagccccaagagcaactgtgatttttgtttttaagactcatggacatttcatacctgtgcaatactgaagacctcattctgtcatgctgccccagtgagatagtgagtggtcaccaggcttgcaaatgaacttcagacggacctcagggtaggttctcgggactgaaggaaggccaagccattacgggagcacagcatgtgctgactactgtacttccagacccctgccctcttgggactgcccagtccttgcacctcagagttcgccttttcatttcaagcataaggcaataaatacctgcagcaacgtgggagaaagaagttgctggaccaggagaaaaggcagttatgaagccaattcattttgaaggaagcacaatttccaccttattttttgaactttggcagtttcaatgtctgtctctgttgcttcggggcataagctgatcaccgtctagttgggaaagtcaccctacagggtttgtagggacatgatcagcatcctgatttgaaccctgaaatgttgtgtagacaccctcttgggtccaatgaggtagttggttgaagtagcaagatgttggcttttctggattttttttgccatgggttcttcactgaccttggactttggcatgattcttagtcatacttgaacttgtctcattccacctcttctcagagcaactcttcctttgggaaaagagttcttcagatcatagaccaaaaaagtcataccttcgaggtggtagcagtagattccaggaggagaagggtacttgctaggtatcctgggtcagtggcggtgcaaactggtttcctcagctgcctgtccttctgtgtgcttatgtctcttgtgacaattgttttcctccctgcccctggaggttgtcttcaagctgtggacttctgggatttgcagattttgcaacgtggtactactttttttttctttttgtctgttagttatttctccaggggaaaaggcaataattttctaagacccgtgtgaatgtgaagaaaagcagtatgttactggttgttgttgttgttcttgttttttatagtgtaaaataaaaatagtaaaaggagaaaa

SEQ ID NO: 326517 - DNA, 2479 bp, Homo sapiens
tggccttatatgggcagccgcgtcacggacggcactcattcacataaaacgctgcgcggccggcggaatccccggcttctagggcggcgagcggccgcgctggctatcgagcgagcggggcgggaacgcggagttgcgccgccgctcgggcgccgggctccgtcgcggggcgcgcggcgcggggccgctggccggcggcggcggcggcatgaaggtcacgtcgctcgacgggcgccagctgcgcaagatgctccgcaaggaggcggcggcgcgctgcgtggtgctcgactgccggccctatctggccttcgctgcctcgaacgtgcgcggctcgctcaacgtcaacctcaactcggtggtgctgcggcgggcccggggcggcgcggtgtcggcgcgctacgtgctgcccgacgaggcggcgcgcgcgcggctcctgcaggagggcggcggcggcgtcgcggccgtggtggtgctggaccagggcagccgccactggcagaagctgcgagaggagagcgccgcgcgtgtcgtcctcacctcgctactcgcttgcctacccgccggcccgcgggtctacttcctcaaagggggatatgagactttctactcggaatatcctgagtgttgcgtggatgtaaaacccatttcacaagagaagattgagagtgagagagccctcatcagccagtgtggaaaaccagtggtaaatgtcagctacaggccagcttatgaccagggtggcccagttgaaatccttcccttcctctaccttggaagtgcctaccatgcatccaagtgcgagttcctcgccaacctgcacatcacagccctgctgaatgtctcccgacggacctccgaggcctgcatgacccacctacactacaaatggatccctgtggaagacagccacacggctgacattagctcccactttcaagaagcaatagacttcattgactgtgtcagggaaaagggaggcaaggtcctggtccactgtgaggctgggatctcccgttcacccaccatctgcatggcttaccttatgaagaccaagcagttccgcctgaaggaggccttcgattacatcaagcagaggaggagcatggtctcgcccaactttggcttcatgggccagctcctgcagtacgaatctgagaatcctgccctccacgcccaacccccagcctccctcctgccaaggggaggcagcaggctcttcactgataggccatttgcagacactgagccctgacatgcagggtgcctactgcacattccctgcctcggtgctggcaccggtgcctacccactcaacagtctcagagctcagcagaagccctgtggcaacggccacatcctgctaaaactgggatggaggaatcggcccagccccaagagcaactgtgatttttgtttttaagactcatggacatttcatacctgtgcaatactgaagacctcattctgtcatgctgccccagtgagatagtgagtggtcaccaggcttgcaaatgaacttcagacggacctcagggtaggttctcgggactgaaggaaggccaagccattacgggagcacagcatgtgctgactactgtacttccagacccctgccctcttgggactgcccagtccttgcacctcagagttcgccttttcatttcaagcataaggcaataaatacctgcagcaacgtgggagaaagaagttgctggaccaggagaaaaggcagttatgaagccaattcattttgaaggaagcacaatttccaccttattttttgaactttggcagtttcaatgtctgtctctgttgcttcggggcataagctgatcaccgtctagttgggaaagtcaccctacagggtttgtagggacatgatcagcatcctgatttgaaccctgaaatgttgtgtagacaccctcttgggtccaatgaggtagttggttgaagtagcaagatgttggcttttctggattttttttgccatgggttcttcactgaccttggactttggcatgattcttagtcatacttgaacttgtctcattccacctcttctcagagcaactcttcctttgggaaaagagttcttcagatcatagaccaaaaaagtcataccttcgaggtggtagcagtagattccaggaggagaagggtacttgctaggtatcctgggtcagtggcggtgcaaactggtttcctcagctgcctgtccttctgtgtgcttatgtctcttgtgacaattgttttcctccctgcccctggaggttgtcttcaagctgtggacttctgggatttgcagattttgcaacgtggtactactttttttttctttttgtctgttagttatttctccaggggaaaaggcaataattttctaagacccgtgtgaatgtgaagaaaagcagtatgttactggttgttgttgttgttcttgttttttatagtgtaaaataaaaatagtaaaaggagaaaa

SEQ ID NO: 326518 - DNA, 2617 bp, Homo sapiens
tggccttatatgggcagccgcgtcacggacggcactcattcacataaaacgctgcgcggccggcggaatccccggcttctagggcggcgagcggccgcgctggctatcgagcgagcggggcgggaacgcggagttgcgccgccgctcgggcgccgggctccgtcgcggccgcagccccgcgggtcgccctcccgtgcctcgcccgcggacaccctggccgtggacaccctggccgtgggcacccgcggggcgcgcggcgcggggccgctggccggcggcggcggcggcatgaaggtcacgtcgctcgacgggcgccagctgcgcaagatgctccgcaaggaggcggcggcgcgctgcgtggtgctcgactgccggccctatctggccttcgctgcctcgaacgtgcgcggctcgctcaacgtcaacctcaactcggtggtgctgcggcgggcccggggcggcgcggtgtcggcgcgctacgtgctgcccgacgaggcggcgcgcgcgcggctcctgcaggagggcggcggcggcgtcgcggccgtggtggtgctggaccagggcagccgccactggcagaagctgcgagaggagagcgccgcgcgtgtcgtcctcacctcgctactcgcttgcctacccgccggcccgcgggtctacttcctcaaagggggatatgagactttctactcggaatatcctgagtgttgcgtggatgtaaaacccatttcacaagagaagattgagagtgagagagccctcatcagccagtgtggaaaaccagtggtaaatgtcagctacaggccagcttatgaccagataactgaaaccagaggaaatcaaaagatactagagggcttcatgtttctgtaaactaggtggcccagttgaaatccttcccttcctctaccttggaagtgcctaccatgcatccaagtgcgagttcctcgccaacctgcacatcacagccctgctgaatgtctcccgacggacctccgaggcctgcatgacccacctacactacaaatggatccctgtggaagacagccacacggctgacattagctcccactttcaagaagcaatagacttcattgactgtgtcagggaaaagggaggcaaggtcctggtccactgtgaggctgggatctcccgttcacccaccatctgcatggcttaccttatgaagaccaagcagttccgcctgaaggaggccttcgattacatcaagcagaggaggagcatggtctcgcccaactttggcttcatgggccagctcctgcagtacgaatctgagaatcctgccctccacgcccaacccccagcctccctcctgccaaggggaggcagcaggctcttcactgataggccatttgcagacactgagccctgacatgcagggtgcctactgcacattccctgcctcggtgctggcaccggtgcctacccactcaacagtctcagagctcagcagaagccctgtggcaacggccacatcctgctaaaactgggatggaggaatcggcccagccccaagagcaactgtgatttttgtttttaagactcatggacatttcatacctgtgcaatactgaagacctcattctgtcatgctgccccagtgagatagtgagtggtcaccaggcttgcaaatgaacttcagacggacctcagggtaggttctcgggactgaaggaaggccaagccattacgggagcacagcatgtgctgactactgtacttccagacccctgccctcttgggactgcccagtccttgcacctcagagttcgccttttcatttcaagcataaggcaataaatacctgcagcaacgtgggagaaagaagttgctggaccaggagaaaaggcagttatgaagccaattcattttgaaggaagcacaatttccaccttattttttgaactttggcagtttcaatgtctgtctctgttgcttcggggcataagctgatcaccgtctagttgggaaagtcaccctacagggtttgtagggacatgatcagcatcctgatttgaaccctgaaatgttgtgtagacaccctcttgggtccaatgaggtagttggttgaagtagcaagatgttggcttttctggattttttttgccatgggttcttcactgaccttggactttggcatgattcttagtcatacttgaacttgtctcattccacctcttctcagagcaactcttcctttgggaaaagagttcttcagatcatagaccaaaaaagtcataccttcgaggtggtagcagtagattccaggaggagaagggtacttgctaggtatcctgggtcagtggcggtgcaaactggtttcctcagctgcctgtccttctgtgtgcttatgtctcttgtgacaattgttttcctccctgcccctggaggttgtcttcaagctgtggacttctgggatttgcagattttgcaacgtggtactactttttttttctttttgtctgttagttatttctccaggggaaaaggcaataattttctaagacccgtgtgaatgtgaagaaaagcagtatgttactggttgttgttgttgttcttgttttttatagtgtaaaataaaaatagtaaaaggagaaaa

SEQ ID NO: 326519 - DNA, 811 bp, Homo sapiens
aaggatggtcctcagcttgctggtccttctggtgtgcttatgtctctggtgacaatggttttcctcccggccccgggaggtagtcttcaagctgaggaccatcgcttattttttgaactttggcagtttcaatgtctgtctctgttgcttcggggcataagctgatcaccgtctagttgggaaagtcaccctacagggtttgtagggacatgatcagcatcctgatttgaaccctgaaatgttgtgtagacaccctcttgggtccaatgaggtagttggttgaagtagcaagatgttggcttttctggattttttttgccatgggttcttcactgaccttggactttggcatgattcttagtcatacttgaacttgtctcattccacctcttctcagagcaactcttcctttgggaaaagagttcttcagatcatagaccaaaaaagtcataccttcgaggtggtagcagtagattccaggaggagaagggtacttgctaggtatcctgggtcagtggcggtgcaaactggtttcctcagctgcctgtccttctgtgtgcttatgtctcttgtgacaattgttttcctccctgcccctggaggttgtcttcaagctgtggacttctgggatttgcagattttgcaacgtggtactactttttttttctttttgtctgttagttatttctccaggggaaaaggcaataattttctaagacccgtgtgaatgtgaagaaaagcagtatgttactggttgttgttgttgttcttgttttttatagtgtaaaataaaaatagtaaaaggagaaaa

SEQ ID NO: 326520 - DNA, 639 bp, Homo sapiens
tggccttatatgggcagccgcgtcacggacggcactcattcacataaaacgctgcgcggccggcggaatccccggcttctagggcggcgagcggccgcgctggctatcgagcgagcggggcgggaacgcggagttgcgccgccgctcgggcgccgggctccgtcgcggccgcagccccgcgggtcgccctcccgtgcctcgcccgcggacaccctggccgtggacaccctggccgtgggcacccgcggggcgcgcggcgcggggccgctggccggcggcggcggcggcatgaaggtcacgtcgctcgacgggcgccagctgcgcaagatgctccgcaaggaggcggcggcgcgctgcgtggtgctcgactgccggccctatctggccttcgctgcctcgaacgtgcgcggctcgctcaacgtcaacctcaactcggtggtgctgcggcgggcccggggcggcgcggtgtcggcgcgctacgtgtggaccagggcagccgccactggcagaagctgcgagaggagagcgccgcgcgtgtcgtcctcacctcgctactcgcttgcctacccgccggcccgcgggtctacttcctcaaaggtgagcgctcggggtccctgccacgctcgcccctccggcgcc

SEQ ID NO: 326521 - DNA, 508 bp, Homo sapiens
ggtgctacagagaaagtcctgtttgggtggctaagtaggctcctctaaggggttcttatgcttacaattccacagataactgaaaccagaggaaatcaaaagatactagagggcttcatgtttctgtaaactagtgagtttttgtttttcttctaaaaatgagtgctttgtgataactcattaaagggaaaaataaagtggaagggggttacgtagcaccatccaggaagatgaaaaagcaggtgagaatccaaatctggcagaagccagagatcaaaacctaaccattttacggaagggaaaagaagtgttctgtgacaagtgagatgattgattttgcagagtcctacagctggttcaaggcagcatcaggctcagaacccctttctctcagctccctgttgtgattatttcaggaccttgttctgttttccacatggcctctaatctagacacctgacctggtgggagtaacctttcaaacttttcacataaccaagaacatacc

SEQ ID NO: 326522 - DNA, 3137 bp, Homo sapiens
tggccttatatgggcagccgcgtcacggacggcactcattcacataaaacgctgcgcggccggcggaatccccggcttctagggcggcgagcggccgcgctggctatcgagcgagcggggcgggaacgcggagttgcgccgccgctcgggcgccgggctccgtcgcggccgcagccccgcgggtcgccctcccgtgcctcgcccgcggacaccctggccgtggacaccctggccgtgggcacccgcggggcgcgcggcgcggggccgctggccggcggcggcggcggcatgaaggtcacgtcgctcgacgggcgccagctgcgcaagatgctccgcaaggaggcggcggcgcgctgcgtggtgctcgactgccggccctatctggccttcgctgcctcgaacgtgcgcggctcgctcaacgtcaacctcaactcggtggtgctgcggcgggcccggggcggcgcggtgtcggcgcgctacgtgctgcccgacgaggcggcgcgcgcgcggctcctgcaggagggcggcggcggcgtcgcggccgtggtggtgctggaccagggcagccgccactggcagaagctgcgagaggagagcgccgcgcgtgtcgtcctcacctcgctactcgcttgcctacccgccggcccgcgggtctacttcctcaaagggggatatgagactttctactcggaatatcctgagtgttgcgtggatgtaaaacccatttcacaagagaagattgagagtgagagagccctcatcagccagtgtggaaaaccagtggtaaatgtcagctacaggccagcttatgaccagggtggcccagttgaaatccttcccttcctctaccttggaagtgcctaccatgcatccaagtgcgagttcctcgccaacctgcacatcacagccctgctgaatgtctcccgacggacctccgaggcctgcatgacccacctacactacaaatggatccctgtggaagacagccacacggctgacattagctcccactttcaagaagcaatagacttcattgactgtgtcagggaaaagggaggcaaggtcctggtccactgtgaggctgggatctcccgttcacccaccatctgcatggcttaccttatgaagaccaagcagttccgcctgaaggaggccttcgattacatcaagcagaggaggagcatggtctcgcccaactttggcttcatgggccagctcctgcagtacgaatctgagaatcctgccctccacgcccaacccccagcctccctcctgccaaggggaggcagcaggctcttcactgataggccatttgcagacactgagccctgacatgcagggtgcctactgcacattccctgcctcggtgctggcaccggtgcctacccactcaacagtctcagagctcagcagaagccctgtggcaacggccacatcctgctaaaactgggatggaggaatcggcccagccccaagagcaactgtgatttttgtttttaagactcatggacatttcatacctgtgcaatactgaagacctcattctgtcatgctgccccagtgagatagtgagtggtcaccaggcttgcaaatgaacttcagacggacctcagggtaggttctcgggactgaaggaaggccaagccattacgggagcacagcatgtgctgactactgtacttccagacccctgccctcttgggactgcccagtccttgcacctcagagttcgccttttcatttcaagcataaggcaataaatacctgcagcaacgtgggagaaagaagttgctggaccaggagaaaaggcagttatgaagccaattcattttgaaggaagcacaatttccaccttattttttgaactttggcagtttcaatgtctgtctctgttgcttcggggcataagctgatcaccgtctagttgggaaagtcaccctacagggtttgtagggacatgatcagcatcctgatttgaaccctgaaatgttgtgtagacaccctcttgggtccaatgaggtagttggttgaagtagcaagatgttggcttttctggattttttttgccatgggttcttcactgaccttggactttggcatgattcttagtcatacttgaacttgtctcattccacctcttctcagagcaactcttcctttgggaaaagagttcttcagatcatagaccaaaaaagtcataccttcgaggtggtagcagtagattccaggaggagaagggtacttgctaggtatcctgggtcagtggcggtgcaaactggtttcctcagctgcctgtccttctgtgtgcttatgtctcttgtgacaattgttttcctccctgcccctggaggttgtcttcaagctgtggacttctgggatttgcagattttgcaacgtggtactactttttttttctttttgtctgttagttatttctccaggggaaaaggcaataattttctaagacccgtgtgaatgtgaagaaaagcagtatgttactggttgttgttgttgttcttgttttttatagtgtaaaataaaaatagtaaaaggagaaaaaaaaaaaaaaaaaaaaaaaaaaaaaaaaaaaaaaaaaaaaaaaaaaaaaaaaaaaaaaaaaagaccggaagaagccgaacacaaaaaaaaaacacccgaagcggcacgacaacacaacagcagacccccccacgttaacaacaaccggccgctaccacccagccctcgtcccgccacacatcaccgccacccgcccacttcacaaccgcgccgcaacgagcaacccgccgaccgacgcagcactccctacacaccacccacccctccggcacgggcgggccaccacacccccgaccaaggaccagaccaccgccagcacacctaccgaacacaccccccacacagaggaaaataccaaacagaactcgaccgaaagcagtgacagacccgaaacccccaccccaccacccccgcaacgcctgccacgacgcgacgcacccagccacacgcgccccccaccgcgcctccgccccacccgcacgcaccacacaccacagcagcagcccggaacccaacccccccgccccaccacccccccaagcccccacccacgcacccaccggcacaaaccaggcacg

SEQ ID NO: 326523 - DNA, 2477 bp, Homo sapiens
tggccttatatgggcagccgcgtcacggacggcactcattcacataaaacgctgcgcggccggcggaatccccggcttctagggcggcgagcggccgcgctggctatcgagcgagcggggcgggaacgcggagttgcgccgccgctcgggcgccgggctccgtcgcggccgcagccccgcgggtcgccctcccgtgcctcgcccgcggacaccctggccgtggacaccctggccgtgggcacccgcggggcgcgcggcgcggggccgctggccggcggcggcggcggcatgaaggtcacgtcgctcgacgggcgccagctgcgcaagatgctccgcaaggaggcggcggcgcgctgcgtggtgctcgactgccggccctatctggccttcgctgcctcgaacgtgcgcggctcgctcaacgtcaacctcaactcggtggtgctgcggcgggcccggggcggcgcggtgtcggcgcgctacgtgctgcccgacgaggcggcgcgcgcgcggctcctgcaggagggcggcggcggcgtcgcggccgtggtggtgctggaccagggcagccgccactggcagaagctgcgagaggagagcgccgcgcgtgtcgtcctcacctcgctactcgcttgcctacccgccggcccgcgggtctacttcctcaaagggggatatgagactttctactcggaatatcctgagtgttgcgtggatgtaaaacccatttcacaagagaagattgagagtgagagagccctcatcagccagtgtggaaaaccagtggtaaatgtcagctacaggccagcttatgaccagggtggcccagttgaaatccttcccttcctctaccttggaagtgcctaccatgcatccaagtgcgagttcctcgccaacctgcacatcacagccctgctgaatgtctcccgacggacctccgaggcctgcatgacccacctacactacaaatggatccctgtggaagacagccacacggctgacattagctcccactttcaagaagcaatagacttcattgactgtgtcagggaaaagggaggcaaggtcctggtccactgtgaggctgggatctcccgttcacccaccatctgcatggcttaccttatgaagaccaagcagttccgcctgaaggaggccttcgattacatcaagcagaggaggagcatggtctcgcccaactttggcttcatgggccagctcctgcagtacgaatctgagaatcctgccctccacgcccaacccccagcctccctcctgccaaggggaggcagcaggctcttcactgataggccatttgcagacactgagccctgacatgcagggtgcctactgcacattccctgcctcggtgctggcaccggtgcctacccactcaacagtctcagagctcagcagaagccctgtggcaacggccacatcctgctaaaactgggatggaggaatcggcccagccccaagagcaactgtgatttttgtttttaagactcatggacatttcatacctgtgcaatactgaagacctcattctgtcatgctgccccagtgagatagtgagtggtcaccaggcttgcaaatgaacttcagacggacctcagggtaggttctcgggactgaaggaaggccaagccattacgggagcacagcatgtgctgactactgtacttccagacccctgccctcttgggactgcccagtccttgcacctcagagttcgccttttcatttcaagcataaggcaataaatacctgcagcaacgtgggagaaagaagttgctggaccaggagaaaaggcagttatgaagccaattcattttgaaggaagcacaatttccaccttattttttgaactttggcagtttcaatgtctgtctctgttgcttcggggcataagctgatcaccgtctagttgggaaagtcaccctacagggtttgtagggacatgatcagcatcctgatttgaaccctgaaatgttgtgtagacaccctcttgggtccaatgaggtagttggttgaagtagcaagatgttggcttttctggattttttttgccatgggttcttcactgaccttggactttggcatgattcttagtcatacttgaacttgtctcattccacctcttctcagagcaactcttcctttgggaaaagagttcttcagatcatagaccaaaaaagtcataccttcgaggtggtagcagtagattccaggaggagaagggtacttgctaggtatcctgggtcagtggcggtgcaaactggtttcctcagctgcctgtccttctgtgtgcttatgtctcttgtgacaattgttttcctccctgcccctggaggttgtcttcaagctgtggacttttctgctattaatacttccactgtgttctgaaatccctgtggtgaatttttcatttccaggagttctgtttggttctttcctaaaatggctatgtcatctttcaa

SEQ ID NO: 326524 - DNA, 1236 bp, Homo sapiens
tggccttatatgggcagccgcgtcacggacggcactcattcacataaaacgctgcgcggccggcggaatccccggcttctagggcggcgagcggccgcgctggctatcgagcgagcggggcgggaacgcggagttgcgccgccgctcgggcgccgggctccgtcgcggccgcagccccgcgggtcgccctcccgtgcctcgcccgcggacaccctggccgtggacaccctggccgtgggcacccgcggggcgcgcggcgcggggccgctggccggcggcggcggcggcatgaaggtcacgtcgctcgacgggcgccagctgcgcaagatgctccgcaaggaggcggcggcgcgctgcgtggtgctcgactgccggccctatctggccttcgctgcctcgaacgtgcgcggctcgctcaacgtcaacctcaactcggtggtgctgcggcgggcccggggcggcgcggtgtcggcgcgctacgtgctgcccgacgaggcggcgcgcgcgcggctcctgcaggagggcggcggcggcgtcgcggccgtggtggtgctggaccagggcagccgccactggcagaagctgcgagaggagagcgccgcgcgtgtcgtcctcacctcgctactcgcttgcctacccgccggcccgcgggtctacttcctcaaagggggatatgagactttctactcggaatatcctgagtgttgcgtggatgtaaaacccatttcacaagagaagattgagagtgagagagccctcatcagccagtgtggaaaaccagtggtaaatgtcagctacaggccagcttatgaccagataactgaaaccagaggaaatcaaaagatactagagggcttcatgtttctgtaaactagtgagtttttgtttttcttctaaaaatgagtgctttgtgataactcattaaagggaaaaataaagtggaagggggttacgtagcaccatccaggaagatgaaaaagcaggtgagaatccaaatctggcagaagccagagatcaaaacctaaccattttacggaagggaaaagaagtgttctgtgacaagtgagatgattgattttgcagagtcctacagctggttcaaggcagcatcaggctcagaacccctttctctcagctccctgttgtgattatttcaggaccttgttctgttttccacatggcctctaatctagacacctgacctggtgggagtaacctttcaaacttttcacataa

SEQ ID NO: 326525 - DNA, 300 bp, Homo sapiens
gaaaaggggaggacatctcaggaccccgatgccactctgtggcccagcttatccctcccaccaaggctgtggtgagggtctgacaggcagagctggggtggtccaggagagccacgcccccgcagcaagacctggcaaccctgcggcaccacccatcagccccggcctagcagccccgcagtaggatccagaggccccaagagtccctgctggcaaatgacctcagggagctaaaaacgagggatgacttcacccgggtggcaggtgcatgagtcagccagtgatcacaggaaagcccgg

SEQ ID NO: 326526 - DNA, 425 bp, Homo sapiens
catgcctggcctgtttgaatttttgtagcaattaaaaattgcgtaatttaaacacaaattgaaggggacagggactaaaaacataaatgagagttagaatgcagtgccacgttgaatgctttcacaggtaggagcctagaaatcatctgttccaactactgcacttttgagttgtggagaccagaccaagagaggtgaaatgactgttggctaaggcgtccacctctacttgcgtctggaattgcccctgcctctgcctttaagtctggtctgcgtggcttctgatagcgaagccaggggcggaccccgttcactgcatcaggagagccctgagcagcgcttggcaggaactctgcagcccagggcgccctctagaggctggaggaccttcgtcaagaccccggggggtgtggatgtggacctgg

SEQ ID NO: 326527 - DNA, 2232 bp, Homo sapiens
tggcacgaggcagaccatgaggtttaactgagtgaacaccgctgttccggggctctgcctctcgctgaacgctcctgctgggctggggcctcccgagtagctggaagtacagataatcacagctggcttatcaatattgctgtttgatgcgatcctgaccagtgcaaccacgggatgcctcctgctcggtgcgcttggagaggccttgctggttttctcagagcggaagagctcctgaacaagacggtcaagagaaagactcacaggctgctgcgggagaacagcttgtacacctgtgtacgagcccctggtctcatagctccctgttggatgtgtcagaaagaggaatgcaaggacagtgaggccaggtgggcagtgccatcaccctcacccaagtgaatgtggtggtggctgatgaggccgaggccctggtgcttcaaggagcaccctttctgggggtctgcaggtcactgcagaggagcggtctgttacatcttcccatttggagaacctctctcaaccgtgctgtagctggttctgcagaaacaggaagtacaggatttcatgggctggctctgctcgcctcgactgagcttcacacctctggatgccacatgctctctcccaaacactgctttcagtgcaaggtagtgggcctaaggggtttggttgtcttttttttttttcatttttaaaattttaaatttttatttattattattttttagagacaaggcctcgctctgtcgcctaggctgaagcacagtggtgcgatcacagctcgctgcagccttgacctcctaggatcaagccatcctcctgcctcagcatccacagtagctgatgtgcaccaccagacccgtctcattttttctatttttattattttagagatggggatctcactgtgttggccaggctggtctcaaactcctgggctcaagcaatcctcccaccttggcctcaaagtattgagattacaggcatgagccactgcacccggcctttctcatttttatttttaaattgacagacgtaacagtgcgcatttatcacgcacaacacaatgctttgggaatggttaaatctagctcacaaatgcattacctcacacggttgtcatttttgtggtgaggcttggttgtatgttttgtttcattcatgtttttacatccttggagtctcctctgggtccgtcctttctttgctgtcatgctggcttgcctaaggcccaccgccacctgcgtacgagcattttaaactctagagtgagtgacagcctttttatggttggtgttactatttatttcctgcctctaaacttctcgtggtccttataaacttgtcaggatgtgtgttgcgttgaattctgcatgtcctttttttgcccaccctcaggttaagctggtactaacttatccccagaggaaacagggtttatgagcactgacagatgtcttccctgggcaaaaaaaaaaaaaaatagtatatgtatacacacacacatacacatttatatttatatttcttaaagcttttaatccctttcattccctgatatctcagagatttcaaatcattgaacactgaagtatatttttcaggccagatgaaaaattgtattaaaaccctattcctggtcaggcgcagtggctcacgcctataatcccagcactttgggaggccgaagtaagcagatcacctgaggtcgggagttcaagacaaacctggccaacatggtgaaaccctgtctctactaaaactacaaaaaaattagcctgatgtggtgttgtgtgcctgtagtcccagctacttaggaggctgaggtaggagaattgcttgaacctgggaggcggaggttgcagtgagccaaaattacgccactgcactccagcctgggcaacagagcgagacagtctcaaaaacaacaacaacaacaaaaaccctattccttgcctttgtaggagtcaaaataaatgaacttcttttttcttttttttattattatactttaagttctggggtacacgtgcagaatgtgcaggtttgttacataggtatgcacgtgccatggtggtttgctgcacccatcaacctgtcacctacattaggtatttcccctaatgttatccctcccctagccctccatcccctgacaggccctggtgtgtgatgttcccctccctatgtccatgtgttctcattgctccaaaataaatgaatttacacaaa

SEQ ID NO: 326528 - DNA, 1931 bp, Homo sapiens
atctggcacaggcgcctgcgccgcagcggggctgccgctggttggtccgcacgtggaacctctcctggtcctgttgacccgggcccctcggaacctccagcttggtccggtctgggactggaagcctgccatggcggcttctgcggcggagacgcgcgtgtttctggaggtgcggggacagctgcagagcgcgcttctgatcctgggagaaccgaaagaaggaggtatgcccatgaatatttccataatgccatcttcactccagatgaaaacccctgaaggctgcacagaaatccagcttccagcagaggtcaggcttgtaccttcctcttgccgtgggctacagtttgttgttggagatggactgcacctgcgactgcagacgcaagcaaaattaggcacaaaactgatttcaatgtttaatcaaagctcgcaaacccaagaatgttgcacgttttattgccaatcctgcggtgaagtcataataaaagacaggaagctcctcagggtgctcccactgccgagtgagaactggggagctctagttggagaatggtgttgtcatcctgacccctttgctaataaatcacttcatccgcaagagaatgactgttttattggagactctttcttcttggtgaatttaagaaccagtttgtggcagcaaagacctgaactatccccagtggagatgtgctgtgtttcttctgacaaccattgtaaattggaaccaaaggcaaataccaaagtaatttgtaagcgttgcaaggtaatgttgggagagaccgtgtcatcagaaaccaccaagttttatatgacagagataattattcagtcatctgagaggagttttcctatcataccaaggtcttggtttgtccagagcgtgatcgcccagtgtctggtgcagctctcctctgctagaagcacttttagattcacgattcaaggtcaggatgacaaagtgtatatcttgctatggcttttaaattcagacagtttggtgattgaatctttgagaaattccaaatatatcaaaaaattccccttgttggaaaacacattcaaagccgattctagttctgcctggagtgctgtcaaggtcctctaccagccatgcatcaaaagcaggaatgaaaaacttgtcagcttgtgggaaagtgacatcagcgtccacccgctaaccctgccctctgcaacctgcttggagctgctgttgatattgtcaaagagtaatgccaatctgccttcatcccttcgccgtgtgaattcctttcaggtggcctttttgaagatgtaactattagagctgggcattctcctcccccggcagacagctctcaagcaggagcacaccgaggccagcagtcagctcaggaggcatcaattacaaagacaagaaccagagctatgggataagagcattgcattgaagttttaagtttacttgtttgcatgtattctctaagagaagagttaactttagatctttgaaaacccaggactgtgaagaaagtcatagtagcaggttgaggcaagtgtagaagttacatctctatttcccacagagaggaatattcacatatgtgcagtgtcagcaccacctggaaggttattacctaatggagatccatctgtcctgtgtggaatccagtgaggaattttattggtggaactgaatgttaactgctgtaaatcctaggaaataaacttttaaagagtttctcaggatgatttaaaacaaattttaaaaaagaaaagtagaaaacattttatactttattcagaggagatgctcaatagatgtttgttgaatgaatgattatcaaattaaaggatttcctatttatgcaaatctgcatgtttcttttgttatttcctttaccatacattattgcaaattaataaatatacctcactagcaaaaaaaa

SEQ ID NO: 326529 - DNA, 2024 bp, Homo sapiens
atctggcacaggcgcctgcgccgcagcggggctgccgctggttggtccgcacgtggaacctctcctggtcctgttgacccgggcccctcggaacctccagcttggtccggtctgggactggaagcctgccatggcggcttctgcggcggagacgcgcgtgtttctggaggtgcggggacagctgcagagcgcgcttctgatcctgggagatagggtttcaccatattgcccatgctggtcttgaactcctggactcaagcgatccacccactttggactcccaaagtgctgggattacagagaaccgaaagaaggaggtatgcccatgaatatttccataatgccatcttcactccagatgaaaacccctgaaggctgcacagaaatccagcttccagcagaggtcaggcttgtaccttcctcttgccgtgggctacagtttgttgttggagatggactgcacctgcgactgcagacgcaagcaaaattaggcacaaaactgatttcaatgtttaatcaaagctcgcaaacccaagaatgttgcacgttttattgccaatcctgcggtgaagtcataataaaagacaggaagctcctcagggtgctcccactgccgagtgagaactggggagctctagttggagaatggtgttgtcatcctgacccctttgctaataaatcacttcatccgcaagagaatgactgttttattggagactctttcttcttggtgaatttaagaaccagtttgtggcagcaaagacctgaactatccccagtggagatgtgctgtgtttcttctgacaaccattgtaaattggaaccaaaggcaaataccaaagtaatttgtaagcgttgcaaggtaatgttgggagagaccgtgtcatcagaaaccaccaagttttatatgacagagataattattcagtcatctgagaggagttttcctatcataccaaggtcttggtttgtccagagcgtgatcgcccagtgtctggtgcagctctcctctgctagaagcacttttagattcacgattcaaggtcaggatgacaaagtgtatatcttgctatggcttttaaattcagacagtttggtgattgaatctttgagaaattccaaatatatcaaaaaattccccttgttggaaaacacattcaaagccgattctagttctgcctggagtgctgtcaaggtcctctaccagccatgcatcaaaagcaggaatgaaaaacttgtcagcttgtgggaaagtgacatcagcgtccacccgctaaccctgccctctgcaacctgcttggagctgctgttgatattgtcaaagagtaatgccaatctgccttcatcccttcgccgtgtgaattcctttcaggtggcctttttgaagatgtaactattagagctgggcattctcctcccccggcagacagctctcaagcaggagcacaccgaggccagcagtcagctcaggaggcatcaattacaaagacaagaaccagagctatgggataagagcattgcattgaagttttaagtttacttgtttgcatgtattctctaagagaagagttaactttagatctttgaaaacccaggactgtgaagaaagtcatagtagcaggttgaggcaagtgtagaagttacatctctatttcccacagagaggaatattcacatatgtgcagtgtcagcaccacctggaaggttattacctaatggagatccatctgtcctgtgtggaatccagtgaggaattttattggtggaactgaatgttaactgctgtaaatcctaggaaataaacttttaaagagtttctcaggatgatttaaaacaaattttaaaaaagaaaagtagaaaacattttatactttattcagaggagatgctcaatagatgtttgttgaatgaatgattatcaaattaaaggatttcctatttatgcaaatctgcatgtttcttttgttatttcctttaccatacattattgcaaattaataaatatacctcactagcaaaaaaaa

SEQ ID NO: 326530 - DNA, 2093 bp, Homo sapiens
gacaggtttttgtcttgtatcattgtttcactgaatcttggtctctttattaaaatcttgtatatgaaataacagtactttgctctgatttactataaaacattattttagtgctcttctcagaaggaagaaccaaaaatctgtcccaggacttgcatattatggtgatggtgaagggcactctgatcagatctaaatctagtgtaggttgctttcctttatgatctgcttgctgctgtttttctggggcagtgactttagagctcctattgaagaggaagaaagagatccttggccatttttgtttctttcatcatgtggttttcattgtgagaaataatttgtttgggttttgtttttaattaccagagaaccgaaagaaggaggtatgcccatgaatatttccataatgccatcttcactccagatgaaaacccctgaaggctgcacagaaatccagcttccagcagaggtcaggcttgtaccttcctcttgccgtgggctacagtttgttgttggagatggactgcacctgcgactgcagacgcaagcaaaattaggcacaaaactgatttcaatgtttaatcaaagctcgcaaacccaagaatgttgcacgttttattgccaatcctgcggtgaagtcataataaaagacaggaagctcctcagggtgctcccactgccgagtgagaactggggagctctagttggagaatggtgttgtcatcctgacccctttgctaataaatcacttcatccgcaagagaatgactgttttattggagactctttcttcttggtgaatttaagaaccagtttgtggcagcaaagacctgaactatccccagtggagatgtgctgtgtttcttctgacaaccattgtaaattggaaccaaaggcaaataccaaagtaatttgtaagcgttgcaaggtaatgttgggagagaccgtgtcatcagaaaccaccaagttttatatgacagagataattattcagtcatctgagaggagttttcctatcataccaaggtcttggtttgtccagagcgtgatcgcccagtgtctggtgcagctctcctctgctagaagcacttttagattcacgattcaaggtcaggatgacaaagtgtatatcttgctatggcttttaaattcagacagtttggtgattgaatctttgagaaattccaaatatatcaaaaaattccccttgttggaaaacacattcaaagccgattctagttctgcctggagtgctgtcaaggtcctctaccagccatgcatcaaaagcaggaatgaaaaacttgtcagcttgtgggaaagtgacatcagcgtccacccgctaaccctgccctctgcaacctgcttggagctgctgttgatattgtcaaagagtaatgccaatctgccttcatcccttcgccgtgtgaattcctttcaggtggcctttttgaagatgtaactattagagctgggcattctcctcccccggcagacagctctcaagcaggagcacaccgaggccagcagtcagctcaggaggcatcaattacaaagacaagaaccagagctatgggataagagcattgcattgaagttttaagtttacttgtttgcatgtattctctaagagaagagttaactttagatctttgaaaacccaggactgtgaagaaagtcatagtagcaggttgaggcaagtgtagaagttacatctctatttcccacagagaggaatattcacatatgtgcagtgtcagcaccacctggaaggttattacctaatggagatccatctgtcctgtgtggaatccagtgaggaattttattggtggaactgaatgttaactgctgtaaatcctaggaaataaacttttaaagagtttctcaggatgatttaaaacaaattttaaaaaagaaaagtagaaaacattttatactttattcagaggagatgctcaatagatgtttgttgaatgaatgattatcaaattaaaggatttcctatttatgcaaatctgcatgtttcttttgttatttcctttaccatacattattgcaaattaataaatatacctcactagcaaaaaaaa

SEQ ID NO: 326531 - DNA, 1893 bp, Homo sapiens
atctggcacaggcgcctgcgccgcagcggggctgccgctggttggtccgcacgtggaacctctcctggtcctgttgacccgggcccctcggaacctccagcttggtccggtctgggactggaagcctgccatggcggcttctgcggcggagacgcgcgtgtttctggagagaaccgaaagaaggaggtatgcccatgaatatttccataatgccatcttcactccagatgaaaacccctgaaggctgcacagaaatccagcttccagcagaggtcaggcttgtaccttcctcttgccgtgggctacagtttgttgttggagatggactgcacctgcgactgcagacgcaagcaaaattaggcacaaaactgatttcaatgtttaatcaaagctcgcaaacccaagaatgttgcacgttttattgccaatcctgcggtgaagtcataataaaagacaggaagctcctcagggtgctcccactgccgagtgagaactggggagctctagttggagaatggtgttgtcatcctgacccctttgctaataaatcacttcatccgcaagagaatgactgttttattggagactctttcttcttggtgaatttaagaaccagtttgtggcagcaaagacctgaactatccccagtggagatgtgctgtgtttcttctgacaaccattgtaaattggaaccaaaggcaaataccaaagtaatttgtaagcgttgcaaggtaatgttgggagagaccgtgtcatcagaaaccaccaagttttatatgacagagataattattcagtcatctgagaggagttttcctatcataccaaggtcttggtttgtccagagcgtgatcgcccagtgtctggtgcagctctcctctgctagaagcacttttagattcacgattcaaggtcaggatgacaaagtgtatatcttgctatggcttttaaattcagacagtttggtgattgaatctttgagaaattccaaatatatcaaaaaattccccttgttggaaaacacattcaaagccgattctagttctgcctggagtgctgtcaaggtcctctaccagccatgcatcaaaagcaggaatgaaaaacttgtcagcttgtgggaaagtgacatcagcgtccacccgctaaccctgccctctgcaacctgcttggagctgctgttgatattgtcaaagagtaatgccaatctgccttcatcccttcgccgtgtgaattcctttcaggtggcctttttgaagatgtaactattagagctgggcattctcctcccccggcagacagctctcaagcaggagcacaccgaggccagcagtcagctcaggaggcatcaattacaaagacaagaaccagagctatgggataagagcattgcattgaagttttaagtttacttgtttgcatgtattctctaagagaagagttaactttagatctttgaaaacccaggactgtgaagaaagtcatagtagcaggttgaggcaagtgtagaagttacatctctatttcccacagagaggaatattcacatatgtgcagtgtcagcaccacctggaaggttattacctaatggagatccatctgtcctgtgtggaatccagtgaggaattttattggtggaactgaatgttaactgctgtaaatcctaggaaataaacttttaaagagtttctcaggatgatttaaaacaaattttaaaaaagaaaagtagaaaacattttatactttattcagaggagatgctcaatagatgtttgttgaatgaatgattatcaaattaaaggatttcctatttatgcaaatctgcatgtttcttttgttatttcctttaccatacattattgcaaattaataaatatacctcactagcaaaaaaaa

SEQ ID NO: 326532 - DNA, 1849 bp, Homo sapiens
atctggcacaggcgcctgcgccgcagcggggctgccgctggttggtccgcacgtggaacctctcctggtcctgttgacccgggcccctcggaacctccagcttggtccggtctgggactggaagcctgccatggcggcttctgcggcggagacgcgcgtgtttctggaggtgcggggacagctgcagagcgcgcttctgatcctgggagaaccgaaagaaggaggtatgcccatgaatatttccataatgccatcttcactccagatgaaaacccctgaaggctgcacagaaatccagcttccagcagaggtcaggcttgtaccttcctcttgccgtgggctacagtttgttgttggagatggactgcacctgcgactgcagacgcaagcaaaattaggcacaaaactgatttcaatgtttaatcaaagctcgcaaacccaagaatgttgcacgttttattgccaatcctgcggtgaagtcataataaaagacaggaagctcctcagggtgctcccactgccgagtgagaactggggagctctagttggagaatggtgttgtcatcctgacccctttgctaataaatcacttcatccgcaagagaatgactgttttattggagactctttcttcttggtgaatttaagaaccagtttgtggcagcaaagacctgaactatccccagtggagatgtgctgtgtttcttctgacaaccattgtaaattggaaccaaaggcaaataccaaagtaatttgtaagcgttgcaaggtaatgttgggagagaccgtgtcatcagaaaccaccaagttttatatgacagagataattattcagtcatctgagaggagttttcctatcataccaaggtcttggtttgtccagagcgtgatcgcccagtgtctggtgcagctctcctctgctagaagcacttttagattcacgattcaaggtcaggatgacaaagtgtatatcttgctatggcttttaaattcagacagtttggtgattgaatctttgagaaattccaaatatatcaaaaaattccccttgttggaaaacacattcaaagccgattctagttctgcctggagtgctgtcaaggtcctctaccagccatgcatcaaaagcaggaatgaaaaacttgtcagcttgtgggaaagtgacatcagcgtccacccgctaaccctgccctctgcaacctgcttggagctgctgttgatattgtcaaagagtaatgccaatctgccttcatcccttcgccgtgtgaattcctttcaggtggcctttttgaagatgtaactattagagctgggcattctcctcccccggcagacagctctcaagcaggagcacaccgaggccagcagtcagctcaggaggcatcaattacaaagacaagaaccagagctatgggataagagcattgcattgaagttttaagtttacttgtttgcatgtattctctaagagaagagttaactttagatctttgaaaacccaggactgtgaagaaagtcatagtagcaggttgaggcaagtgtagaagttacatctctatttcccacagagaggaatattcacatatgtgcagtgtcagcaccacctggaaggttattacctaatggagatccatctgtcctgtgtggaatccagtgaggaattttattggtggaactgaatgttaactgctgtaaatcctaggaaataaacttttaaagagtttctcaggatgatttaaaacaaattttaaaaaagaaaagtagaaaacattttatactttattcagaggagatgctcaatagatgtttgttgaatgaatgattatcaaattaaaggatttcctattta

SEQ ID NO: 326533 - DNA, 1260 bp, Homo sapiens
taagatggagtcacgttctgtcgcccaggctggagtgcagtggcacgatctcggctcactgcaacatctgcctcctggtttcaagcaattatcctgcctcaccctcccgagtagctgggactacagaaaccaccaagttttatatgacagagataattattcagtcatctgagaggagttttcctatcataccaaggtcttggtttgtccagagcgtgatcgcccagtgtctggtgcagctctcctctgctagaagcacttttagattcacgattcaaggtcaggatgacaaagtgtatatcttgctatggcttttaaattcagacagtttggtgattgaatctttgagaaattccaaatatatcaaaaaattccccttgttggaaaacacattcaaagccgattctagttctgcctggagtgctgtcaaggtcctctaccagccatgcatcaaaagcaggaatgaaaaacttgtcagcttgtgggaaagtgacatcagcgtccacccgctaaccctgccctctgcaacctgcttggagctgctgttgatattgtcaaagagtaatgccaatctgccttcatcccttcgccgtgtgaattcctttcaggtggcctttttgaagatgtaactattagagctgggcattctcctcccccggcagacagctctcaagcaggagcacaccgaggccagcagtcagctcaggaggcatcaattacaaagacaagaaccagagctatgggataagagcattgcattgaagttttaagtttacttgtttgcatgtattctctaagagaagagttaactttagatctttgaaaacccaggactgtgaagaaagtcatagtagcaggttgaggcaagtgtagaagttacatctctatttcccacagagaggaatattcacatatgtgcagtgtcagcaccacctggaaggttattacctaatggagatccatctgtcctgtgtggaatccagtgaggaattttattggtggaactgaatgttaactgctgtaaatcctaggaaataaacttttaaagagtttctcaggatgatttaaaacaaattttaaaaaagaaaagtagaaaacattttatactttattcagaggagatgctcaatagatgtttgttgaatgaatgattatcaaattaaaggatttcctatttatgcaaatctgcatgtttcttttgttatttcctttaccatacattattgcaaattaataaatatacctcactagcaaaaaaaa

SEQ ID NO: 326534 - DNA, 3091 bp, Homo sapiens
  misc_feature (3078)..(3078): n is a, c, g, or t
atctggcacaggcgcctgcgccgcagcggggctgccgctggttggtccgcacgtggaacctctcctggtcctgttgacccgggcccctcggaacctccagcttggtccggtctgggactggaagcctgccatggcggcttctgcggcggagacgcgcgtgtttctggaggtgcggggacagctgcagagcgcgcttctgatcctgggagatagggtttcaccatattgcccatgctggtcttgaactcctggactcaagcgatccacccactttggactcccaaagtgctgggattacagagaaccgaaagaaggaggtatgcccatgaatatttccataatgccatcttcactccagatgaaaacccctgaaggctgcacagaaatccagcttccagcagaggtcaggcttgtaccttcctcttgccgtgggctacagtttgttgttggagatggactgcacctgcgactgcagacgcaagcaaaattaggcacaaaactgatttcaatgtttaatcaaagctcgcaaacccaagaatgttgcacgttttattgccaatcctgcggtgaagtcataataaaagacaggaagctcctcagggtgctcccactgccgagtgagaactggggagctctagttggagaatggtgttgtcatcctgacccctttgctaataaatcacttcatccgcaagagaatgactgttttattggagactctttcttcttggtgaatttaagaaccagtttgtggcagcaaagacctgaactatccccagtggagatgtgctgtgtttcttctgacaaccattgtaaattggaaccaaaggcaaataccaaagtaatttgtaagcgttgcaaggtaatgttgggagagaccgtgtcatcagccaggtcatgctgatgcaagaggtgggctcccatggccttgaacagctctgttcctgtggttttgccggaaaccaccaagttttatatgacagagataattattcagtcatctgagaggagttttcctatcataccaaggtcttggtttgtccagagcgtgatcgcccagtgtctggtgcagctctcctctgctagaagcacttttagattcacgattcaaggtcaggatgacaaagtgtatatcttgctatggcttttaaattcagacagtttggtgattgaatctttgagaaattccaaatatatcaaaaaattccccttgttggaaaacacattcaaagccgattctagttctgcctggagtgctgtcaaggtcctctaccagccatgcatcaaaagcaggaatgaaaagtaagttgtgcatttgttttctctttccacattatgttttagcttttgttgtcatgttggtgttaagaaattaatgaattaaatgccactataccatttccctacttgaagcttctaggagccaatactgctaaatattatatgtttaaaataggttgaattattacagatgattcatgttaatatgcagaaagcttgcttttaccaaaaattattgtttttttcttgtaatctaagctgtctgtacatatggctgcagtgctaaatcagacttcaacagtgatgaatatttaccaataagcactttccaggcatcaggatacaataatgaacaaaccccagcccctacctcttagcattgttgttctaatagggggaaggcagaccataaacaaaacagattcttacgtctcttactatgtgtcaggcactcatctaagaactcgtagctcatttaagcctaacaacaacctgtgtggtatgtaccattatcatccccactttaaagataagcacactaagacactggtagtaaatcactctagtgaaaaatgaagcaaggtaaggtagttggcgaggggtaggatgggagtaggatgtcattttatattgcaaagtcagggaagattctttagataaggtgatatttaagcaggtaacttgaaggaagtgaagtggtgagccatatctgatggaagatcattcccagaaaaggaaacagcaggttattttaattgtaacagaatcaaagtttgtacttgtcctgtactcttagatgggtttgatcaaatttatcctaagaacggaagggtcttagtctttttctggaaagtaaataagacattgaaaaaattaattaggtttcttatgcaagtagtaccagtcataaaatattcaaacactaagagatatatacaaggtaaaattatatcccgctccagaagtaaaacgtttgttgtctactcttccacttccttttctgttcattttgcacctaaacatgtgtattttttacacttaaaaaaagcccatgtcttagagattctttccattgtgagtgcttgacattttatgaaatggaggtactataaattatttagccagttttcttttaatggatatttggtttattacttttttgctgttataattagtgttgtgatcttgtatgtttgttttctgattataagttttttatattagaggaatttctagaggtacaattgttgagtcaaagggtatggacatttaaaattttgagaggtaatatcaaagtattttgtaaaaaggcatcatgaatttatattcccacctgaagtttttataaatgtccattaccctgcactctcacccaaatttccatttagatttttgcctatctgatgtgattctaaaggaaacaggtttacttgacactatccttatattttattgagacatgttcaatggatgcatctcagttttatgcttttgagactctttttgagggcttgggtttttttttgtgtgtgtgcccttatgcatagtcaactagtaagctgtacattgattatattctcttttgatgtatgtgtttgtgtgtatctttatatatttaggtttatatcatcaaatttattaaaaccctttatattcatcttttctgtttattaaaatgtggacttttgtgacaggtatgttgaatcttatattatgattatgtaagtaattttcttctgttttgatactagttttcacattatgtattttaaagctgtgttattagaggaataaaantttgtggcatgac

SEQ ID NO: 326535 - DNA, 1103 bp, Homo sapiens
atctggcacaggcgcctgcgccgcagcggggctgccgctggttggtccgcacgtggaacctctcctggtcctgttgacccgggcccctcggaacctccagcttggtccggtctgggactggaagcctgccatggcggcttctgcggcggagacgcgcgtgtttctggaggtgcggggacagctgcagagcgcgcttctgatcctgggagatagggtttcaccatattgcccatgctggtcttgaactcctggactcaagcgatccacccactttggactcccaaagtgctgggattacagagaaccgaaagaaggaggtatgcccatgaatatttccataatgccatcttcactccagatgaaaacccctgaaggctgcacagaaatccagcttccagcagaggtcaggcttgtaccttcctcttgccgtgggctacagtttgttgttggagatggactgcacctgcgactgcagacgcaagcaaaattaggcacaaaactgatttcaatgtttaatcaaagctcgcaaacccaagaatgttgcacgttttattgccaatcctgcggtgaagtcataataaaagacaggaagctcctcagggtgctcccactgccgagtgagaactggggagctctagttggagaatggtgttgtcatcctgacccctttgctaataaatcacttcatccgcaagagaatgactgttttattggagactctttcttcttggtgaatttaagaaccagtttgtggcagcaaagacctgaactatccccagtggagatgtgctgtgtttcttctgacaaccattgtaaattggaaccaaaggcaaataccaaagtaatttgtaagcgttgcaaggtaatgttgggagagaccgtgtcatcaggtaagaatttcataacaagaagccaaaatgattggcttcttgcttaaaagccagaatgatattttatagtaaatatataggaaagatagatgattaatatatgttgtggaattggtgcttttcaaaatagaccccaagtaacataccatccaatataccaagaagtttgtatattttgaccttcataaatacagagtattgaattttaagtat

SEQ ID NO: 326536 - DNA, 613 bp, Homo sapiens
accgcaatcttaaatttttgaaaaacaatcctcacacaaagatactatcaacaaatcacacaccaatttatcttagaaggatcaagagatgaaaaacagcaaaggatattttcgtaatatgctagaatctttgaatataatactgaagttggcaaccaaaagcaattcagaagttcaacttagaactaatggctgtatccgatggcactgtctattttagatattaaaatgtcaccatcttggtattttcacatggctataggcattataaactggaacactactgcgggtttatctggcactctgtatccaaaagtcccccaaaagtacatactctttgactctgtaattctgcttctaggcatgttaagaaaaatacgtcaggtatgccaaaatgtatacatgaaagggtgttcaccaataacattatttaaaatagttcactactggccaggcgcagtagctcatgcctataatcctagcactttgggaggccaagttgggggcaaatcacctgaggtcaggagttcgagaccagcctggactacatggtgaaaccccatctctactaaaagaacaaaaattagccaggtgtggtggcagatgcctgtaa

SEQ ID NO: 326537 - DNA, 939 bp, Homo sapiens
aaaaaaaaaaaaaaagaaagttatatgatcttgaatataaaaagtatggtctctaaagaatttgttgttgtttttacataatgtaggaggaaaaaaattgtggtgtttataagcatcagcctgattaccaaaaatactttttgtggtagactggattttgagaatgttaaaacaatcttcaaaaattgaatattaaatccaaaaataagcaagccacagctaaatgaaaaagtcatagtacataggtgtaatacactttactcaaggggtgtaattccaaaaaaaaagtttttaaaaaaggtaatttgtctcctactggatatactaaataccttagtgaattttttattttgaatagctctttgttaatctacataattgtttatgaatttaacttgctttataagttcaaattatcctatatgctatacaacacactaatggtaatgatgaataagatctactaattaggctttcttctgggcaatgcatgtgggtatcttagattgcttagttaaaacataatgagtaaagatgtccttagatcaggccaaacacttcatcttccccctgcacctccgtttgattaaatttttcgtaaattttgttagggctgcatggcttattgggaagggacctcatccctaccccaggcattggtatcaattttcctgaagctatgtgaagtattaaaaaaccatattcaggcctggcatgttggctcacgcctgtaatctgagcatttagagagacagaggcgggctgatcagttgaggtcaggagtttgagaccagccaggttaacacggtgaaacgcctttactaaaaatacaaaaattagctaggcgtggcggcccatacctgtaattccagctactcagaaggctgaggcaggggaatcgcttgaaaccaggaggcagaggttgcagtgagcccagat

SEQ ID NO: 326538 - DNA, 886 bp, Homo sapiens
agacttcggctcggttcccgagacggaatacccaggagtcgagtacttgggcgcatgcggcaaccgtatctcagttctcgcgaggtttcgtcttcccggaagcgttggaggacattccctgttgactgcgtcgcgatgtgtggcgactgtgtggagaaggaatatcccaaccggggtaatacctgcctggagaatggatctttcttactgaactttacaggctgtgcagtgtgcagtaagcgggattttatgctgatcacaaacaaatccttgaaagaagaagatggagaagaaatagttacctatgatcatttgtgtaagaattgtcatcatgtaatagccagacatgagtatacattcagtatcatggatgaatttcaggagtataccatgctgtgtctgttatgcggcaaagccgaagatactatcagtattctccctgatgacccccgacaaatgactctcttattctaaggatccttctacagatctgttataactatattgtgttggtttacaatacagcaagcctgatggtttgtcttatttcattcatactgaaaattctttgcatattttttttctgcttagacttacttattctttgaggaaaaaaggtaatgtaggagctcattgttctctagagctgagctcttctgctaaagttcaaagttcacatcagtgtagccagagtgaagcatctttgttagcagttatgtggtcagaaaacaactagaatgggagcacacctggtgcccagattttggtttccaataaaaggaaccaggactccttagaaaatgaactgattctagaactgggatatgaactgtacaagatgagcctagagtatcttgtgccacagaaaaatgaagtactgaaatta

SEQ ID NO: 326539 - DNA, 815 bp, Homo sapiens
agacttcggctcggttcccgagacggaatacccaggagtcgagtacttgggcgcatgcggcaaccgtatctcagttctcgcgaggtttcgtcttcccggaagcgttggaggacattccctgttgactgcgtcgcgatgtgtggcgactgtgtggagaaggaatatcccaaccggggtaatacctgcctggagaatggatctttcttactgaactttacaggctgtgcagtgtgcagtaagcgggattttatgctgatcacaaacaaatccttgaaagaagaagatggagaagaaatagttacctatgatcgagtataccatgctgtgtctgttatgcggcaaagccgaagatactatcagtattctccctgatgacccccgacaaatgactctcttattctaaggatccttctacagatctgttataactatattgtgttggtttacaatacagcaagcctgatggtttgtcttatttcattcatactgaaaattctttgcatattttttttctgcttagacttacttattctttgaggaaaaaaggtaatgtaggagctcattgttctctagagctgagctcttctgctaaagttcaaagttcacatcagtgtagccagagtgaagcatctttgttagcagttatgtggtcagaaaacaactagaatgggagcacacctggtgcccagattttggtttccaataaaaggaaccaggactccttagaaaatgaactgattctagaactgggatatgaactgtacaagatgagcctagagtatcttgtgccacagaaaaatgaagtactgaaatta

SEQ ID NO: 326540 - DNA, 810 bp, Homo sapiens
agacttcggctcggttcccgagacggaatacccaggagtcgagtacttgggcgcatgcggcaaccgtatctcagttctcgcgaggtttcgtcttcccggaagcgttggaggacattccctgttgactgcgtcgcgatgtgtggcgactgtgtggagaaggaatatcccaaccggggtaatacctgcctggagaatggatctttcttactgaactttacaggctgtgcagtgtgcagtaagcgggattttatgctgatcacaaacaaatccttgaaagaagaagatggagaagaaatagttacctatgatcatttgtgtaagaattgtcatcatgtaatagccagacatgagtatacattcagtatcatggatgaatttcaggagtataccatgctgtgtctgttatgcggcaaagccgaagatactatcagtattctccctgatgacccccgacaaatgactctcttattctaaggatccttctacagatctgttataactatattgtgttggtttacaatacagcaagcctgatggtttgtcttatttcattcataccccactctcctgatactccccttccgcccacccctacccacccctctccgccccctcgccacgccccccgcctggcctcccccagcctccctcctctgcgtccgccccccccgcctccattcacgctctcctaccctccctctcctcctcccacctccgccccccgctcctccctctcgccccccccggcgcctcctccttcccccttcccccccccccctcctcgccccttccccaccctctcccgctccc

SEQ ID NO: 326541 - DNA, 516 bp, Homo sapiens
agacttcggctcggttcccgagacggaatacccaggagtcgagtacttgggcgcatgcggcaaccgtatctcagttctcgcgaggtttcgtcttcccggaagcgttggaggacattccctgttgactgcgtcgcgatgtgtggcgactgtgtggagaaggaatatcccaaccggggtaatacctgcctggagaatggatctttcttactgaactttacaggctgtgcagtgtgcagtaagcgggattttatgctgatcacaaacaaatccttgaaagaagaagatggagaagaaatagttacctatgatcgagtataccatgctgtgtctgttatgcggcaaagccgaagatactatcagtattctccctgatgacccccgacaaatgactctcttattctaaggatccttctacagatctgttataactatattgtgttggtttacaatacagcaagcctgatggtttgtcttatttcattcataaaaaaaaaaaagtcgacgcgggccgcgaat

SEQ ID NO: 326542 - DNA, 678 bp, Homo sapiens
agacttcggctcggttcccgagacggaatacccaggagtcgagtacttgggcgcatgcggcaaccgtatctcagttctcgcgaggtttcgtcttcccggaagcgttggaggacattccctgttgactgcgtcgcgatgtgtggcgactgtgtggagaaggaatatcccaaccggggtaatacctgcctggagaatggatctttcttactgaactttacaggctgtgcagtgtgcagtaagcgggattttatgctgatcacaaacaaatccttgaaagaagaagatggagaagaaatagttacctatgatcatttgtgtaagaattgtcatcatgtaatagccagacatgagtatacattcagtatcatggatgaatttcaggttgccatccaaatagcaatgcctggtgggttgaagcagtggaagtatttgagaacagtaaaagaccttgaagaggatgtatttttattttatttttaattcataaagccatctttccactgccacaactaagctcccctcctgaactcaccagtagaagatggaaaaggcagttgcctgcttctatttctttgtaccacagtcattgtttacctctgtggccctctctagtgactgtctaaacctaagaaacacaaactgccttgactgatcaatttccagacagctagcaaactt

SEQ ID NO: 326543 - DNA, 395 bp, Homo sapiens
caatggctagattggttgaaaactcaagtatttgtttagcctcacacattttctctttttgactctttacttttttccttcttcttttcctgtaaaaggttgccatccaaatagcaatgcctggtgggttgaagcagtggaagtatttgagaacagtaaaagaccttgaagaggatgtatttttattttatttttaattcataaagccatctttccactgccacaactaagctcccctcctgaactcaccagtagaagatggaaaaggcagttgcctgcttctatttctttgtaccacagtcattgtttacctctgtggccctctctagtgactgtctaaacctaagaaacacaaactgccttgactgatcaatttccagacagctagcaaactt

SEQ ID NO: 326544 - DNA, 3617 bp, Homo sapiens
agacttcggctcggttcccgagacggaatacccaggagtcgagtacttgggcgcatgcggcaaccgtatctcagttctcgcgaggtttcgtcttcccggaagcgttggaggacattccctgttgactgcgtcgcgatgtgtggcgactgtgtggagaaggaatatcccaaccggggtaatacctgcctggagaatggatctttcttactgaactttacaggctgtgcagtgtgcagtaagcgggattttatgctgatcacaaacaaatccttgaaagaagaagatggagaagaaatagttacctatgatcatttgtgtaagaattgtcatcatgtaatagccagacatgagtatacattcagtatcatggatgaatttcaggagtataccatgctgtgtctgttatgcggcaaagccgaagatactatcagtattctccctgatgacccccgacaaatgactctcttattctaaggatccttctacagatctgttataactatattgtgttggtttacaatacagcaagcctgatggtttgtcttatttcattcatactgaaaattctttgcatattttttttctgcttagacttacttattctttgaggaaaaaaggtaatgtaggagctcattgttctctagagctgagctcttctgctaaagttcaaagttcacatcagtgtagccagagtgaagcatctttgttagcagttatgtggtcagaaaacaactagaatgggagcacacctggtgcccagattttggtttccaataaaaggaaccaggactccttagaaaatgaactgattctagaactgggatatgaactgtacaagatgagcctagagtatcttgtgccacagaaaaatgaagtactgaaattaaaaaaaaaaaaatcatagtgattgggagtatgtcagcatgatcgaactgaaggatctctgaaaggccacagctggagcaatttgagtaacaaaataaagtagtattgggttataacccaaactatataataaatatttacaagcccaaactaatataaatgattgaatgggaacaaatctcttgtgcagaagaatttcaaataatttatgtagatactccccacttagtgggctctgcatagtgacttccttgcagagtataatatggaaaggggggaaaagagtaactttacagtggagaaatctgacagacaccagctcagccaggtgattgaggttaacatcatccatgataagcccttttgatagcatgtatccttgatagcatcacatcatacagaatgtgataagaatggcactttacctctgtggtcctcctccccagaactcagaacccaagtctgatcaggagaaaaacatcacacaaattccaattgagaagcattctttaaaatacctaaccagtacttctcaaaactatcaaggccataaaaaacaaggaaaatctgagacatggtcacagccaagaggagcctgagaagacatgactgctagatgtaatgtggtatcctacatggaattatataccacgaaaagaaaaaaaggtcatttggtagaaactagggaaatctgaatacagtgtggactttagttaatataaatgagaaaatggtttcattggctttaaagggattttagaatatcttactttgcatagtttcatgagcactggccaggaggttataaactggcatttaggcctctctgccatttagtagcagtatagtcattaagcaaagcattactctggactttattgtcctgtttctatcaaattggactaataaaaattgatataatacattcatcacagtattgttaggagatttaaatgaattagtgaatgtaagatactttagaaagcatgtaaagtactagaaacaatgaggtggcttcaattagtgctcattctgagacctaaatttaaagggtcaggcattagaaacaaaagtgtttcttcatatctaggagatttggaaattctgaactaaggtcttataagaacaagaaatgagcaaagtgttcattgtagatactagggaaaagctttgttgaataacagtaatgatgataatatctgagctttattaagtacttactacatgctaagagctttttaagcacttatttaatcctcattaacaaattcataaggtaggtgctattgatagtttagccataaccagatatggcttgttatttgtaagttatcatgaaaaggtttatattcactattctttatttcagtgtagcacttttagagccaaaaaaactcaggcacaaagaagttaaataacttgccgggtgcggtggctcacccctgtaatcccagcactttgggaggccaaagcaggcggatcacctgaggtcaggagtttgagaccagccgggccaacatggtgcaacctcgtctttactaaaaatacaaaaacaaaaattagccaggggtggtggtatgcacctgcagtcccagcaacatgggaggctgaacaggagaatcgcttgaacccgcgacagggaggttgtgatgagccaaggtcatgccactgcactccagcctgggagacagagcaagactccatctcaaaaacaaaaacaaaacaaaacaacaacaaaaaaagaagttaaataacttgtttaagatcacacagctagtgcagttaccccctctcagtaattatgtttggcaaatatgaaatacaaggatctggcaaggttaggaagaggttaagaatatcagtgacagtactctgaggcatctgggcatgtcagatgaagatttattattcagaaaagttaagtcagctgttgcagggatcagttgttttattcctggaaaatgtttttcattttgctgcaaatctatatctgacctgctgaggaaatcgtttggtgaaatgaatccagaaagcagagaaaatgcttcattactttaaatagcagcattaagcccattatagcctctgaattgtcccttccttgagtttgctaatgcttccaacttagtcatttgaagcccaagagtctaattttatatgccctgccaatgtcctcatctattgcagaatgtataattatctatttgttttggactatatgttacaaaaatttaaaacataagatcctctctctatatttcattattggtgaacccacattgtgctgtgttttgtgatattttatcattttctagattcttatgtggatctaataacgaccacttgaacccagtttcacagaatccttatttttctgttcaaattaggaattagggacatggatgaaattggaaatcttcattctcagtaaactatcgcaaggacaaaaaaccaaacaccacatgttctcactcatagataggaattgaacaatgagaacacatggagacaggaaggggaacatcacactctagggactgttgtggggtgaggggaggggtgagggatagcattaggagatatacctgatgctaaatgacgagttagtgggtgcagcacaccagcatggcacatgtatacgtatgtaactaacctgcacatcgtgcacatgtaccctaaaacttaaagtataataataataaaataaaaaaaaaaggaattaggcaaaacat

SEQ ID NO: 326545 - DNA, 3562 bp, Homo sapiens
agacttcggctcggttcccgagacggaatacccaggagtcgagtacttgggcgcatgcggcaaccgtatctcagttctcgcgaggtttcgtcttcccggaagcgttggaggacattccctgttgactgcgtcgcgatgtgtggcgactgtgtggagaaggaatatcccaaccggggtaatacctgcctggagaatggatctttcttactgaactttacaggctgtgcagtgtgcagtaagcgggattttatgctgatcacaaacaaatccttgaaagaagaagatggagaagaaatagttacctatgatcatttgtgtaagaattgtcatcatgtaatagccagacatgagtatacattcagtatcatggatgaatttcaggagtataccatgctgtgtctgttatgcggcaaagccgaagatactatcagtattctccctgatgacccccgacaaatgactctcttattctaaggatccttctacagatctgttataactatattgtgttggtttacaatacagcaagcctgatggtttgtcttatttcattcatactgaaaattctttgcatattttttttctgcttagacttacttattctttgaggaaaaaagttcacatcagtgtagccagagtgaagcatctttgttagcagttatgtggtcagaaaacaactagaatgggagcacacctggtgcccagattttggtttccaataaaaggaaccaggactccttagaaaatgaactgattctagaactgggatatgaactgtacaagatgagcctagagtatcttgtgccacagaaaaatgaagtactgaaattaaaaaaaaaaaaatcatagtgattgggagtatgtcagcatgatcgaactgaaggatctctgaaaggccacagctggagcaatttgagtaacaaaataaagtagtattgggttataacccaaactatataataaatatttacaagcccaaactaatataaatgattgaatgggaacaaatctcttgtgcagaagaatttcaaataatttatgtagatactccccacttagtgggctctgcatagtgacttccttgcagagtataatatggaaaggggggaaaagagtaactttacagtggagaaatctgacagacaccagctcagccaggtgattgaggttaacatcatccatgataagcccttttgatagcatgtatccttgatagcatcacatcatacagaatgtgataagaatggcactttacctctgtggtcctcctccccagaactcagaacccaagtctgatcaggagaaaaacatcacacaaattccaattgagaagcattctttaaaatacctaaccagtacttctcaaaactatcaaggccataaaaaacaaggaaaatctgagacatggtcacagccaagaggagcctgagaagacatgactgctagatgtaatgtggtatcctacatggaattatataccacgaaaagaaaaaaaggtcatttggtagaaactagggaaatctgaatacagtgtggactttagttaatataaatgagaaaatggtttcattggctttaaagggattttagaatatcttactttgcatagtttcatgagcactggccaggaggttataaactggcatttaggcctctctgccatttagtagcagtatagtcattaagcaaagcattactctggactttattgtcctgtttctatcaaattggactaataaaaattgatataatacattcatcacagtattgttaggagatttaaatgaattagtgaatgtaagatactttagaaagcatgtaaagtactagaaacaatgaggtggcttcaattagtgctcattctgagacctaaatttaaagggtcaggcattagaaacaaaagtgtttcttcatatctaggagatttggaaattctgaactaaggtcttataagaacaagaaatgagcaaagtgttcattgtagatactagggaaaagctttgttgaataacagtaatgatgataatatctgagctttattaagtacttactacatgctaagagctttttaagcacttatttaatcctcattaacaaattcataaggtaggtgctattgatagtttagccataaccagatatggcttgttatttgtaagttatcatgaaaaggtttatattcactattctttatttcagtgtagcacttttagagccaaaaaaactcaggcacaaagaagttaaataacttgccgggtgcggtggctcacccctgtaatcccagcactttgggaggccaaagcaggcggatcacctgaggtcaggagtttgagaccagccgggccaacatggtgcaacctcgtctttactaaaaatacaaaaacaaaaattagccaggggtggtggtatgcacctgcagtcccagcaacatgggaggctgaacaggagaatcgcttgaacccgcgacagggaggttgtgatgagccaaggtcatgccactgcactccagcctgggagacagagcaagactccatctcaaaaacaaaaacaaaacaaaacaacaacaaaaaaagaagttaaataacttgtttaagatcacacagctagtgcagttaccccctctcagtaattatgtttggcaaatatgaaatacaaggatctggcaaggttaggaagaggttaagaatatcagtgacagtactctgaggcatctgggcatgtcagatgaagatttattattcagaaaagttaagtcagctgttgcagggatcagttgttttattcctggaaaatgtttttcattttgctgcaaatctatatctgacctgctgaggaaatcgtttggtgaaatgaatccagaaagcagagaaaatgcttcattactttaaatagcagcattaagcccattatagcctctgaattgtcccttccttgagtttgctaatgcttccaacttagtcatttgaagcccaagagtctaattttatatgccctgccaatgtcctcatctattgcagaatgtataattatctatttgttttggactatatgttacaaaaatttaaaacataagatcctctctctatatttcattattggtgaacccacattgtgctgtgttttgtgatattttatcattttctagattcttatgtggatctaataacgaccacttgaacccagtttcacagaatccttatttttctgttcaaattaggaattagggacatggatgaaattggaaatcttcattctcagtaaactatcgcaaggacaaaaaaccaaacaccacatgttctcactcatagataggaattgaacaatgagaacacatggagacaggaaggggaacatcacactctagggactgttgtggggtgaggggaggggtgagggatagcattaggagatatacctgatgctaaatgacgagttagtgggtgcagcacaccagcatggcacatgtatacgtatgtaactaacctgcacatcgtgcacatgtaccctaaaacttaaagtataataataataaaataaaaaaaaaaggaattaggcaaaacat

SEQ ID NO: 326546 - DNA, 3529 bp, Homo sapiens
accaattgtgactcttctatatctaccggcctgttgactgcgtcgcgatgtgtggcgactgtgtggagaaggaatatcccaaccggggtaatacctgcctggagaatggatctttcttactgaactttacaggctgtgcagtgtgcagtaagcgggattttatgctgatcacaaacaaatccttgaaagaagaagatggagaagaaatagttacctatgatcatttgtgtaagaattgtcatcatgtaatagccagacatgagtatacattcagtatcatggatgaatttcaggagtataccatgctgtgtctgttatgcggcaaagccgaagatactatcagtattctccctgatgacccccgacaaatgactctcttattctaaggatccttctacagatctgttataactatattgtgttggtttacaatacagcaagcctgatggtttgtcttatttcattcatactgaaaattctttgcatattttttttctgcttagacttacttattctttgaggaaaaaaggtaatgtaggagctcattgttctctagagctgagctcttctgctaaagttcaaagttcacatcagtgtagccagagtgaagcatctttgttagcagttatgtggtcagaaaacaactagaatgggagcacacctggtgcccagattttggtttccaataaaaggaaccaggactccttagaaaatgaactgattctagaactgggatatgaactgtacaagatgagcctagagtatcttgtgccacagaaaaatgaagtactgaaattaaaaaaaaaaaaatcatagtgattgggagtatgtcagcatgatcgaactgaaggatctctgaaaggccacagctggagcaatttgagtaacaaaataaagtagtattgggttataacccaaactatataataaatatttacaagcccaaactaatataaatgattgaatgggaacaaatctcttgtgcagaagaatttcaaataatttatgtagatactccccacttagtgggctctgcatagtgacttccttgcagagtataatatggaaaggggggaaaagagtaactttacagtggagaaatctgacagacaccagctcagccaggtgattgaggttaacatcatccatgataagcccttttgatagcatgtatccttgatagcatcacatcatacagaatgtgataagaatggcactttacctctgtggtcctcctccccagaactcagaacccaagtctgatcaggagaaaaacatcacacaaattccaattgagaagcattctttaaaatacctaaccagtacttctcaaaactatcaaggccataaaaaacaaggaaaatctgagacatggtcacagccaagaggagcctgagaagacatgactgctagatgtaatgtggtatcctacatggaattatataccacgaaaagaaaaaaaggtcatttggtagaaactagggaaatctgaatacagtgtggactttagttaatataaatgagaaaatggtttcattggctttaaagggattttagaatatcttactttgcatagtttcatgagcactggccaggaggttataaactggcatttaggcctctctgccatttagtagcagtatagtcattaagcaaagcattactctggactttattgtcctgtttctatcaaattggactaataaaaattgatataatacattcatcacagtattgttaggagatttaaatgaattagtgaatgtaagatactttagaaagcatgtaaagtactagaaacaatgaggtggcttcaattagtgctcattctgagacctaaatttaaagggtcaggcattagaaacaaaagtgtttcttcatatctaggagatttggaaattctgaactaaggtcttataagaacaagaaatgagcaaagtgttcattgtagatactagggaaaagctttgttgaataacagtaatgatgataatatctgagctttattaagtacttactacatgctaagagctttttaagcacttatttaatcctcattaacaaattcataaggtaggtgctattgatagtttagccataaccagatatggcttgttatttgtaagttatcatgaaaaggtttatattcactattctttatttcagtgtagcacttttagagccaaaaaaactcaggcacaaagaagttaaataacttgccgggtgcggtggctcacccctgtaatcccagcactttgggaggccaaagcaggcggatcacctgaggtcaggagtttgagaccagccgggccaacatggtgcaacctcgtctttactaaaaatacaaaaacaaaaattagccaggggtggtggtatgcacctgcagtcccagcaacatgggaggctgaacaggagaatcgcttgaacccgcgacagggaggttgtgatgagccaaggtcatgccactgcactccagcctgggagacagagcaagactccatctcaaaaacaaaaacaaaacaaaacaacaacaaaaaaagaagttaaataacttgtttaagatcacacagctagtgcagttaccccctctcagtaattatgtttggcaaatatgaaatacaaggatctggcaaggttaggaagaggttaagaatatcagtgacagtactctgaggcatctgggcatgtcagatgaagatttattattcagaaaagttaagtcagctgttgcagggatcagttgttttattcctggaaaatgtttttcattttgctgcaaatctatatctgacctgctgaggaaatcgtttggtgaaatgaatccagaaagcagagaaaatgcttcattactttaaatagcagcattaagcccattatagcctctgaattgtcccttccttgagtttgctaatgcttccaacttagtcatttgaagcccaagagtctaattttatatgccctgccaatgtcctcatctattgcagaatgtataattatctatttgttttggactatatgttacaaaaatttaaaacataagatcctctctctatatttcattattggtgaacccacattgtgctgtgttttgtgatattttatcattttctagattcttatgtggatctaataacgaccacttgaacccagtttcacagaatccttatttttctgttcaaattaggaattagggacatggatgaaattggaaatcttcattctcagtaaactatcgcaaggacaaaaaaccaaacaccacatgttctcactcatagataggaattgaacaatgagaacacatggagacaggaaggggaacatcacactctagggactgttgtggggtgaggggaggggtgagggatagcattaggagatatacctgatgctaaatgacgagttagtgggtgcagcacaccagcatggcacatgtatacgtatgtaactaacctgcacatcgtgcacatgtaccctaaaacttaaagtataataataataaaataaaaaaaaaaggaattaggcaaaacat

SEQ ID NO: 326547 - DNA, 3546 bp, Homo sapiens
agacttcggctcggttcccgagacggaatacccaggagtcgagtacttgggcgcatgcggcaaccgtatctcagttctcgcgaggtttcgtcttcccggaagcgttggaggacattccctgttgactgcgtcgcgatgtgtggcgactgtgtggagaaggaatatcccaaccggggtaatacctgcctggagaatggatctttcttactgaactttacaggctgtgcagtgtgcagtaagcgggattttatgctgatcacaaacaaatccttgaaagaagaagatggagaagaaatagttacctatgatcgagtataccatgctgtgtctgttatgcggcaaagccgaagatactatcagtattctccctgatgacccccgacaaatgactctcttattctaaggatccttctacagatctgttataactatattgtgttggtttacaatacagcaagcctgatggtttgtcttatttcattcatactgaaaattctttgcatattttttttctgcttagacttacttattctttgaggaaaaaaggtaatgtaggagctcattgttctctagagctgagctcttctgctaaagttcaaagttcacatcagtgtagccagagtgaagcatctttgttagcagttatgtggtcagaaaacaactagaatgggagcacacctggtgcccagattttggtttccaataaaaggaaccaggactccttagaaaatgaactgattctagaactgggatatgaactgtacaagatgagcctagagtatcttgtgccacagaaaaatgaagtactgaaattaaaaaaaaaaaaatcatagtgattgggagtatgtcagcatgatcgaactgaaggatctctgaaaggccacagctggagcaatttgagtaacaaaataaagtagtattgggttataacccaaactatataataaatatttacaagcccaaactaatataaatgattgaatgggaacaaatctcttgtgcagaagaatttcaaataatttatgtagatactccccacttagtgggctctgcatagtgacttccttgcagagtataatatggaaaggggggaaaagagtaactttacagtggagaaatctgacagacaccagctcagccaggtgattgaggttaacatcatccatgataagcccttttgatagcatgtatccttgatagcatcacatcatacagaatgtgataagaatggcactttacctctgtggtcctcctccccagaactcagaacccaagtctgatcaggagaaaaacatcacacaaattccaattgagaagcattctttaaaatacctaaccagtacttctcaaaactatcaaggccataaaaaacaaggaaaatctgagacatggtcacagccaagaggagcctgagaagacatgactgctagatgtaatgtggtatcctacatggaattatataccacgaaaagaaaaaaaggtcatttggtagaaactagggaaatctgaatacagtgtggactttagttaatataaatgagaaaatggtttcattggctttaaagggattttagaatatcttactttgcatagtttcatgagcactggccaggaggttataaactggcatttaggcctctctgccatttagtagcagtatagtcattaagcaaagcattactctggactttattgtcctgtttctatcaaattggactaataaaaattgatataatacattcatcacagtattgttaggagatttaaatgaattagtgaatgtaagatactttagaaagcatgtaaagtactagaaacaatgaggtggcttcaattagtgctcattctgagacctaaatttaaagggtcaggcattagaaacaaaagtgtttcttcatatctaggagatttggaaattctgaactaaggtcttataagaacaagaaatgagcaaagtgttcattgtagatactagggaaaagctttgttgaataacagtaatgatgataatatctgagctttattaagtacttactacatgctaagagctttttaagcacttatttaatcctcattaacaaattcataaggtaggtgctattgatagtttagccataaccagatatggcttgttatttgtaagttatcatgaaaaggtttatattcactattctttatttcagtgtagcacttttagagccaaaaaaactcaggcacaaagaagttaaataacttgccgggtgcggtggctcacccctgtaatcccagcactttgggaggccaaagcaggcggatcacctgaggtcaggagtttgagaccagccgggccaacatggtgcaacctcgtctttactaaaaatacaaaaacaaaaattagccaggggtggtggtatgcacctgcagtcccagcaacatgggaggctgaacaggagaatcgcttgaacccgcgacagggaggttgtgatgagccaaggtcatgccactgcactccagcctgggagacagagcaagactccatctcaaaaacaaaaacaaaacaaaacaacaacaaaaaaagaagttaaataacttgtttaagatcacacagctagtgcagttaccccctctcagtaattatgtttggcaaatatgaaatacaaggatctggcaaggttaggaagaggttaagaatatcagtgacagtactctgaggcatctgggcatgtcagatgaagatttattattcagaaaagttaagtcagctgttgcagggatcagttgttttattcctggaaaatgtttttcattttgctgcaaatctatatctgacctgctgaggaaatcgtttggtgaaatgaatccagaaagcagagaaaatgcttcattactttaaatagcagcattaagcccattatagcctctgaattgtcccttccttgagtttgctaatgcttccaacttagtcatttgaagcccaagagtctaattttatatgccctgccaatgtcctcatctattgcagaatgtataattatctatttgttttggactatatgttacaaaaatttaaaacataagatcctctctctatatttcattattggtgaacccacattgtgctgtgttttgtgatattttatcattttctagattcttatgtggatctaataacgaccacttgaacccagtttcacagaatccttatttttctgttcaaattaggaattagggacatggatgaaattggaaatcttcattctcagtaaactatcgcaaggacaaaaaaccaaacaccacatgttctcactcatagataggaattgaacaatgagaacacatggagacaggaaggggaacatcacactctagggactgttgtggggtgaggggaggggtgagggatagcattaggagatatacctgatgctaaatgacgagttagtgggtgcagcacaccagcatggcacatgtatacgtatgtaactaacctgcacatcgtgcacatgtaccctaaaacttaaagtataataataataaaataaaaaaaaaaggaattaggcaaaacat

SEQ ID NO: 326548 - DNA, 601 bp, Homo sapiens
  misc_feature (572)..(572): n is a, c, g, or t
accaattgtgactcttctatatctaccggcctgttgactgcgtcgcgatgtgtggcgactgtgtggagaaggaatatcccaaccggggtaatacctgcctggagaatggatctttcttactgaactttacaggctgtgcagtgtgcagtaagcgggattttatgctgatcacaaacaaatccttgaaagaagaagatggagaagaaatagttacctatgatcgagtataccatgctgtgtctgttatgcggcaaagccgaagatactatcagtattctccctgatgacccccgacaaatgactctcttattctaaggatccttctacagatctgttataactatattgtgttggtttacaatacagcaagcctgatggtttgtcttatttcattcataaaaaaaaaaaaaaaaaactcgagttttttttttttttttttgaccaaaggtatattaatatattgattctttgaaaatgagaattgagacatgggctaaaattaaatacatcaacaacaaaaatcttgtaaggagaagttaaaagcagttatttcaaggataagggatatttgnttcattttgaacctgatatacattacttt

SEQ ID NO: 326549 - DNA, 836 bp, Homo sapiens
accaattgtgactcttctatatctaccggcctgttgactgcgtcgcgatgtgtggcgactgtgtggagaaggaatatcccaaccggggtaatacctgcctggagaatggatctttcttactgaactttacaggctgtgcagtgtgcagtaagcgggattttatgctgatcacaaacaaatccttgaaagaagaagatggagaagaaatagttacctatgatcgacaaaatcaaagggacccttaggaggagagtgtgtcattttctaggggaaaaaagaagttttcagtgcctcagctcttgccaggctgaagagacaaagttgtgtttatcttgaaaagtctttcagtgcgtggtgccacttgtcctggagaacacaccagcctctgcccctgcactgtaccatctcctatattatatcccccacctccacctcatcccccagcccccaagtcatgaggctcagtcgttgctgggagaatggtgaagaggagtcacagaacaggtggataaacttagtggatgaactgcacctaccttcctctcagacagagatttggtccccaagacttttcagagcgggtttgtgctggtcaccttcccacagaaggaagtgtgtggaggaagttgaagctgctgtggttccagacgcaggcaggtcacccctgatgctttcaacaagaggcgtgcagtgcatcgcaggacatctgctaagggccatctcagaggcccacccctggaagccacagaaaccgaaaagacccaagcacccgccaactcaacaagttactcttttaaaaatgccttgatttcttcatcagtaaaactagcaatggg

SEQ ID NO: 326550 - DNA, 1050 bp, Homo sapiens
accaattgtgactcttctatatctaccggcctgttgactgcgtcgcgatgtgtggcgactgtgtggagaaggaatatcccaaccggggtaatacctgcctggagaatggatctttcttactgaactttacaggctgtgcagtgtgcagtaagcgggattttatgctgatcacaaacaaatccttgaaagaagaagatggagaagaaatagttacctatgatcgtaagtagactttattttttaacctgagtgtgttagcaggtgtcagcttttggaagtcgatatgttacacaaaatattctgaggcctatttcaatattgtattgcgcacataattactagttaggtctttaagaggaaaatgtcattaacacctcatttatctgggatatcaaatagtctatgtaaatgacttttgcagataactaaagcttacgattcaggaactgaattttttttgtttatcaaattatttttcacggacatatttttaacttagggtcatccatgtgagttttcacttttctgctacagtataataccatgatatcctccaacagctattaaagtgtttagggctgcttgtccctatactaaatgacttcaggaatgcagtgtttttttcagtcttgtttctgctcagaatgtctagctttttttttcttctccaatctcactgtcagtctgttgttccttacttttgctgctaaataataagctgccttcctatccttcttctcgtcctcaatactgggaaaccaaataaactatgtataaaaaaatcaattctgaggttagcactaaggatttctgtaagttaagtatatgtatacttcagtgcccaatattgtgagaagtatttaactgttcacattccctttttgcttgtctcctggttcttgggtaccttctaaacacatgaggaataaatgtacaggtaatggtattttgtcagaggagtttgaaagacagcaggcctttagaatggagtcagataataataaatgttctaagctagaagaatctttttctttctttttagcatatgtt

SEQ ID NO: 326551 - DNA, 812 bp, Homo sapiens
agacttcggctcggttcccgagacggaatacccaggagtcgagtacttgggcgcatgcggcaaccgtatctcagttctcgcgaggtttcgtcttcccggaagcgttggaggacattccctgttgactgcgtcgcgatgtgtggcgactgtgtggagaaggaatatcccaaccggggtaatacctgcctggagaatggatctttcttactgaactttacaggctgtgcagtgtgcagtaagcgggattttatgctgatcacaaacaaatccttgaaagaagaagatggagaagaaatagttacctatgatcatttgtgtaagaattgtcatcatgtaatagccagacatgagtatacattcagtatcatggatgaatttcaggagtataccatgctgtgtctgttatgcggcaaagccgaagatactatcagtattctccctgatgacccccgacaaatgactctcttattctaaggatccttctacagatctgttataactatattgtgttggtttacaatacagcaagcctgatggtttgtcttatttcattcataaaaaaaaaaaaaaaaacaaaaaaaaaaaactttttgggcgcgccttgggcccctgaaaaaaagagttttttctaaacccactttcgcttgggggcccgcgcgggggccccccagtgagttatatgtgaacccgtggggccaaaaccgtgttcccggaggaagacaccggggtccaggaaccatcggtgtggggttttttctccccattttaaaaaagcgccggggggcagcccgcgcggtttgtgatccatttcg

SEQ ID NO: 326552 - DNA, 780 bp, Homo sapiens
agacttcggctcggttcccgagacggaatacccaggagtcgagtacttgggcgcatgcggcaaccgtatctcagttctcgcgaggtttcgtcttcccggaagcgttggaggacattccctgttgactgcgtcgcgatgtgtggcgactgtgtggagaaggaatatcccaaccggggtaatacctgcctggagaatggatctttcttactgaactttacaggctgtgcagtgtgcagtaagcgggattttatgctgatcacaaacaaatccttgaaagaagaagatggagaagaaatagttacctatgatcatttgtgtaagaattgtcatcatgtaatagccagacatgagtatacattcagtatcatggatgaatttcaggagtataccatgctgtgtctgttatgcggcaaagccgaagatactatcagtattctccctgatgacccccgacaaatgactctcttattctaaggatccttctacagatctgttataactatattgtgttggtttacaatacagcaagcctgatggtttgtcttatttcattcataaaaaaaaaaaaaaaaaaaaaaaaaaaaaaaaaacaaaaaaaaaaaaaaaaaaaaaaaaaccacacacacaacaaaatggaacggaaaaaacaaacaccccaaaaaaaaaaaaaaattttgggccctttgggccaaatgctttttacatttaaaacactttttttcttggggcccaattttgggctcctttggggcaattggcccttatattggggccgttttt

SEQ ID NO: 326553 - DNA, 1192 bp, Homo sapiens
agacttcggctcggttcccgagacggaatacccaggagtcgagtacttgggcgcatgcggcaaccgtatctcagttctcgcgaggtttcgtcttcccggaagcgttggaggacattccctgttgactgcgtcgcgatgtgtggcgactgtgtggagaaggaatatcccaaccggggtaatacctgcctggagaatggatctttcttactgaactttacaggctgtgcagtgtgcagtaagcgggattttatgctgatcacaaacaaatccttgaaagaagaagatggagaagaaatagttacctatgatcgtaagtagactttattttttaacctgagtgtgttagcaggtgtcagcttttggaagtcgatatgttacacaaaatattctgaggcctatttcaatattgtattgcgcacataattactagttaggtctttaagaggaaaatgtcattaacacctcatttatctgggatatcaaatagtctatgtaaatgacttttgcagataactaaagcttacgattcaggaactgaattttttttgtttatcaaattatttttcacggacatatttttaaaagctttatgctgccttaacaagatatactttttattattgttattattgtgaccttagggtcatccatgtgagttttcacttttctgctacagtataataccatgatatcctccaacagctattaaagtgtttagggctgcttgtccctatactaaatgacttcaggaatgcagtgtttttttcagtcttgtttctgctcagaatgtctagctttttttttcttctccaatctcactgtcagtctgttgttccttacttttgctgctaaataataagctgccttcctatccttcttctcgtcctcaatactgggaaaccaaataaactatgtataaaaaaatcaattctgaggttagcactaaggatttctgtaagttaagtatatgtatacttcagtgcccaatattgtgagaagtatttaactgttcacattccctttttgcttgtctcctggttcttgggtaccttctaaacacatgaggaataaatgtacaggtaatggtattttgtcagaggagtttgaaagacagcaggcctttagaatggagtcagataataataaatgttctaagctagaagaatctttttctttctttttagcatatgtt

SEQ ID NO: 326554 - DNA, 3446 bp, Homo sapiens
agacttcggctcggttcccgagacggaatacccaggagtcgagtacttgggcgcatgcggcaaccgtatctcagttctcgcgaggtttcgtcttcccggaagcgttggaggacattccctgttgactgcgtcgcgatgtgtggcgactgtgtggagaaggaatatcccaaccggggtaatacctgcctggagaatggatctttcttactgaactttacaggctgtgcagtgtgcagtaagcgggattttatgctgatcacaaacaaatccttgaaagaagaagatggagaagaaatagttacctatgatcatttgtgtaagaattgtcatcatgtaatagccagacatgagtatacattcagtatcatggatgaatttcaggagtataccatgctgtgtctgttatgcggcaaagccgaagatactatcagtattctccctgatgacccccgacaaatgactctcttattctaaggatccttctacagatctgttataactatattgtgttggtttacaatacagcaagcctgatggtttgtcttatttcattcatactgaaaattctttgcatattttttttctgcttagacttacttattctttgaggaaaaaaggtaatgtaggagctcattgttctctagagctgagctcttctgctaaagttcaaagttcacatcagtgtagccagagtgaagcatctttgttagcagttatgtggtcagaaaacaactagaatgggagcacacctggtgcccagattttggtttccaataaaaggaaccaggactccttagaaaatgaactgattctagaactgggatatgaactgtacaagatgagcctagagtatcttgtgccacagaaaaatgaagtactgaaattaaaaaaaaaaaaatcatagtgattgggagtatgtcagcatgatcgaactgaaggatctctgaaaggccacagctggagcaatttgagtaacaaaataaagtagtattgggttataacccaaactatataataaatatttacaagcccaaactaatataaatgattgaatgggaacaaatctcttgtgcagaagaatttcaaataatttatgtagatactccccacttagtgggctctgcatagtgacttccttgcagagtataatatggaaaggggggaaaagagtaactttacagtggagaaatctgacagacaccagctcagccaggtgattgaggttaacatcatccatgataagcccttttgatagcatgtatccttgatagcatcacatcatacagaatgtgataagaatggcactttacctctgtggtcctcctccccagaactcagaacccaagtctgatcaggagaaaaacatcacacaaattccaattgagaagcattctttaaaatacctaaccagtacttctcaaaactatcaaggccataaaaaacaaggaaaatctgagacatggtcacagccaagaggagcctgagaagacatgactgctagatgtaatgtggtatcctacatggaattatataccacgaaaagaaaaaaaggtcatttggtagaaactagggaaatctgaatacagtgtggactttagttaatataaatgagaaaatggtttcattggctttaaagggattttagaatatcttactttgcatagtttcatgagcactggccaggaggttataaactggcatttaggcctctctgccatttagtagcagtatagtcattaagcaaagcattactctggactttattgtcctgtttctatcaaattggactaataaaaattgatataatacattcatcacagtattgttaggagatttaaatgaattagtgaatgtaagatactttagaaagcatgtaaagtactagaaacaatgaggtggcttcaattagtgctcattctgagacctaaatttaaagggtcaggcattagaaacaaaagtgtttcttcatatctaggagatttggaaattctgaactaaggtcttataagaacaagaaatgagcaaagtgttcattgtagatactagggaaaagctttgttgaataacagtaatgatgataatatctgagctttattaagtacttactacatgctaagagctttttaagcacttatttaatcctcattaacaaattcataaggtaggtgctattgatagtttagccataaccagatatggcttgttatttgtaagttatcatgaaaaggtttatattcactattctttatttcagtgtagcacttttagagccaaaaaaactcaggcacaaagaagttaaataacttgccgggtgcggtggctcacccctgtaatcccagcactttgggaggccaaagcaggcggatcacctgaggtcaggagtttgagaccagccgggccaacatggtgcaacctcgtctttactaaaaatacaaaaacaaaaattagccaggggtggtggtatgcacctgcagtcccagcaacatgggaggctgaacaggagaatcgcttgaacccgcgacagggaggttgtgatgagccaaggtcatgccactgcactccagcctgggagacagagcaagactccatctcaaaaacaaaaacaaaacaaaacaacaacaaaaaaagaagttaaataacttgtttaagatcacacagctagtgcagttaccccctctcagtaattatgtttggcaaatatgaaatacaaggatctggcaaggttaggaagaggttaagaatatcagtgacagtactctgaggcatctgggcatgtcagatgaagatttattattcagaaaagttaagtcagctgttgcagggatcagttgttttattcctggaaaatgtttttcattttgctgcaaatctatatctgacctgctgaggaaatcgtttggtgaaatgaatccagaaagcagagaaaatgcttcattactttaaatagcagcattaagcccattatagcctctgaattgtcccttccttgagtttgctaatgcttccaacttagtcatttgaagcccaagagtctaattttatatgccctgccaatgtcctcatctattgcagaatgtataattatctatttgttttggactatatgttacaaaaatttaaaacataagatcctctctctatatttcattattggtgaacccacattgtgctgtgttttgtgatattttatcattttctagattcttatgtggatctaataacgaccacttgaacccaaaagaaaaaacagaaagaaacaaagttgtgggcggccgggcccccaaaaagttttaaaacccttcggtgggcgggggccccgaggatatggactggccagcgggcccagggaaacccggccggccggtggggtctcccaaaaaaacgccggggaccggggttgacacacccagggtccggggccgggcatcacgggcaagggcgataag

SEQ ID NO: 326555 - DNA, 2448 bp, Homo sapiens
agacttcggctcggttcccgagacggaatacccaggagtcgagtacttgggcgcatgcggcaaccgtatctcagttctcgcgaggtttcgtcttcccggaagcgttggaggacattccctgttgactgcgtcgcgatgtgtggcgactgtgtggagaaggaatatcccaaccggggtaatacctgcctggagaatggatctttcttactgaactttacaggctgtgcagtgtgcagtaagcgggattttatgctgatcacaaacaaatccttgaaagaagaagatggagaagaaatagttacctatgatcatttgtgtaagaattgtcatcatgtaatagccagacatgagtatacattcagtatcatggatgaatttcaggagtataccatgctgtgtctgttatgcggcaaagccgaagatactatcagtattctccctgatgacccccgacaaatgactctcttattctaaggatccttctacagatctgttataactatattgtgttggtttacaatacagcaagcctgatggtttgtcttatttcattcatactgaaaattctttgcatattttttttctgcttagacttacttattctttgaggaaaaaaggtaatgtaggagctcattgttctctagagctgagctcttctgctaaagttcaaagttcacatcagtgtagccagagtgaagcatctttgttagcagttatgtggtcagaaaacaactagaatgggagcacacctggtgcccagattttggtttccaataaaaggaaccaggactccttagaaaatgaactgattctagaactgggatatgaactgtacaagatgagcctagagtatcttgtgccacagaaaaatgaagtactgaaattaaaaaaaaaaaaatcatagtgattgggagtatgtcagcatgatcgaactgaaggatctctgaaaggccacagctggagcaatttgagtaacaaaataaagtagtattgggttataacccaaactatataataaatatttacaagcccaaactaatataaatgattgaatgggaacaaatctcttgtgcagaagaatttcaaataatttatgtagatactccccacttagtgggctctgcatagtgacttccttgcagagtataatatggaaaggggggaaaagagtaatttgggaggccaaagcaggcggatcacctgaggtcaggagtttgagaccagccgggccaacatggtgcaacctcgtctttactaaaaatacaaaaacaaaaattagccaggggtggtggtatgcacctgcagtcccagcaacatgggaggctgaacaggagaatcgcttgaacccgcgacagggaggttgtgatgagccaaggtcatgccactgcactccagcctgggagacagagcaagactccatctcaaaaacaaaaacaaaacaaaacaacaacaaaaaaagaagttaaataacttgtttaagatcacacagctagtgcagttaccccctctcagtaattatgtttggcaaatatgaaatacaaggatctggcaaggttaggaagaggttaagaatatcagtgacagtactctgaggcatctgggcatgtcagatgaagatttattattcagaaaagttaagtcagctgttgcagggatcagttgttttattcctggaaaatgtttttcattttgctgcaaatctatatctgacctgctgaggaaatcgtttggtgaaatgaatccagaaagcagagaaaatgcttcattactttaaatagcagcattaagcccattatagcctctgaattgtcccttccttgagtttgctaatgcttccaacttagtcatttgaagcccaagagtctaattttatatgccctgccaatgtcctcatctattgcagaatgtataattatctatttgttttggactatatgttacaaaaatttaaaacataagatcctctctctatatttcattattggtgaacccacattgtgctgtgttttgtgatattttatcattttctagattcttatgtggatctaataacgaccacttgaacccagtttcacagaatccttatttttctgttcaaattaggaattagggacatggatgaaattggaaatcttcattctcagtaaactatcgcaaggacaaaaaaccaaacaccacatgttctcactcatagataggaattgaacaatgagaacacatggagacaggaaggggaacatcacactctagggactgttgtggggtgaggggaggggtgagggatagcattaggagatatacctgatgctaaatgacgagttagtgggtgcagcacaccagcatggcacatgtatacgtatgtaactaacctgcacatcgtgcacatgtaccctaaaacttaaagtataataataataaaataaaaaaaaaaggaattaggcaaaacat

SEQ ID NO: 326556 - DNA, 644 bp, Homo sapiens
  misc_feature (528)..(528): n is a, c, g, or t
agacttcggctcggttcccgagacggaatacccaggagtcgagtacttgggcgcatgcggcaaccgtatctcagttctcgcgaggtttcgtcttcccggaagcgttggaggacattccctgttgactgcgtcgcgatgtgtggcgactgtgtggagaaggaatatcccaaccggggtaatacctgcctggagaatggatctttcttactgaactttacaggctgtgcagtgtgcagtaagcgggattttatgctgatcacaaacaaatccttgaaagaagaagatggagaagaaatagttacctatgatcatttgtgtaagaattgtcatcatgtaatagccagacatgagtatacattcagtatcatggatgaatttcaggagtataccatgctgtgtctgttatgcggcaaagccgaagatactatcagtattctccctgatgacccccgacaaatgactctcttattctaaggatccttctacagatctgttataaccatctcaacgggccgccttccgctccgncttctcgtccttacgaattaccccccgcgtcgagcacactactatcccgagcccgccctacgctcccccgccacttcccaccctctcacccatcccccacaccctcgctccgcccg

SEQ ID NO: 326557 - DNA, 878 bp, Homo sapiens
tttagggagaagaaagcaacccttaaaatagaggaaaatgaagctgcttggattaccctgttgaagttcatctctgcctgtgccatgcatgaaaaaatactggcaaagtcttcacttacatgagtgttagactccatgttcccagtgggtctcggggttcagaactgagtgctctcatccaagcaataggagcgtcgacctcaggaaagcccaagtgttttgtgtgtattttgaggagtgggttatctgttgcactgagcctctctgtgtattttcttcttcttttcagccagaacaaggggaggtggacatggagagccaccggaatgccaacgcagagccagctgttcagcgtactcttttagagaaatagaagattgtcggcagaaacagcccaggcgttggcagcagggttagaacagctgcctgaggctcctccctgaaggacacctgcctgagagcagagatggaggccttctgttcacggcggattctttgttttaatcttgcgatgtgctttgcttgttgctgggcggatgatgtttactaacgatgaattttacatccaaagggggataggcacttggacccccattctccaaggcccgggggggcggtttcccatgggatgtgaaaggctggccattattaagtccctgtaactcaaatgtcaaccccaccgaggcacccccccgtcccccagaatcttggctgtttacaaatcacgtgtccatcgagcacgtctgaaacccctggtagccccgacttctttttaattaaaataaggtaagcccttcaatttgtttcttcaatatttctttcatttgtagggatatttgtttttcatatcagactaataaaaagaaattagaaaccaa

SEQ ID NO: 326558 - DNA, 1162 bp, Homo sapiens
cgggcttcgccccacccggcccgtggggggagtatctgtcctgccgccttcgcccacgccctgcactccgggaccgtccctgcgcgctctgggcgcaccatggcccgcggggctgcgctggcgctgctgctcttcggcctgctgggtgttctggtcgccgccccggatggtggtttcgatttatccgatgcccttcctgacaatgaaaacaagaaacccactgcaatccccaagaaacccagtgctggggatgactttgacttaggagatgctgttgttgatggagaaaatgacgacccacgaccaccgaacccacccaaaccgatgccaaatccaaaccccaaccaccctagttcctccggtagcttttcagatgctgaccttgcggatggcgtttcaggtggagaaggaaaaggaggcagtgatggtggaggcagccacaggaaagaaggggaagaggccgacgccccaggcgtgatccccgggattgtgggggctgtcgtggtcgccgtggctggagccatctctagcttcattgcttaccagaaaaagaagctatgcttcaaagaaaatgcagaacaaggggaggtggacatggagagccaccggaatgccaacgcagagccagctgttcagcgtactcttttagagaaatagaagattgtcggcagaaacagcccaggcgttggcagcagggttagaacagctgcctgaggctcctccctgaaggacacctgcctgagagcagagatggaggccttctgttcacggcggattctttgttttaatcttgcgatgtgctttgcttgttgctgggcggatgatgtttactaacgatgaattttacatccaaagggggataggcacttggacccccattctccaaggcccgggggggcggtttcccatgggatgtgaaaggctggccattattaagtccctgtaactcaaatgtcaaccccaccgaggcacccccccgtcccccagaatcttggctgtttacaaatcacgtgtccatcgagcacgtctgaaacccctggtagccccgacttctttttaattaaaataaggtaagcccttcaatttgtttcttcaatatttctttcatttgtagggatatttgtttttcatatcagactaataaaaagaaattagaaaccaa

SEQ ID NO: 326559 - DNA, 721 bp, Homo sapiens
caaaatgacgaacacaaagggaaagaggagaggcacccgatatatgttctctaggccttttagaaaacatggagttgttcctttggccacatatatgcgaatctataagaaaggtgatattgtagacatcaagcagaacaaggggaggtggacatggagagccaccggaatgccaacgcagagccagctgttcagcgtactcttttagagaaatagaagattgtcggcagaaacagcccaggcgttggcagcagggttagaacagctgcctgaggctcctccctgaaggacacctgcctgagagcagagatggaggccttctgttcacggcggattctttgttttaatcttgcgatgtgctttgcttgttgctgggcggatgatgtttactaacgatgaattttacatccaaagggggataggcacttggacccccattctccaaggcccgggggggcggtttcccatgggatgtgaaaggctggccattattaagtccctgtaactcaaatgtcaaccccaccgaggcacccccccgtcccccagaatcttggctgtttacaaatcacgtgtccatcgagcacgtctgaaacccctggtagccccgacttctttttaattaaaataaggtaagcccttcaatttgtttcttcaatatttctttcatttgtagggatatttgtttttcatatcagactaataaaaagaaattagaaaccaa

SEQ ID NO: 326560 - DNA, 1331 bp, Homo sapiens
  misc_feature (1331)..(1331): n is a, c, g, or t
tttagggagaagaaagcaacccttaaaatagaggaaaatgaagctgcttggattaccctgttgaagttcatctctgcctgtgccatgcatgaaaaaatactggcaaagtcttcacttacatgagtgttagactccatgttcccagtgggtctcggggttcagaactgagtgctctcatccaagcaataggagcgtcgacctcaggaaagcccaagtgttttgtgtgtattttgaggagtgggttatctgttgcactgagcctctctgtgtattttcttcttcttttcagccagaacaaggggaggtggacatggagagccaccggaatgccaacgcagagccagctgttcagcgtactcttttagagaaatagaagattgtcggcagaaacagcccaggcgttggcagcagggttagaacagctgcctgaggctcctccctgaaggacacctgcctgagagcagagatggaggccttctgttcacggcggattctttgttttaatcttgcgatgtgctttgcttgttgctgggcggatgatgtttactaacgatgaattttacatccaaagggggataggcacttggacccccattctccaaggcccgggggggcggtttcccatgggatgtgaaaggctggccattattaagtccctgtaactcaaatgtcaaccccaccgaggcacccccccgtcccccagaatcttggctgtttacaaatcacgtgtccatcgagcacgtctgaaacccctggtagccccgacttctttttaattaaaataaggtaagcccttcaatttgtttcttcaatatttctttcatttgtagggatatttgtttttcatatcagactaataaaaagaaattagaaaccaaaaaaaacaataaaaatcccacgaacacacacacaaaaccagggggggagcagccacagaaaaaccacggtggggggccaaagataccgcgacccatattctgtggacacagtggccacaaacagacacacaataaaacaacaagcgcacgcagtaaaaaagcacgaaggcaaaagggcagcggacactcggaggaggccccacccgggcggcaacacgcgcacaccaccaaaagaaacgctagagacataaaaaccacggcagcgggcaacccaccagaataaatccggtgcaaagatggccacgggcgctgttacaattgccagcgcaaaagagaacgaccaaaagacgagccaatacaagctcagcagctacataggtagcgagtactctagggcagccgcgacaccagaccaccatgaacttctctacgtaccgctcctgtggcgtcatn

SEQ ID NO: 326561 - DNA, 797 bp, Homo sapiens
tttagggagaagaaagcaacccttaaaatagaggaaaatgaagctgcttggattaccctgttgaagttcatctctgcctgtgccatgcatgaaaaaatactggcaaagtcttcacttacatgagtgttagactccatgttcccagtgggtctcggggttcagaactgagtgctctcatccaagcaataggagcgtcgacctcaggaaagcccaagtgttttgtgtgtattttgaggagtgggttatctgttgcactgagcctctctgtgtattttcttcttcttttcagccagaacaaggggaggtggacatggagagccaccggaatgccaacgcagagccagctgttcagcgtactcttttagagaaatagaagattgtcggcagaaacagcccaggcgttggcagcagggttagaacagctgcctgaggctcctccctgaaggacacctgcctgagagcagagatggaggccttctgttcacggcggattctttgttttaatcttgcgatgtgctttgcttgttgctgggcggatgatgtttactaacgatgaattttacatccaaagggggataggcacttggacccccattctccaaggcccgggggggcggtttcccatgggatgtgaaaggctggccattattaagtccctgtaactcaaatgtcaaccccaccgaggcacccccccgtcccccagaatcttggctgtttacaaatcacgtgtccatcgagcacgtctgaaacccctggtagccccgacttctttttaattaaaataaggtaagcccttc

SEQ ID NO: 326562 - DNA, 1254 bp, Homo sapiens
cgggcttcgccccacccggcccgtggggggagtatctgtcctgccgccttcgcccacgccctgcactccgggaccgtccctgcgcgctctgggcgcaccatggcccgcggggctgcgctggcgctgctgctcttcggcctgctgggtgttctggtcgccgccccggatggtggtttcgatttatccgatgcccttcctgacaatgaaaacaagaaacccactgcaatccccaagaaacccagtgctggggatgactttgacttaggagatgctgttgttgatggagaaaatgacgacccacgaccaccgaacccacccaaaccgatgccaaatccaaaccccaaccaccctagttcctccggtagcttttcagatgctgaccttgcggatggcgtttcaggtggagaaggaaaaggaggcagtgatggtggaggcagccacaggaaagaaggggaagaggccgacgccccaggcgtgatccccgggattgtgggggctgtcgtggtcgccgtggctggagccatctctagcttcattgcttaccagaaaaagaagctatgcttcaaagaaaatggtcagctggcaggctctttgggaccttgtattgggatccgccgtgaagctgatggctgaagacctaggggtgagcagagaacccagcccaggcctgcggagcgtcctgaccgtaatcgttttatctgctaagacatagccttaaagcaaacccttccatctgccgctcccctcgccctgctggcaaattcccaccacgatgggattctcaatcacatggcggattctctgccttcagttccatatgcttttgcctttctggatgcacagaagctcattatagcaaatcatatttctgcataagagcttcagaaaatgaagagaaatgcagatattttcttttaaacatgaatctaacagaaacagggcagtgacttccatgttttaatgagttttgtccctaagtccatccctgccaagggaacaaactggggcccagggtggccaccctcttccctgcagtgtcctaggttaagctcactcacgtcctaaggatttgaccttccaggtcatgcatggatttttaaatcttcaacgtttttggccgttgacttgcatttctcactgcacttcctatgaagcagttcttaactctttctgtgatcagtgttccaaacaggtacacaccttggttcctagaaaaacaaaattcatacgttgaggaatcacctaaacatctcc

SEQ ID NO: 326563 - DNA, 1234 bp, Homo sapiens
cgggcttcgccccacccggcccgtggggggagtatctgtcctgccgccttcgcccacgccctgcactccgggaccgtccctgcgcgctctgggcgcaccatggcccgcggggctgcgctggcgctgctgctcttcggcctgctgggtgttctggtcgccgccccggatggtggtttcgatttatccgatgcccttcctgacaatgaaaacaagaaacccactgcaatccccaagaaacccagtgctggggatgactttgacttaggagatgctgttgttgatggagaaaatgacgacccacgaccaccgaacccacccaaaccgatgccaaatccaaaccccaaccaccctagttcctccggtagcttttcagatgctgaccttgcggatggcgtttcaggtggagaaggaaaaggaggcagtgatggtggaggcagccacaggaaagaaggggaagaggccgacgccccaggcgtgatccccgggattgtgggggctgtcgtggtcgccgtggctggagccatctctagcttcattgcttaccagaaaaagaagctatgcttcaaagaaaatgcagaacaaggggaggtggacatggagagccaccggaatgccaacgcagagccagctgttcagcgtactcttttagagaaatagaagattgtcggcagaaacagcccaggcgttggcagcagggttagaacagctgcctgaggctcctccctgaaggacacctgcctgagagcagagatggaggccttctgttcacggcggattctttgttttaatcttgcgatgtgctttgcttgttgctgggcggatgatgtttactaacgatgaattttacatccaaagggggataggcacttggacccccattctccaaggcccgggggggcggtttcccatgggatgtgaaaggctggccattattaagtccctgtaactcaaatgtcaaccccaccgaggcacccccccgtcccccagaatcttggctgtttacaaatcacgtgtccatcgagcacgtctgaaacccctggtagccccgacttctttttaattaaaataaggtaagcccttcaatttgtttcttcaatatttctttcatttgtagggatatttgtttttcatatcagactaataaaaagaaattagaaaccaacaaaaaaaacgacagcacacaacaaaaacaaacaggagaacaaacgacaaagccgaccacacaccacactca

SEQ ID NO: 326564 - DNA, 747 bp, Homo sapiens
agctcggtacccaattacttgcgcacaggaaagaaggggaagaggccgacgccccaggcgtgatccccgggattgtgggggctgtcgtggtcgccgtggctggagccatctctagcttcattgcttaccagaaaaagaagctatgcttcaaagaaaatgcagaacaaggggaggtggacatggagagccaccggaatgccaacgcagagccagctgttcagcgtactcttttagagaaatagaagattgtcggcagaaacagcccaggcgttggcagcagggttagaacagctgcctgaggctcctccctgaaggacacctgcctgagagcagagatggaggccttctgttcacggcggattctttgttttaatcttgcgatgtgctttgcttgttgctgggcggatgatgtttactaacgatgaattttacatccaaagggggataggcacttggacccccattctccaaggcccgggggggcggtttcccatgggatgtgaaaggctggccattattaagtccctgtaactcaaatgtcaaccccaccgaggcacccccccgtcccccagaatcttggctgtttacaaatcacgtgtccatcgagcacgtctgaaacccctggtagccccgacttctttttaattaaaataaggtaagcccttcaatttgtttcttcaatatttctttcatttgtagggatatttgtttttcatatcagactaataaaaagaaattagaaaccaa

SEQ ID NO: 326565 - DNA, 619 bp, Homo sapiens
aagccatcgcatgattaaacaaagaatccgccagaacaaggggaggtggacatggagagccaccggaatgccaacgcagagccagctgttcagcgtactcttttagagaaatagaagattgtcggcagaaacagcccaggcgttggcagcagggttagaacagctgcctgaggctcctccctgaaggacacctgcctgagagcagagatggaggccttctgttcacggcggattctttgttttaatcttgcgatgtgctttgcttgttgctgggcggatgatgtttactaacgatgaattttacatccaaagggggataggcacttggacccccattctccaaggcccgggggggcggtttcccatgggatgtgaaaggctggccattattaagtccctgtaactcaaatgtcaaccccaccgaggcacccccccgtcccccagaatcttggctgtttacaaatcacgtgtccatcgagcacgtctgaaacccctggtagccccgacttctttttaattaaaataaggtaagcccttcaatttgtttcttcaatatttctttcatttgtagggatatttgtttttcatatcagactaataaaaagaaattagaaaccaa

SEQ ID NO: 326566 - DNA, 495 bp, Homo sapiens
gcggccgcctactactactaaattggcggccgtacgacgctgcctgaggctcctccctgaaggacacctgcctgagagcagagatggaggccttctgttcacggcggattctttgttttaatcttgcgatgtgctttgcttgttgctgggcggatgatgtttactaacgatgaattttacatccaaagggggataggcacttggacccccattctccaaggcccgggggggcggtttcccatgggatgtgaaaggctggccattattaagtccctgtaactcaaatgtcaaccccaccgaggcacccccccgtcccccagaatcttggctgtttacaaatcacgtgtccatcgagcacgtctgaaacccctggtagccccgacttctttttaattaaaataaggtaagcccttcaatttgtttcttcaatatttctttcatttgtagggatatttgtttttcatatcagactaataaaaagaaattagaaaccaa

SEQ ID NO: 326567 - DNA, 1081 bp, Homo sapiens
cgggcttcgccccacccggcccgtggggggagtatctgtcctgccgccttcgcccacgccctgcactccgggaccgtccctgcgcgctctgggcgcaccatggcccgcggggctgcgctggcgctgctgctcttcggcctgctgggtgttctggtcgccgccccggatggtggtttcgatttatccgatgcccttcctgacaatgaaaacaagaaacccactgcaatccccaagaaacccagtgctggggatgactttgacttaggagatgctgttgttgatggagaaaatgacgacccacgaccaccgaacccacccaaaccgatgccaaatccaaaccccaaccaccctagttcctccggtagcttttcagatgctgaccttgcggatggcgtttcaggtggagaaggaaaaggaggcagtgatggtggaggcagccacaggaaagaaggggaagaggccgacgccccaggcgtgatccccgggattgtgggggctgtcgtggtcgccgtggctggagccatctctagcttcattgcttaccagaaaaagaagctatgcttcaaagaaaatgcagaacaaggggaggtggacatggagagccaccggaatgccaacgcagagccagctgttcagcgtactcttttagagaaatagaagattgtcggcagaaacagcccaggcgttggcagcagggttagaacagctgcctgaggctcctccctgaaggacacctgcctgagagcagagatggaggccttctgttcacggcggattctttgttttaatcttgcgatgtgctttgcttgttgctgggcggatgatgtttactaacgatgaattttacatccaaagggggataggcacttggacccccattctccaaggcccgggggggcggtttcccatgggatgtgaaaggctggccattattaagtccctgtaactcaaatgtcaaccccaccgaggcacccccccgtcccccagaatcttggctgtttacaaatcacgtgtccatcgagcacgtctgaaacccctggtagccccgacttctttttaattaaaataaggtaagcccttc

SEQ ID NO: 326568 - DNA, 1615 bp, Homo sapiens
  misc_feature (1615)..(1615): n is a, c, g, or t
cgggcttcgccccacccggcccgtggggggagtatctgtcctgccgccttcgcccacgccctgcactccgggaccgtccctgcgcgctctgggcgcaccatggcccgcggggctgcgctggcgctgctgctcttcggcctgctgggtgttctggtcgccgccccggatggtggtttcgatttatccgatgcccttcctgacaatgaaaacaagaaacccactgcaatccccaagaaacccagtgctggggatgactttgacttaggagatgctgttgttgatggagaaaatgacgacccacgaccaccgaacccacccaaaccgatgccaaatccaaaccccaaccaccctagttcctccggtagcttttcagatgctgaccttgcggatggcgtttcaggtggagaaggaaaaggaggcagtgatggtggaggcagccacaggaaagaaggggaagaggccgacgccccaggcgtgatccccgggattgtgggggctgtcgtggtcgccgtggctggagccatctctagcttcattgcttaccagaaaaagaagctatgcttcaaagaaaatgcagaacaaggggaggtggacatggagagccaccggaatgccaacgcagagccagctgttcagcgtactcttttagagaaatagaagattgtcggcagaaacagcccaggcgttggcagcagggttagaacagctgcctgaggctcctccctgaaggacacctgcctgagagcagagatggaggccttctgttcacggcggattctttgttttaatcttgcgatgtgctttgcttgttgctgggcggatgatgtttactaacgatgaattttacatccaaagggggataggcacttggacccccattctccaaggcccgggggggcggtttcccatgggatgtgaaaggctggccattattaagtccctgtaactcaaatgtcaaccccaccgaggcacccccccgtcccccagaatcttggctgtttacaaatcacgtgtccatcgagcacgtctgaaacccctggtagccccgacttctttttaattaaaataaggtaagcccttcaatttgtttcttcaatatttctttcatttgtagggatatttgtttttcatatcagactaataaaaagaaattagaaaccaaaaaaaacaataaaaatcccacgaacacacacacaaaaccagggggggagcagccacagaaaaaccacggtggggggccaaagataccgcgacccatattctgtggacacagtggccacaaacagacacacaataaaacaacaagcgcacgcagtaaaaaagcacgaaggcaaaagggcagcggacactcggaggaggccccacccgggcggcaacacgcgcacaccaccaaaagaaacgctagagacataaaaaccacggcagcgggcaacccaccagaataaatccggtgcaaagatggccacgggcgctgttacaattgccagcgcaaaagagaacgaccaaaagacgagccaatacaagctcagcagctacataggtagcgagtactctagggcagccgcgacaccagaccaccatgaacttctctacgtaccgctcctgtggcgtcatn

SEQ ID NO: 326569 - DNA, 1691 bp, Homo sapiens
gacagaagactgaggctgcaggtccgatgtgtcccatgggctgtgtcccctcttcctactgtcagtttctgaaacttctgactggcctcccagttatgcctcctcctcaagttcctggcccgtggatgttaaagctgctcgattcccaggatctcggctgccttttcctctatcctgagctccctctgccctgccagttgtcagtcaggcagggagggagtggctgtgttggtttggggaactaatttccaaggacggctgcccgtggacaccaggtggactggttcactaatcaagtcagccatattgttctctggctaagtttggttccagccaacgtcatctgctcttcagttcctcactgccttcttgggatactaagacttgaattttttggggactattaagggtgttagtcttggagaagacacagcctcaccttctcacttgctgtgggtgaggggccatttaagtggactgggagacagtgcgcagtttgtatataattccctttcttgtggaacagaagactgaggcctgcaggttccgatgtgtctccatgggctgtgctcccctcttcctactgtcagtttctgaaacttctgactggcctcccagttatgcctcctcctcaagttcctggcccgtggatgttaaagctgctcgattcccaggatctcggctgccttttcctctatcttgagccctataaatgcccacgggacccccaccaccagcctcttgaagtggctccacagctcctgtccctggaacatcctgtcagtttggtcataaaccctgagccagatgaaatgagccaccgtgaacagacatctgccatgcccccaggtgggcttcggtggccctacccggtaccagttctctctgagaaactggagatgtcttgttagcataagtgtcttcattcccacctggagggtttgggagaggagcaaagcagttgaaaactagttaatgagctacaagagtcaaatagtcctctgaatggagcccccatcacaaaacagtgcccaggaggctggctcctcaagctacccatgcccagcgccctaaagcaggaccagatgctttggaattggggtgaaacacccacatggcagcctgctagcagcagtgactttgacttctggtcttaaagagtccctcacttcagccccaggagctattggtgggttttagcagttttgtctttaccgtttttagttctccttgattctttgttttcttcctttatcgtttttaggtttggtatgtgttgttttatttccatggttcctcaagtttcctttttaaacatttgcatttgctggacaattgcaattttttttaaaaaattcccctacccctgtttaaagctgaaaaatacatttggttcatgtgcattgtttacaaagcaaaaagaaaaaagaggaaaaaaaggcaaaaaatattgtgaaagaaaaaaaacaacttaatatattttggattaatatttggtatttcttttaaagtattttttgtgctgtgaacattttctgccaaagaccatgatgtgtgtctgtatgtttaagttatcgtaaatatttaaaatgtaaacatggctgttttgttatgccaccctgtaccaggattgctgccgcattccactgggtataacagtattttaattaaaaaaaaataattaaaagtga

SEQ ID NO: 326570 - DNA, 4145 bp, Homo sapiens
aactctcacattcctggcatagcagccgcctccggcgcgggccgaccctggggctgcgcgctggggcgcgaacagccagagcgtcggcgccacggccgagaacacatcttcgccgccgagctgagctgggccgagccggaggttgtggtgtctgactgcgctgggcaccctcgggccgcagcggtgctctggggccaggtgccaccggccattgtccaggcagctgtgtgcaagccaaagaagcatgaggacactggaagactcctcggggacagtcctgcaccgcctcatccaggagcagctgcgctacggcaacctgactgagacgcgcacgctgctagccatccagcagcaggccctgaggggtggggctggaactgggggtacagggagcccccaggcctccctggagatcctggccccagaggacagtcaggtgctgcagcaggccaccaggcaggagccccagggccaggagcaccagggcggtgagaaccacctggcagagaacaccctctaccggctatgcccacagcccagcaagggagaggagctgcccacctatgaggaggccaaagcccactcgcagtactatgcggcccagcaggcagggacccggccacatgcgggggaccgagatccccgtggggccccgggaggcagtcggaggcaggacgaggccctgcgggagctgaggcatgggcacgtgcgctcgttgagtgaacggctccttcagttgtccctggagaggaacggcgcccgggcccccagccacatgagctcctcccacagcttcccacagctggcccgcaaccagcagggccccccactgaggggcccccctgctgagggcccagagtcccgaggacccccacctcagtaccctcatgttgtactagctcatgagaccaccactgctgtcactgacccacggtaccgtgcccgcggcagcccgcacttccagcatgctgaagtcaggatcctgcaggcccaggtgcctcctgtgttcctccaacagcagcagcagtaccagtacctgcagcaatctcaggagcacccccctcccccacatccagctgctctcggccatggccccctgagctccctcagtccacctgctgtggaggggccagtgagtgcccaggcctcctcagccacctcgggcagtgcccacctggcccagatggaggccgtgctgagggagaatgccaggctgcagagagacaatgagcggctgcagagggagctggagagctctgcggagaaggctggccgcattgagaagctggaaagcgaaatccagcggctctctgaggcccatgagagcctgaccagagcctcctccaagcgtgaggccctggagaagaccatgcggaacaagatggacagtgaaatgaggaggctgcaagacttcaaccgggatcttagagagagattggaatctgcaaatcgccgcctggcaagcaagacacaggaggcccaggccggcagtcaggacatggtggccaagctgcttgctcagagctacgaacagcagcaggagcaagagaagctggagcgagagatggcactgctgcgcggcgccatcgaggaccagcggcggcgtgccgagctgctggagcaggctctgggcaatgcgcagggccgggcagctcgagccgaagaggagctgcgcaagaagcaggcctatgtggagaaagtggagcggctgcagcaggcgctcgggcagctgcaggcagcctgtgagaagcgggagcagctggagctgcgtctgcggactcgcctggagcaggaactcaaggccctgcgtgcacagcagagacaggcaggtgccccaggtggtagcagtggcagtggtgggtctccagagctcagcgccctgcgactgtcagaacaactgcgagagaaggaggagcagatcctggcgctggaggccgacatgaccaagtgggagcagaagtatttggaggaacgtgccatgaggcagtttgccatggatgcggctgccacggctgctgctcagcgtgacaccactctcatccgacattccccccagccctcacccagcagcagcttcaatgagggtctgctcactggtggccacaggcatcaggagatggaaagcaggttaaaggtgctccatgcccagatcctggagaaggatgcagtgatcaaggtccttcagcagcgctccaggagagaccctggcaaggccatccagggctccctgcggcctgccaagtcggtgccatctgttttcgcggctgcggcagcaggaacccagggctggcaagggctctcttctagtgagcgacaaacagcagacgcccctgctcggctgactacagcagacagagcacccacagaggagccagtggtcacagctccccctgctgcccatgccaaacacgggagcagagatgggagcacccagactgacggccccccagacagcacctccacctgcctgccaccggagcctgacagccttctggggtgcagcagtagccagagagcagcctctctggactctgtagctacatccagagtccaggacttgtcagacatggtggagatactgatctgaaggaggtggtgcttcaggactctgagccattctctcccctcctctgccctgtgccactctcagccatttcagcagccccgtcaaccgctgctccgtccctttccccagccagacactcattcccattgaccatctggtcccaggagctcaggaggaggaccccaggggagaggagagctgtgagagcaccggcacccccagaagactctgcttcttagcccacattcctccgggccttatggagaatgaggattcagccttgacttcttgcccaaggcctgctactggggtagcaactgacagctcagaaaggagctgagctccctctgccctgccagttgtcagtcaggcagggagggagtggctgtgttggtttggggaactaatttccaaggacggctgcccgtggacaccaggtggactggttcactaatcaagtcagccatattgttctctggctaagtttggttccagccaacgtcatctgctcttcagttcctcactgccttcttgggatactaagacttgaattttttggggactattaagggtgttagtcttggagaagacacagcctcaccttctcacttgctgtgggtgaggggccatttaagtggactgggagacagtgcgcagtttgtatataattccctttcttgtggaacagaagactgaggcctgcaggttccgatgtgtctccatgggctgtgctcccctcttcctactgtcagtttctgaaacttctgactggcctcccagttatgcctcctcctcaagttcctggcccgtggatgttaaagctgctcgattcccaggatctcggctgccttttcctctatcttgagccctataaatgcccacgggacccccaccaccagcctcttgaagtggctccacagctcctgtccctggaacatcctgtcagtttggtcataaaccctgagccagatgaaatgagccaccgtgaacagacatctgccatgcccccaggtgggcttcggtggccctacccggtaccagttctctctgagaaactggagatgtcttgttagcataagtgtcttcattcccacctggagggtttgggagaggagcaaagcagttgaaaactagttaatgagctacaagagtcaaatagtcctctgaatggagcccccatcacaaaacagtgcccaggaggctggctcctcaagctacccatgcccagcgccctaaagcaggaccagatgctttggaattggggtgaaacacccacatggcagcctgctagcagcagtgactttgacttctggtcttaaagagtccctcacttcagccccaggagctattggtgggttttagcagttttgtctttaccgtttttagttctccttgattctttgttttcttcctttatcgtttttaggtttggtatgtgttgttttatttccatggttcctcaagtttcctttttaaacatttgcatttgctggacaattgcaattttttttaaaaaattcccctacccctgtttaaagctgaaaaatacatttggttcatgtgcattgtttacaaagca

SEQ ID NO: 326571 - DNA, 4947 bp, Homo sapiens
aactctcacattcctggcatagcagccgcctccggcgcgggccgaccctggggctgcgcgctggggcgcgaacagccagagcgtcggcgccacggccgagaacacatcttcgccgccgagctgagctgggccgagccggaggttgtggtgtctgactgcgctgggcaccctcgggccgcagcggtgctctggggccaggtgccaccggccattgtccaggcagctgtgtgcaagccaaagaagcatgaggacactggaagactcctcggggacagtcctgcaccgcctcatccaggagcagctgcgctacggcaacctgactgagacgcgcacgctgctagccatccagcagcaggccctgaggggtggggctggaactgggggtacagggagcccccaggcctccctggagatcctggccccagaggacagtcaggtgctgcagcaggccaccaggcaggagccccagggccaggagcaccagggcggtgagaaccacctggcagagaacaccctctaccggctatgcccacagcccagcaagggagaggagctgcccacctatgaggaggccaaagcccactcgcagtactatgcggcccagcaggcagggacccggccacatgcgggggaccgagatccccgtggggccccgggaggcagtcggaggcaggacgaggccctgcgggagctgaggcatgggcacgtgcgctcgttgagtgaacggctccttcagttgtccctggagaggaacggcgcccgggcccccagccacatgagctcctcccacagcttcccacagctggcccgcaaccagcagggccccccactgaggggcccccctgctgagggcccagagtcccgaggacccccacctcagtaccctcatgttgtactagctcatgagaccaccactgctgtcactgacccacggtaccgtgcccgcggcagcccgcacttccagcatgctgaagtcaggatcctgcaggcccaggtgcctcctgtgttcctccaacagcagcagcagtaccagtacctgcagcaatctcaggagcacccccctcccccacatccagctgctctcggccatggccccctgagctccctcagtccacctgctgtggaggggccagtgagtgcccaggcctcctcagccacctcgggcagtgcccacctggcccagatggaggccgtgctgagggagaatgccaggctgcagagagacaatgagcggctgcagagggagctggagagctctgcggagaaggctggccgcattgagaagctggaaagcgaaatccagcggctctctgaggcccatgagagcctgaccagagcctcctccaagcgtgaggccctggagaagaccatgcggaacaagatggacagtgaaatgaggaggctgcaagacttcaaccgggatcttagagagagattggaatctgcaaatcgccgcctggcaagcaagacacaggaggcccaggccggcagtcaggacatggtggccaagctgcttgctcagagctacgaacagcagcaggagcaagagaagctggagcgagagatggcactgctgcgcggcgccatcgaggaccagcggcggcgtgccgagctgctggagcaggctctgggcaatgcgcagggccgggcagctcgagccgaagaggagctgcgcaagaagcaggcctatgtggagaaagtggagcggctgcagcaggcgctcgggcagctgcaggcagcctgtgagaagcgggagcagctggagctgcgtctgcggactcgcctggagcaggaactcaaggccctgcgtgcacagcagagacaggcaggtgccccaggtggtagcagtggcagtggtgggtctccagagctcagcgccctgcgactgtcagaacaactgcgagagaaggaggagcagatcctggcgctggaggccgacatgaccaagtgggagcagaagtatttggaggaacgtgccatgaggcagtttgccatggatgcggctgccacggctgctgctcagcgtgacaccactctcatccgacattccccccagccctcacccagcagcagcttcaatgagggtctgctcactggtggccacaggcatcaggagatggaaagcaggttaaaggtgctccatgcccagatcctggagaaggatgcagtgatcaaggtccttcagcagcgctccaggagagaccctggcaaggccatccagggctccctgcggcctgccaagtcggtgccatctgttttcgcggctgcggcagcaggaacccagggctggcaagggctctcttctagtgagcgacaaacagcagacgcccctgctcggctgactacagcagacagagcacccacagaggagccagtggtcacagctccccctgctgcccatgccaaacacgggagcagagatgggagcacccagactgacggccccccagacagcacctccacctgcctgccaccggagcctgacagccttctggggtgcagcagtagccagagagcagcctctctggactctgtagctacatccagagtccaggacttgtcagacatggtggagatactgatctgaaggaggtggtgcttcaggactctgagccattctctcccctcctctgccctgtgccactctcagccatttcagcagccccgtcaaccgctgctccgtccctttccccagccagacactcattcccattgaccatctggtcccaggagctcaggaggaggaccccaggggagaggagagctgtgagagcaccggcacccccagaagactctgcttcttagcccacattcctccgggccttatggagaatgaggattcagccttgacttcttgcccaaggcctgctactggggtagcaactgacagctcagaaaggagctgagctccctctgccctgccagttgtcagtcaggcagggagggagtggctgtgttggtttggggaactaatttccaaggacggctgcccgtggacaccaggtggactggttcactaatcaagtcagccatattgttctctggctaagtttggttccagccaacgtcatctgctcttcagttcctcactgccttcttgggatactaagacttgaattttttggggactattaagggtgttagtcttggagaagacacagcctcaccttctcacttgctgtgggtgaggggccatttaagtggactgggagacagtgcgcagtttgtatataattccctttcttgtggaacagaagactgaggcctgcaggttccgatgtgtctccatgggctgtgctcccctcttcctactgtcagtttctgaaacttctgactggcctcccagttatgcctcctcctcaagttcctggcccgtggatgttaaagctgctcgattcccaggatctcggctgccttttcctctatcttgagccctataaatgcccacgggacccccaccaccagcctcttgaagtggctccacagctcctgtccctggaacatcctgtcagtttggtcataaaccctgagccagatgaaatgagccaccgtgaacagacatctgccatgcccccaggtgggcttcggtggccctacccggtaccagttctctctgagaaactggagatgtcttgttagcataagtgtcttcattcccacctggagggtttgggagaggagcaaagcagttgaaaactagttaatgagctacaagagtcaaatagtcctctgaatggagcccccatcacaaaacagtgcccaggaggctggctcctcaagctacccatgcccagcgccctaaagcaggaccagatgctttggaattggggtgaaacacccacatggcagcctgctagcagcagtgactttgacttctggtcttaaagagtccctcacttcagccccaggagctattggtgggttttagcagttttgtctttaccgtttttagttctccttgattctttgttttcttcctttatcgtttttaggtttggtatgtgttgttttatttccatggttcctcaagtttcctttttaaacatttgcatttgctggacaattgcaattttttttaaaaaattcccctacccctgtttaaagctgaaaaatacatttggttcatgtgcattgtttacaaagcaaaaagaaaaaagaggaaaaaaaggcaaaaaatattgtgaaagaaaaaaaacaacttaatatattttggattaatatttggtatttcttttaaagtattttttgtgctgtgaacattttctgccaaagaccatgatgtgtgtctgtatgtttaagttatcgtaaatatttaaaatgtaaacatggctgttttgttatgccaccctgtaccaggattgctgccgcattccactgggtataacagtattttaattaaaaaaaaataattaaaagtgatgtctttgcacaggtgagactttgcactgagggaagggaaagggtgaggattttggggggccacccaagtcatagtccaatctcttcaaggacccaagatagaatttaggaattttgtgaagctgcattaaggatagagttggaatgaggatgtggctggcatttttcccctttcatagataacatttcttgaaggctgggaggggaaggagggcctggcagatggcagcctcccgaggtagggctgtgttctaatcagctttgttcggccacacgctgtggttatccacagtgggagtgggtgtccaaagatggctttatccttcccccactccttttcccactcccacctagcacataaagttttgtccgaaaccatccagaaggccaggcaccatgcagaggacattcaagaatgtgcatgttcttagccaccgcctccctcctttgctgtgacatcaccactctttcctgatgctcaggaaagcatattgctccaattcaaaattaaagaaagccattctcagt

SEQ ID NO: 326572 - DNA, 3716 bp, Homo sapiens
aactctcacattcctggcatagcagccgcctccggcgcgggccgaccctggggctgcgcgctggggcgcgaacagccagagcgtcggcgccacggccgagaacacatcttcgccgccgagctgagctgggccgagccggaggttgtggtgtctgactgcgctgggcaccctcgggccgcagcggtgctctggggccaggtgccaccggccattgtccaggcagctgtgtgcaagccaaagaagcatgaggacactggaagactcctcggggacagtcctgcaccgcctcatccaggagcagctgcgctacggcaacctgactgagacgcgcacgctgctagccatccagcagcaggccctgaggggtggggctggaactgggggtacagggagcccccaggcctccctggagatcctggccccagaggacagtcaggtgctgcagcaggccaccaggcaggagccccagggccaggagcaccagggcggtgagaaccacctggcagagaacaccctctaccggctatgcccacagcccagcaagggagaggagctgcccacctatgaggaggccaaagcccactggaaagcgaaatccagcggctctctgaggcccatgagagcctgaccagagcctcctccaagcgtgaggccctggagaagaccatgcggaacaagatggacagtgaaatgaggaggctgcaagacttcaaccgggatcttagagagagattggaatctgcaaatcgccgcctggcaagcaagacacaggaggcccaggccggcagtcaggacatggtggccaagctgcttgctcagagctacgaacagcagcaggagcaagagaagctggagcgagagatggcactgctgcgcggcgccatcgaggaccagcggcggcgtgccgagctgctggagcaggctctgggcaatgcgcagggccgggcagctcgagccgaagaggagctgcgcaagaagcaggcctatgtggagaaagtggagcggctgcagcaggcgctcgggcagctgcaggcagcctgtgagaagcgggagcagctggagctgcgtctgcggactcgcctggagcaggaactcaaggccctgcgtgcacagcagagacaggcaggtgccccaggtggtagcagtggcagtggtgggtctccagagctcagcgccctgcgactgtcagaacaactgcgagagaaggaggagcagatcctggcgctggaggccgacatgaccaagtgggagcagaagtatttggaggaacgtgccatgaggcagtttgccatggatgcggctgccacggctgctgctcagcgtgacaccactctcatccgacattccccccagccctcacccagcagcagcttcaatgagggtctgctcactggtggccacaggcatcaggagatggaaagcaggttaaaggtgctccatgcccagatcctggagaaggatgcagtgatcaaggtccttcagcagcgctccaggagagaccctggcaaggccatccagggctccctgcggcctgccaagtcggtgccatctgttttcgcggctgcggcagcaggaacccagggctggcaagggctctcttctagtgagcgacaaacagcagacgcccctgctcggctgactacagcagacagagcacccacagaggagccagtggtcacagctccccctgctgcccatgccaaacacgggagcagagatgggagcacccagactgacggccccccagacagcacctccacctgcctgccaccggagcctgacagccttctggggtgcagcagtagccagagagcagcctctctggactctgtagctacatccagagtccaggacttgtcagacatggtggagatactgatctgaaggaggtggtgcttcaggactctgagccattctctcccctcctctgccctgtgccactctcagccatttcagcagccccgtcaaccgctgctccgtccctttccccagccagacactcattcccattgaccatctggtcccaggagctcaggaggaggaccccaggggagaggagagctgtgagagcaccggcacccccagaagactctgcttcttagcccacattcctccgggccttatggagaatgaggattcagccttgacttcttgcccaaggcctgctactggggtagcaactgacagctcagaaaggagctgagctccctctgccctgccagttgtcagtcaggcagggagggagtggctgtgttggtttggggaactaatttccaaggacggctgcccgtggacaccaggtggactggttcactaatcaagtcagccatattgttctctggctaagtttggttccagccaacgtcatctgctcttcagttcctcactgccttcttgggatactaagacttgaattttttggggactattaagggtgttagtcttggagaagacacagcctcaccttctcacttgctgtgggtgaggggccatttaagtggactgggagacagtgcgcagtttgtatataattccctttcttgtggaacagaagactgaggcctgcaggttccgatgtgtctccatgggctgtgctcccctcttcctactgtcagtttctgaaacttctgactggcctcccagttatgcctcctcctcaagttcctggcccgtggatgttaaagctgctcgattcccaggatctcggctgccttttcctctatcttgagccctataaatgcccacgggacccccaccaccagcctcttgaagtggctccacagctcctgtccctggaacatcctgtcagtttggtcataaaccctgagccagatgaaatgagccaccgtgaacagacatctgccatgcccccaggtgggcttcggtggccctacccggtaccagttctctctgagaaactggagatgtcttgttagcataagtgtcttcattcccacctggagggtttgggagaggagcaaagcagttgaaaactagttaatgagctacaagagtcaaatagtcctctgaatggagcccccatcacaaaacagtgcccaggaggctggctcctcaagctacccatgcccagcgccctaaagcaggaccagatgctttggaattggggtgaaacacccacatggcagcctgctagcagcagtgactttgacttctggtcttaaagagtccctcacttcagccccaggagctattggtgggttttagcagttttgtctttaccgtttttagttctccttgattctttgttttcttcctttatcgtttttaggtttggtatgtgttgttttatttccatggttcctcaagtttcctttttaaacatttgcatttgctggacaattgcaattttttttaaaaaattcccctacccctgtttaaagctgaaaaatacatttggttcatgtgcattgtttacaaagcaaaaagaaaaaagaggaaaaaaaggcaaaaaatattgtgaaagaaaaaaaacaacttaatatattttggattaatatttggtatttcttttaaagtattttttgtgctgtgaacattttctgccaaagaccatgatgtgtgtctgtatgtttaagttatcgtaaatatttaaaatgtaaacatggctgttttgttatgccaccctgtaccaggattgctgccgcattccactgggtataacagtattttaattaaaaaaaaataattaaaagtga

SEQ ID NO: 326573 - DNA, 2403 bp, Homo sapiens
cactttagctcctctttcatggtcttccctacatagttaatttccaatttgattatccaagagaatggagctcgcaagtcatgccgatggcactctggaagcctgtttaaagagtccgggaaggagaaatctgagaagatgccatttctttttccactcccctttcacattggcctttgcatatttgcctgtgcctcatgatctcagaaaaccacaggcatgaaaagaatgctgcagcctgcctccctcagggctctccattgctctctctaagccctccaaccagttcaaagttagaaacaaatgcatcctacacatcggaggttggtgggctgggctgagcactgaaagggggcagagcattgtgcttggttggccgagttctgggaacctgggcagcagaggtgggaaaagttggtgaagaacgatctttgtctttcaaatgtgccaggattttaaaagcaatctagtaacactcattggcatgtgcctgtgttcttgtctgtctccagactctgtagctacatccagagtccaggacttgtcagacatggtggagatactgatctgaaggaggtggtgcttcaggactctgagccattctctcccctcctctgccctgtgccactctcagccatttcagcagccccgtcaaccgctgctccgtccctttccccagccagacactcattcccattgaccatctggtcccaggagctcaggaggaggaccccaggggagaggagagctgtgagagcaccggcacccccagaagactctgcttcttagcccacattcctccgggccttatggagaatgaggattcagccttgacttcttgcccaaggcctgctactggggtagcaactgacagctcagaaaggagctgagctccctctgccctgccagttgtcagtcaggcagggagggagtggctgtgttggtttggggaactaatttccaaggacggctgcccgtggacaccaggtggactggttcactaatcaagtcagccatattgttctctggctaagtttggttccagccaacgtcatctgctcttcagttcctcactgccttcttgggatactaagacttgaattttttggggactattaagggtgttagtcttggagaagacacagcctcaccttctcacttgctgtgggtgaggggccatttaagtggactgggagacagtgcgcagtttgtatataattccctttcttgtggaacagaagactgaggcctgcaggttccgatgtgtctccatgggctgtgctcccctcttcctactgtcagtttctgaaacttctgactggcctcccagttatgcctcctcctcaagttcctggcccgtggatgttaaagctgctcgattcccaggatctcggctgccttttcctctatcttgagccctataaatgcccacgggacccccaccaccagcctcttgaagtggctccacagctcctgtccctggaacatcctgtcagtttggtcataaaccctgagccagatgaaatgagccaccgtgaacagacatctgccatgcccccaggtgggcttcggtggccctacccggtaccagttctctctgagaaactggagatgtcttgttagcataagtgtcttcattcccacctggagggtttgggagaggagcaaagcagttgaaaactagttaatgagctacaagagtcaaatagtcctctgaatggagcccccatcacaaaacagtgcccaggaggctggctcctcaagctacccatgcccagcgccctaaagcaggaccagatgctttggaattggggtgaaacacccacatggcagcctgctagcagcagtgactttgacttctggtcttaaagagtccctcacttcagccccaggagctattggtgggttttagcagttttgtctttaccgtttttagttctccttgattctttgttttcttcctttatcgtttttaggtttggtatgtgttgttttatttccatggttcctcaagtttcctttttaaacatttgcatttgctggacaattgcaattttttttaaaaaattcccctacccctgtttaaagctgaaaaatacatttggttcatgtgcattgtttacaaagcaaaaagaaaaaagaggaaaaaaaggcaaaaaatattgtgaaagaaaaaaaacaacttaatatattttggattaatatttggtatttcttttaaagtattttttgtgctgtgaacattttctgccaaagaccatgatgtgtgtctgtatgtttaagttatcgtaaatatttaaaatgtaaacatggctgttttgttatgccaccctgtaccaggattgctgccgcattccactgggtataacagtattttaattaaaaaaaaataattaaaagtga

SEQ ID NO: 326574 - DNA, 1374 bp, Homo sapiens
gggtgactctagagtcccccccgactagcccgacaggttcctcactgccttcttgggatactaagacttgaattttttggggactattaagggtgttagtcttggagaagacacagcctcaccttctcacttgctgtgggtgaggggccatttaagtggactgggagacagtgcgcagtttgtatataattccctttcttgtggaacagaagactgaggcctgcaggttccgatgtgtctccatgggctgtgctcccctcttcctactgtcagtttctgaaacttctgactggcctcccagttatgcctcctcctcaagttcctggcccgtggatgttaaagctgctcgattcccaggatctcggctgccttttcctctatcttgagccctataaatgcccacgggacccccaccaccagcctcttgaagtggctccacagctcctgtccctggaacatcctgtcagtttggtcataaaccctgagccagatgaaatgagccaccgtgaacagacatctgccatgcccccaggtgggcttcggtggccctacccggtaccagttctctctgagaaactggagatgtcttgttagcataagtgtcttcattcccacctggagggtttgggagaggagcaaagcagttgaaaactagttaatgagctacaagagtcaaatagtcctctgaatggagcccccatcacaaaacagtgcccaggaggctggctcctcaagctacccatgcccagcgccctaaagcaggaccagatgctttggaattggggtgaaacacccacatggcagcctgctagcagcagtgactttgacttctggtcttaaagagtccctcacttcagccccaggagctattggtgggttttagcagttttgtctttaccgtttttagttctccttgattctttgttttcttcctttatcgtttttaggtttggtatgtgttgttttatttccatggttcctcaagtttcctttttaaacatttgcatttgctggacaattgcaattttttttaaaaaattcccctacccctgtttaaagctgaaaaatacatttggttcatgtgcattgtttacaaagcaaaaagaaaaaagaggaaaaaaaggcaaaaaatattgtgaaagaaaaaaaacaacttaatatattttggattaatatttggtatttcttttaaagtattttttgtgctgtgaacattttctgccaaagaccatgatgtgtgtctgtatgtttaagttatcgtaaatatttaaaatgtaaacatggctgttttgttatgccaccctgtaccaggattgctgccgcattccactgggtataacagtattttaattaaaaaaaaataattaaaagtga

SEQ ID NO: 326575 - DNA, 1320 bp, Homo sapiens
tggtcggccctcattacatggaggatgtgtgtgtgtgtgtgtgtgtgtagccaagtgtgcagtggtatgttctggaacgctgtgggtgaggggccatttaagtggactgggagacagtgcgcagtttgtatataattccctttcttgtggaacagaagactgaggcctgcaggttccgatgtgtctccatgggctgtgctcccctcttcctactgtcagtttctgaaacttctgactggcctcccagttatgcctcctcctcaagttcctggcccgtggatgttaaagctgctcgattcccaggatctcggctgccttttcctctatcttgagccctataaatgcccacgggacccccaccaccagcctcttgaagtggctccacagctcctgtccctggaacatcctgtcagtttggtcataaaccctgagccagatgaaatgagccaccgtgaacagacatctgccatgcccccaggtgggcttcggtggccctacccggtaccagttctctctgagaaactggagatgtcttgttagcataagtgtcttcattcccacctggagggtttgggagaggagcaaagcagttgaaaactagttaatgagctacaagagtcaaatagtcctctgaatggagcccccatcacaaaacagtgcccaggaggctggctcctcaagctacccatgcccagcgccctaaagcaggaccagatgctttggaattggggtgaaacacccacatggcagcctgctagcagcagtgactttgacttctggtcttaaagagtccctcacttcagccccaggagctattggtgggttttagcagttttgtctttaccgtttttagttctccttgattctttgttttcttcctttatcgtttttaggtttggtatgtgttgttttatttccatggttcctcaagtttcctttttaaacatttgcatttgctggacaattgcaattttttttaaaaaattcccctacccctgtttaaagctgaaaaatacatttggttcatgtgcattgtttacaaagcaaaaagaaaaaagaggaaaaaaaggcaaaaaatattgtgaaagaaaaaaaacaacttaatatattttggattaatatttggtatttcttttaaagtattttttgtgctgtgaacattttctgccaaagaccatgatgtgtgtctgtatgtttaagttatcgtaaatatttaaaatgtaaacatggctgttttgttatgccaccctgtaccaggattgctgccgcattccactgggtataacagtattttaattaaaaaaaaataattaaaagtga

SEQ ID NO: 326576 - DNA, 952 bp, Homo sapiens
tgctacatcccccaatctgatctacaattgcatattaatgatcaacttaaatgtggtttgctggacaattgcaattttttttaaaaaattcccctacccctgtttaaagctgaaaaatacatttggttcatgtgcattgtttacaaagcaaaaagaaaaaagaggaaaaaaaggcaaaaaatattgtgaaagaaaaaaaacaacttaatatattttggattaatatttggtatttcttttaaagtattttttgtgctgtgaacattttctgccaaagaccatgatgtgtgtctgtatgtttaagttatcgtaaatatttaaaatgtaaacatggctgttttgttatgccaccctgtaccaggattgctgccgcattccactgggtataacagtattttaattaaaaaaaaataattaaaagtgatgtctttgcacaggtgagactttgcactgagggaagggaaagggtgaggattttggggggccacccaagtcatagtccaatctcttcaaggacccaagatagaatttaggaattttgtgaagctgcattaaggatagagttggaatgaggatgtggctggcatttttcccctttcatagataacatttcttgaaggctgggaggggaaggagggcctggcagatggcagcctcccgaggtagggctgtgttctaatcagctttgttcggccacacgctgtggttatccacagtgggagtgggtgtccaaagatggctttatccttcccccactccttttcccactcccacctagcacataaagttttgtccgaaaccatccagaaggccaggcaccatgcagaggacattcaagaatgtgcatgttcttagccaccgcctccctcctttgctgtgacatcaccactctttcctgatgctcaggaaagcatattgctccaattcaaaattaaagaaagccattctcagt

SEQ ID NO: 326577 - DNA, 4419 bp, Homo sapiens
aactctcacattcctggcatagcagccgcctccggcgcgggccgaccctggggctgcgcgctggggcgcgaacagccagagcgtcggcgccacggccgagaacacatcttcgccgccgagctgagctgggccgagccggaggttgtggtgtctgactgcgctgggcaccctcgggccgcagcggtgctctggggccaggtgccaccggccattgtccaggcagctgtgtgcaagccaaagaagcatgaggacactggaagactcctcggggacagtcctgcaccgcctcatccaggagcagctgcgctacggcaacctgactgagacgcgcacgctgctagccatccagcagcaggccctgaggggtggggctggaactgggggtacagggagcccccaggcctccctggagatcctggccccagaggacagtcaggtgctgcagcaggccaccaggcaggagccccagggccaggagcaccagggcggtgagaaccacctggcagagaacaccctctaccggctatgcccacagcccagcaagggagaggagctgcccacctatgaggaggccaaagcccactcgcagtactatgcggcccagcaggcagggacccggccacatgcgggggaccgagatccccgtggggccccgggaggcagtcggaggcaggacgaggccctgcgggagctgaggcatgggcacgtgcgctcgttgagtgaacggctccttcagttgtccctggagaggaacggcgcccgggcccccagccacatgagctcctcccacagcttcccacagctggcccgcaaccagcagggccccccactgaggggcccccctgctgagggcccagagtcccgaggacccccacctcagtaccctcatgttgtactagctcatgagaccaccactgctgtcactgacccacggtaccgtgcccgcggcagcccgcacttccagcatgctgaagtcaggatcctgcaggcccaggtgcctcctgtgttcctccaacagcagcagcagtaccagtacctgcagcaatctcaggagcacccccctcccccacatccagctgctctcggccatggccccctgagctccctcagtccacctgctgtggaggggccagtgagtgcccaggcctcctcagccacctcgggcagtgcccacctggcccagatggaggccgtgctgagggagaatgccaggctgcagagagacaatgagcggctgcagagggagctggagagctctgcggagaaggctggccgcattgagaagctggaaagcgaaatccagcggctctctgaggcccatgagagcctgaccagagcctcctccaagcgtgaggccctggagaagaccatgcggaacaagatggacagtgaaatgaggaggctgcaagacttcaaccgggatcttagagagagattggaatctgcaaatcgccgcctggcaagcaagacacaggaggcccaggccggcagtcaggacatggtggccaagctgcttgctcagagctacgaacagcagcaggagcaagagaagctggagcgagagatggcactgctgcgcggcgccatcgaggaccagcggcggcgtgccgagctgctggagcaggctctgggcaatgcgcagggccgggcagctcgagccgaagaggagctgcgcaagaagcaggcctatgtggagaaagtggagcggctgcagcaggcgctcgggcagctgcaggcagcctgtgagaagcgggagcagctggagctgcgtctgcggactcgcctggagcaggaactcaaggccctgcgtgcacagcagagacaggcaggtgccccaggtggtagcagtggcagtggtgggtctccagagctcagcgccctgcgactgtcagaacaactgcgagagaaggaggagcagatcctggcgctggaggccgacatgaccaagtgggagcagaagtatttggaggaacgtgccatgaggcagtttgccatggatgcggctgccacggctgctgctcagcgtgacaccactctcatccgacattccccccagccctcacccagcagcagcttcaatgagggtctgctcactggtggccacaggcatcaggagatggaaagcaggttaaaggtgctccatgcccagatcctggagaaggatgcagtgatcaaggtccttcagcagcgctccaggagagaccctggcaaggccatccagggctccctgcggcctgccaagtcggtgccatctgttttcgcggctgcggcagcaggaacccagggctggcaagggctctcttctagtgagcgacaaacagcagacgcccctgctcggctgactacagcagacagagcacccacagaggagccagtggtcacagctccccctgctgcccatgccaaacacgggagcagagatgggagcacccagactgacggccccccagacagcacctccacctgcctgccaccggagcctgacagccttctggggtgcagcagtagccagagagcagcctctctggactctgtagctacatccagagtccaggacttgtcagacatggtggagatactgatctgaaggaggtggtgcttcaggactctgagccattctctcccctcctctgccctgtgccactctcagccatttcagcagccccgtcaaccgctgctccgtccctttccccagccagacactcattcccattgaccatctggtcccaggagctcaggaggaggaccccaggggagaggagagctgtgagagcaccggcacccccagaagactctgcttcttagcccacattcctccgggccttatggagaatgaggattcagccttgacttcttgcccaaggcctgctactggggtagcaactgacagctcagaaaggagctgagctccctctgccctgccagttgtcagtcaggcagggagggagtggctgtgttggtttggggaactaatttccaaggacggctgcccgtggacaccaggtggactggttcactaatcaagtcagccatattgttctctggctaagtttggttccagccaacgtcatctgctcttcagttcctcactgccttcttgggatactaagacttgaattttttggggactattaagggtgttagtcttggagaagacacagcctcaccttctcacttgctgtgggtgaggggccatttaagtggactgggagacagtgcgcagtttgtatataattccctttcttgtggaacagaagactgaggcctgcaggttccgatgtgtctccatgggctgtgctcccctcttcctactgtcagtttctgaaacttctgactggcctcccagttatgcctcctcctcaagttcctggcccgtggatgttaaagctgctcgattcccaggatctcggctgccttttcctctatcttgagccctataaatgcccacgggacccccaccaccagcctcttgaagtggctccacagctcctgtccctggaacatcctgtcagtttggtcataaaccctgagccagatgaaatgagccaccgtgaacagacatctgccatgcccccaggtgggcttcggtggccctacccggtaccagttctctctgagaaactggagatgtcttgttagcataagtgtcttcattcccacctggagggtttgggagaggagcaaagcagttgaaaactagttaatgagctacaagagtcaaatagtcctctgaatggagcccccatcacaaaacagtgcccaggaggctggctcctcaagctacccatgcccagcgccctaaagcaggaccagatgctttggaattggggtgaaacacccacatggcagcctgctagcagcagtgactttgacttctggtcttaaagagtccctcacttcagccccaggagctattggtgggttttagcagttttgtctttaccgtttttagttctccttgattctttgttttcttcctttatcgtttttaggtttggtatgtgttgttttatttccatggttcctcaagtttcctttttaaacatttgcatttgctggacaattgcaattttttttaaaaaattcccctacccctgtttaaagctgaaaaatacatttggttcatgtgcattgtttacaaagcaaaaagaaaaaagaggaaaaaaaggcaaaaaatattgtgaaagaaaaaaaacaacttaatatattttggattaatatttggtatttcttttaaagtattttttgtgctgtgaacattttctgccaaagaccatgatgtgtgtctgtatgtttaagttatcgtaaatatttaaaatgtaaacatggctgttttgttatgccaccctgtaccaggattgctgccgcattccactgggtataacagtattttaattaaaaaaaaataattaaaagtga

SEQ ID NO: 326578 - DNA, 4621 bp, Homo sapiens
  misc_feature (4436)..(4437): n is a, c, g, or t
  misc_feature (4447)..(4447): n is a, c, g, or t
  misc_feature (4451)..(4451): n is a, c, g, or t
  misc_feature (4456)..(4456): n is a, c, g, or t
  misc_feature (4459)..(4459): n is a, c, g, or t
  misc_feature (4463)..(4463): n is a, c, g, or t
  misc_feature (4465)..(4465): n is a, c, g, or t
  misc_feature (4467)..(4467): n is a, c, g, or t
  misc_feature (4476)..(4476): n is a, c, g, or t
  misc_feature (4478)..(4478): n is a, c, g, or t
  misc_feature (4482)..(4482): n is a, c, g, or t
aactctcacattcctggcatagcagccgcctccggcgcgggccgaccctggggctgcgcgctggggcgcgaacagccagagcgtcggcgccacggccgagaacacatcttcgccgccgagctgagctgggccgagccggaggttgtggtgtctgactgcgctgggcaccctcgggccgcagcggtgctctggggccaggtgccaccggccattgtccaggcagctgtgtgcaagccaaagaagcatgaggacactggaagactcctcggggacagtcctgcaccgcctcatccaggagcagctgcgctacggcaacctgactgagacgcgcacgctgctagccatccagcagcaggccctgaggggtggggctggaactgggggtacagggagcccccaggcctccctggagatcctggccccagaggacagtcaggtgctgcagcaggccaccaggcaggagccccagggccaggagcaccagggcggtgagaaccacctggcagagaacaccctctaccggctatgcccacagcccagcaagggagaggagctgcccacctatgaggaggccaaagcccactcgcagtactatgcggcccagcaggcagggacccggccacatgcgggggaccgagatccccgtggggccccgggaggcagtcggaggcaggacgaggccctgcgggagctgaggcatgggcacgtgcgctcgttgagtgaacggctccttcagttgtccctggagaggaacggcgcccgggcccccagccacatgagctcctcccacagcttcccacagctggcccgcaaccagcagggccccccactgaggggcccccctgctgagggcccagagtcccgaggacccccacctcagtaccctcatgttgtactagctcatgagaccaccactgctgtcactgacccacggtaccgtgcccgcggcagcccgcacttccagcatgctgaagtcaggatcctgcaggcccaggtgcctcctgtgttcctccaacagcagcagcagtaccagtacctgcagcaatctcaggagcacccccctcccccacatccagctgctctcggccatggccccctgagctccctcagtccacctgctgtggaggggccagtgagtgcccaggcctcctcagccacctcgggcagtgcccacctggcccagatggaggccgtgctgagggagaatgccaggctgcagagagacaatgagcggctgcagagggagctggagagctctgcggagaaggctggccgcattgagaagctggaaagcgaaatccagcggctctctgaggcccatgagagcctgaccagagcctcctccaagcgtgaggccctggagaagaccatgcggaacaagatggacagtgaaatgaggaggctgcaagacttcaaccgggatcttagagagagattggaatctgcaaatcgccgcctggcaagcaagacacaggaggcccaggccggcagtcaggacatggtggccaagctgcttgctcagagctacgaacagcagcaggagcaagagaagctggagcgagagatggcactgctgcgcggcgccatcgaggaccagcggcggcgtgccgagctgctggagcaggctctgggcaatgcgcagggccgggcagctcgagccgaagaggagctgcgcaagaagcaggcctatgtggagaaagtggagcggctgcagcaggcgctcgggcagctgcaggcagcctgtgagaagcgggagcagctggagctgcgtctgcggactcgcctggagcaggaactcaaggccctgcgtgcacagcagagacaggcaggtgccccaggtggtagcagtggcagtggtgggtctccagagctcagcgccctgcgactgtcagaacaactgcgagagaaggaggagcagatcctggcgctggaggccgacatgaccaagtgggagcagaagtatttggaggaacgtgccatgaggcagtttgccatggatgcggctgccacggctgctgctcagcgtgacaccactctcatccgacattccccccagccctcacccagcagcagcttcaatgagggtctgctcactggtggccacaggcatcaggagatggaaagcaggttaaaggtgctccatgcccagatcctggagaaggatgcagtgatcaaggtccttcagcagcgctccaggagagaccctggcaaggccatccagggctccctgcggcctgccaagtcggtgccatctgttttcgcggctgcggcagcaggaacccagggctggcaagggctctcttctagtgagcgacaaacagcagacgcccctgctcggctgactacagcagacagagcacccacagaggagccagtggtcacagctccccctgctgcccatgccaaacacgggagcagagatgggagcacccagactgacggccccccagacagcacctccacctgcctgccaccggagcctgacagccttctggggtgcagcagtagccagagagcagcctctctggactctgtagctacatccagagtccaggacttgtcagacatggtggagatactgatctgaaggaggtggtgcttcaggactctgagccattctctcccctcctctgccctgtgccactctcagccatttcagcagccccgtcaaccgctgctccgtccctttccccagccagacactcattcccattgaccatctggtcccaggagctcaggaggaggaccccaggggagaggagagctgtgagagcaccggcacccccagaagactctgcttcttagcccacattcctccgggccttatggagaatgaggattcagccttgacttcttgcccaaggcctgctactggggtagcaactgacagctcagaaaggagctgagctccctctgccctgccagttgtcagtcaggcagggagggagtggctgtgttggtttggggaactaatttccaaggacggctgcccgtggacaccaggtggactggttcactaatcaagtcagccatattgttctctggctaagtttggttccagccaacgtcatctgctcttcagttcctcactgccttcttgggatactaagacttgaattttttggggactattaagggtgttagtcttggagaagacacagcctcaccttctcacttgctgtgggtgaggggccatttaagtggactgggagacagtgcgcagtttgtatataattccctttcttgtggaacagaagactgaggcctgcaggttccgatgtgtctccatgggctgtgctcccctcttcctactgtcagtttctgaaacttctgactggcctcccagttatgcctcctcctcaagttcctggcccgtggatgttaaagctgctcgattcccaggatctcggctgccttttcctctatcttgagccctataaatgcccacgggacccccaccaccagcctcttgaagtggctccacagctcctgtccctggaacatcctgtcagtttggtcataaaccctgagccagatgaaatgagccaccgtgaacagacatctgccatgcccccaggtgggcttcggtggccctacccggtaccagttctctctgagaaactggagatgtcttgttagcataagtgtcttcattcccacctggagggtttgggagaggagcaaagcagttgaaaactagttaatgagctacaagagtcaaatagtcctctgaatggagcccccatcacaaaacagtgcccaggaggctggctcctcaagctacccatgcccagcgccctaaagcaggaccagatgctttggaattggggtgaaacacccacatggcagcctgctagcagcagtgactttgacttctggtcttaaagagtccctcacttcagccccaggagctattggtgggttttagcagttttgtctttaccgtttttagttctccttgattctttgttttcttcctttatcgtttttaggtttggtatgtgttgttttatttccatggttcctcaagtttcctttttaaacatttgcatttgctggacaattgcaattttttttaaaaaattcccctacccctgtttaaagctgaaaaatacatttggttcatgtgcattgtttacaaagcaaaaagaaaaaagaggaaaaaaaggcaaaaaatattgtgaaagaaaaaaaacaacttaatatattttggattaatatttggtatttcttttaaagtattttttgtgctgtgaacattttctgccaaagaccatgatgtgtgtctgtatgtttaagttatcgtaaatatttaaaatgtaaacatggctgttttgttatgccaccctgtaccaggattgctgccgcattccactgggtataacagtattttaattaaaaaaaaataattaaaagtgaaaaaaaaaaaacaaaannaaaaaacaanaaanaaaanaanaaanananaaaaacaananaaanagaagcgagacaacaacaagaacaacaacaacaaagacagaagagaaacaggagagcggaacgccgagatacagcggacatccacccgaggagaagagcggacgaggcggaggggccgagcgcccccccactcccaggg

SEQ ID NO: 326579 - DNA, 2776 bp, Homo sapiens
aactctcacattcctggcatagcagccgcctccggcgcgggccgaccctggggctgcgcgctggggcgcgaacagccagagcgtcggcgccacggccgagaacacatcttcgccgccgagctgagctgggccgagccggaggttgtggtgtctgactgcgctgggcaccctcgggccgcagcggtgctctggggccaggtgccaccggccattgtccaggcagctgtgtgcaagccaaagaagcatgaggacactggaagactcctcggggacagtcctgcaccgcctcatccaggagcagctgcgctacggcaacctgactgagacgcgcacgctgctagccatccagcagcaggccctgaggggtggggctggaactgggggtacagggagcccccaggcctccctggagatcctggccccagaggacagtcaggtgctgcagcaggccaccaggcaggagccccagggccaggagcaccagggcggtgagaaccacctggcagagaacaccctctaccggctatgcccacagcccagcaagggagaggagctgcccacctatgaggaggccaaagcccactcgcagtactatgcggcccagcaggcagggacccggccacatgcgggggaccgagatccccgtggggccccgggaggcagtcggaggcaggacgaggccctgcgggagctgaggcatgggcacgtgcgctcgttgagtgaacggctccttcagttgtccctggagaggaacggcgcccgggcccccagccacatgagctcctcccacagcttcccacagctggcccgcaaccagcagggccccccactgaggggcccccctgctgagggcccagagtcccgaggacccccacctcagtaccctcatgttgtactagctcatgagaccaccactgctgtcactgacccacggtaccgtgcccgcggcagcccgcacttccagcatgctgaagtcaggatcctgcaggcccaggtgcctcctgtgttcctccaacagcagcagcagtaccagtacctgcagcaatctcaggagcacccccctcccccacatccagctgctctcggccatggccccctgagctccctcagtccacctgctgtggaggggccagtgagtgcccaggcctcctcagccacctcgggcagtgcccacctggcccagatggaggccgtgctgagggagaatgccaggctgcagagagacaatgagcggctgcagagggagctggagagctctgcggagaaggctggccgcattgagaagctggaaagcgaaatccagcggctctctgaggcccatgagagcctgaccagagcctcctccaagcgtgaggccctggagaagaccatgcggaacaagatggacagtgaaatgaggaggctgcaagacttcaaccgggatcttagagagagattggaatctgcaaatcgccgcctggcaagcaagacacaggaggcccaggccggcagtcaggacatggtggccaagctgcttgctcagagctacgaacagcagcaggagcaagagaagctggagcgagagatggcactgctgcgcggcgccatcgaggaccagcggcggcgtgccgagctgctggagcaggctctgggcaatgcgcagggccgggcagctcgagccgaagaggagctgcgcaagaagcaggcctatgtggagaaagtggagcggctgcagcaggcgctcgggcagctgcaggcagcctgtgagaagcgggagcagctggagctgcgtctgcggactcgcctggagcaggaactcaaggccctgcgtgcacagcagagacaggcaggtgccccaggtggtagcagtggcagtggtgggtctccagagctcagcgccctgcgactgtcagaacaactgcgagagaaggaggagcagatcctggcgctggaggccgacatgaccaagtgggagcagaagtatttggaggaacgtgccatgaggcagtttgccatggatgcggctgccacggctgctgctcagcgtgacaccactctcatccgacattccccccagccctcacccagcagcagcttcaatgagggtctgctcactggtggccacaggcatcaggagatggaaagcaggttaaaggtgctccatgcccagatcctggagaaggatgcagtgatcaaggtccttcagcagcgctccaggagagaccctggcaaggccatccagggctccctgcggcctgccaagtcggtgccatctgttttcgcggctgcggcagcaggaacccagggctggcaagggctctcttctagtgagcgacaaacagcagacgcccctgctcggctgactacagcagacagagcacccacagaggagccagtggtcacagctccccctgctgcccatgccaaacacgggagcagagatgggagcacccagactgacggccccccagacagcacctccacctgcctgccaccggagcctgacagccttctggggtgcagcagtagccagagagcagcctctctgggtaagtcctcctgaccccacttctgtgctaggtagggccgagggggcactggggtgtgaactggaacacaaggccttttcttcccagaccccctccgggtcattgcccgcactccatggggagccgtgcatagccagaggtgagcagggtgcctggcccacctcaatgtgaacatgagggatggctggttgcatgaatagggaaattggaaaccctgattagaggcagatccagaattcagaaagaaa

SEQ ID NO: 326580 - DNA, 1074 bp, Homo sapiens
actgctttcttgacatctgctagtttgacacgtggcaccggattccatgtgcagctggtaccttggatttgaatgttcttctaaatccaatgactacttgaccttgaatgctgggagccaacaagagagagaccaagcgaaattgacttgtccttcagaggtcagtggaacgattttacaagaaagggaattcgaagcaaacaaacttcaagggatgcagcaaagtgacctcttcaaagctgaatatgtccttattgtggactccgaaggggaagatgaggctgcaagcagaaaagttgaacaaggccccccaggggggattggcaccgcagctatccggcccaagtctctagctatctcgtccagtctggtctctgatgtagtgcgtcccaaaacacaggggactgatctcaagacctcatcacatcctgaaatgcttcatgggatggcccctcagcaaaagcatgggcagactcctacaactcttccaagagcagctggtcgagaaaccaaatatgcaaatctctcctcaccaacttctacagtatctgagagtcagctgactaagcctggagtaattcgcccagtacctgtaaaatccagaatattactgaaaaaagaggaggaagtctatgaacccaaccctttcagtaaatacttggaagataacagcgacctcttttctgaacagctgagtcatccaatggtggctattcctgaacatgaagctcttgattccaaagagcaatgaagttggagcagaggctgaaaacacaggctgctgaagttttttggaatgctggtgctaaccacttgctagatttaacttttttttttttttccagaatgagtgctccctttatgagctgcagtgcagcagaaccaaaaaaaaagtttgctgcaattatatagcatcacagtgctctgctaacagccagcatagaagagatttacctacagctttttgcaccactgttctagcctttaatgccttctacttaatattaagctgaccgcaatactaacgtgcccctatatttggcagccaaataaagaagaatcgtgggtaaatag

SEQ ID NO: 326581 - DNA, 754 bp, Homo sapiens
attcagtttacctccttgttagatgatgcattttagggaatggtgcagtcaatgctaaagtgaagttaagtcatcagccaagtcatggaagggtgtgggtgtgggtgagatataacagtgctgttccttaaggcagcccctgcccctcaaaaccatcatggcactttgtaggaggccagaactgctctgctgaactgccaagagattggagtctgatgtaaaggtacagctgtttgtctttattatgccattaatagtgaaacaaggaaggatctacttaaggaataaaaataagcttttcctattgtagtataaaccatttttttgtaggagatgctatgcccaaatattaatgtataattttcaggtgtatatttttaaatttattcatcttaacctgactaccatattctcttattttacagcaatgaagttggagcagaggctgaaaacacaggctgctgaagttttttggaatgctggtgctaaccacttgctagatttaacttttttttttttttccagaatgagtgctccctttatgagctgcagtgcagcagaaccaaaaaaaaagtttgctgcaattatatagcatcacagtgctctgctaacagccagcatagaagagatttacctacagctttttgcaccactgttctagcctttaatgccttctacttaatattaagctgaccgcaatactaacgtgcccctatatttggcagccaaataaagaagaatcgtgggtaaatag

SEQ ID NO: 326582 - DNA, 1416 bp, Homo sapiens
ggcataatttgtacagtgctttgtcatctttgcagctcatcaatatcagcagctgacacaggtctctgctggtggttctgaagccaaacctctgatcttcacatttgtccccactgtcagaagactaccaacccatactcagttggctgacacctctaaattccttgttaaaattccagaagaatcaagtgataagagtccagaaactgtaaataggtctaaatccaatgactacttgaccttgaatgctgggagccaacaagagagagaccaagcgaaattgacttgtccttcagaggtcagtggaacgattttacaagaaagggaattcgaagcaaacaaacttcaagggatgcagcaaagtgacctcttcaaagctgaatatgtccttattgtggactccgaaggggaagatgaggctgcaagcagaaaagttgaacaaggccccccaggggggattggcaccgcagctatccggcccaagtctctagctatctcgtccagtctggtctctgatgtagtgcgtcccaaaacacaggggactgatctcaagacctcatcacatcctgaaatgcttcatgggatggcccctcagcaaaagcatgggcagactcctacaactcttccaagagcagctggtcgagaaaccaaatatgcaaatctctcctcaccaacttctacagtatctgagagtcagctgactaagcctggagtaattcgcccagtacctgtaaaatccagaatattactgaaaaaagaggaggaagtctatgaacccaaccctttcagtaaatacttggaagataacagcgacctcttttctgaacaggatgtaacagtccctcccaagcctgtctcgctccatcctttatatcagactaaactctatcctcctgctaagtcactgctgcatccacagaccctctcacatgctgactgtcttgccccaggacccttcagtcatctgtccttctccttgagtgatgaacaggagaattctcacaccctcctcagtcacaacgcatgcaacaagctgagtcatccaatggtggctattcctgaacatgaagctcttgattccaaagagcaatgaagttggagcagaggctgaaaacacaggctgctgaagttttttggaatgctggtgctaaccacttgctagatttaacttttttttttttttccagaatgagtgctccctttatgagctgcagtgcagcagaaccaaaaaaaaagtttgctgcaattatatagcatcacagtgctctgctaacagccagcatagaagagatttacctacagctttttgcaccactgttctagcctttaatgccttctacttaatattaagctgaccgcaatactaacgtgcccctatatttggcagccaaataaagaagaatcgtgggtaaatag

SEQ ID NO: 326583 - DNA, 2084 bp, Homo sapiens
ggcataatttgtacagtgctttgtcatctttgcagctcatcaatatcagcagctgacacaggtctctgctggtggttctgaagccaaacctctgatcttcacatttgtccccactgtcagaagactaccaacccatactcagttggctgacacctctaaattccttgttaaaattccagaagaatcaagtgataagagtccagaaactgtaaataggtctaaatccaatgactacttgaccttgaatgctgggagccaacaagagagagaccaagcgaaattgacttgtccttcagaggtcagtggaacgattttacaagaaagggaattcgaagcaaacaaacttcaagggatgcagcaaagtgacctcttcaaagctgaatatgtccttattgtggactccgaaggggaagatgaggctgcaagcagaaaagttgaacaaggccccccaggggggattggcaccgcagctatccggcccaagtctctagctatctcgtccagtctggtctctgatgtagtgcgtcccaaaacacaggggactgatctcaagacctcatcacatcctgaaatgcttcatgggatggcccctcagcaaaagcatgggcagcaatacaagaccaagtcaagctacaaggcttttgcagcaatccctacaaacacattgcttttggaacagaaggcactagatgaaccagccaagactgaaagtgtctccaaggacaacacattagaaccaccagtggagctctattttcctgcacagctcaggcagcaaactgaagagctctgtgctaccattgataaggtcttacaggattccttgtctatgcattcttctgattctccttcaaggtccccaaagacattgttgggttctgacacagtcaaaactcctacaactcttccaagagcagctggtcgagaaaccaaatatgcaaatctctcctcaccaacttctacagtatctgagagtcagctgactaagcctggagtaattcgcccagtacctgtaaaatccagaatattactgaaaaaagaggaggaagtctatgaacccaaccctttcagtaaatacttggaagataacagcgacctcttttctgaacaggatgtaacagtccctcccaagcctgtctcgctccatcctttatatcagactaaactctatcctcctgctaagtcactgctgcatccacagaccctctcacatgctgactgtcttgccccaggacccttcagtcatctgtccttctccttgagtgatgaacaggagaattctcacaccctcctcagtcacaacgcatgcaacaagctgagtcatccaatggtggctattcctgaacatgaagctcttgattccaaagagcaatgaagttggagcagaggctgaaaacacaggctgctgaagttttttggaatgctggtgctaaccacttgctagatttaacttttttttttttttccagaatgagtgctccctttatgagctgcagtgcagcagaaccaatagaagagatttacctacagctttttgcaccactgttctagcctttaatgccttctacttaatattaagctgaccgcaatactaacgtgcccctatatttggcagccaaataaagaagaatcgtgggtaaatagaagaatggctgtgactatttttcaatacaaattttatttaatgcatacatttctaactgagtcaggtttttattccccttttacttcacttttttacatgaaaaaaatcacaacttttaaagtaactaattagctttcagaagacgctgatattcagaggttctctggtgagatcttgaacatgagaaagttggtattttgtataacacacattgctttcctgttctgttgggattcggtgctgctgggacagactatgtgccaggagcagcccagtgctgatgaacatcgcgttactggagtgtctgtgtctgggataccactgtctctctgcctgtcaccacatgattcttgtgaagactactttagagttagtttgtatccaaaatcctgagagcagcagagaccatagagcaaacccatacttgatgacagtcctg

SEQ ID NO: 326584 - DNA, 862 bp, Homo sapiens
  misc_feature (847)..(848): n is a, c, g, or t
ggcataatttgtacagtgctttgtcatctttgcagctcatcaatatcagcagctgacacaggtctctgctggtggttctgaagccaaacctctgatcttcacatttgtccccactgtcagaagactaccaacccatactcagttggctgacacctctaaattccttgttaaaattccagaagaatcaagtgataagagtccagaaactgtaaataggtctaaatccaatgactacttgaccttgaatgctgggagccaacaagagagagaccaagcgaaattgacttgtccttcagaggtcagtggaacgattttacaagaaagggaattcgaagcaaacaaacttcaagggatgcagcaaagtgacctcttcaaagctgaatatgtccttattgtggactccgaaggggaagatgaggctgcaagcagaaaagttgaacaaggccccccaggggggattggcaccgcagctatccggcccaagtctctagctatctcgtccagtctggtctctgatgtagtgcgtcccaaaacacaggggactgatctcaagacctcatcacatcctgaaatgcttcatgggatggcccctcagcaaaagcatgggcagcaatacaagaccaagtcaagctacaaggcttttgcagcaatccctacaaacacattgcttttggaacagaaggcactagatgaaccagccaagactgaaagtgtctccaaggacaacacattagaaccaccagtggagactcctacaactcttccaagagcagctggtcgagaaaccaaatatgcaaatctctcctcaccaacttctacagtatctgagagtcagctgactaagccnngagtatttccccag

SEQ ID NO: 326585 - DNA, 789 bp, Homo sapiens
ggcataatttgtacagtgctttgtcatctttgcagctcatcaatatcagcagctgacacaggtctctgctggtggttctgaagccaaacctctgatcttcacatttgtccccactgtcagaagactaccaacccatactcagttggctgacacctctaaattccttgttaaaattccagaagaatcaagtgataagagtccagaaactgtaaataggtctaaatccaatgactacttgaccttgaatgctgggagccaacaagagagagaccaagcgaaattgacttgtccttcagaggtcagtggaacgattttacaagaaagggaattcgaagcaaacaaacttcaagggatgcagcaaagtgacctcttcaaagctgaatatgtccttattgtggactccgaaggggaagatgaggctgcaagcagaaaagttgaacaaggccccccaggggggattggcaccgcagctatccggcccaagtctctagctatctcgtccagtctggtctctgatgtagtgcgtcccaaaacacaggggactgatctcaagacctcatcacatcctgaaatgcttcatgggatggcccctcagcaaaagcatgggcagcaatacaagaccaagtcaagctacaaggcttttgcagcaatccctacaaacacattgcttttggaacagaagactcctacaactcttccaagagcagctggtcgagaaaccaaatatgcaaatctctcctcaccaacttctacagtatctgagagtcagctggtatgtatcttctaagt

SEQ ID NO: 326586 - DNA, 1698 bp, Homo sapiens
ggcataatttgtacagtgctttgtcatctttgcagctcatcaatatcagcagctgacacaggtctctgctggtggttctgaagccaaacctctgatcttcacatttgtccccactgtcagaagactaccaacccatactcagttggctgacacctctaaattccttgttaaaattccagaagaatcaagtgataagagtccagaaactgtaaataggtctaaatccaatgactacttgaccttgaatgctgggagccaacaagagagagaccaagcgaaattgacttgtccttcagaggtcagtggaacgattttacaagaaagggaattcgaagcaaacaaacttcaagggatgcagcaaagtgacctcttcaaagctgaatatgtccttattgtggactccgaaggggaagatgaggctgcaagcagaaaagttgaacaaggccccccaggggggattggcaccgcagctatccggcccaagtctctagctatctcgtccagtctggtctctgatgtagtgcgtcccaaaacacaggggactgatctcaagacctcatcacatcctgaaatgcttcatgggatggcccctcagcaaaagcatgggcagcaatacaagaccaagtcaagctacaaggcttttgcagcaatccctacaaacacattgcttttggaacagaaggcactagatgaaccagccaagactgaaagtgtctccaaggacaacacattagaaccaccagtggagctctattttcctgcacagctcaggcagcaaactgaagagctctgtgctaccattgataaggtcttacaggattccttgtctatgcattcttctgattctccttcaaggtccccaaagacattgttgggttctgacacagtcaaaactcctacaactcttccaagagcagctggtcgagaaaccaaatatgcaaatctctcctcaccaacttctacagtatctgagagtcagctgactaagcctggagtaattcgcccagtacctgtaaaatccagaatattactgaaaaaagaggaggaagtctatgaacccaaccctttcagtaaatacttggaagataacagcgacctcttttctgaacaggatgtaacagtccctcccaagcctgtctcgctccatcctttatatcagactaaactctatcctcctgctaagtcactgctgcatccacagaccctctcacatgctgactgtcttgccccaggacccttcagtcatctgtccttctccttgagtgatgaacaggagaattctcacaccctcctcagtcacaacgcatgcaacaagctgagtcatccaatggtggctattcctgaacatgaagctcttgattccaaagagcaatgaagttggagcagaggctgaaaacacaggctgctgaagttttttggaatgctggtgctaaccacttgctagatttaacttttttttttttttccagaatgagtgctccctttatgagctgcagtgcagcagaaccaaaaaaaaagtttgctgcaattatatagcatcacagtgctctgctaacagccagcatagaagagatttacctacagctttttgcaccactgttctagcctttaatgccttctacttaatattaagctgaccgcaatactaacgtgcccctatatttggcagccaaataaagaagaatcgtgggtaaatag

SEQ ID NO: 326587 - DNA, 2138 bp, Homo sapiens
ggcataatttgtacagtgctttgtcatctttgcagctcatcaatatcagcagctgacacaggtctctgctggtggttctgaagccaaacctctgatcttcacatttgtccccactgtcagaagactaccaacccatactcagttggctgacacctctaaattccttgttaaaattccagaagaatcaagtgataagagtccagaaactgtaaataggtctaaatccaatgactacttgaccttgaatgctgggagccaacaagagagagaccaagcgaaattgacttgtccttcagaggtcagtggaacgattttacaagaaagggaattcgaagcaaacaaacttcaagggatgcagcaaagtgacctcttcaaagctgaatatgtccttattgtggactccgaaggggaagatgaggctgcaagcagaaaagttgaacaaggccccccaggggggattggcaccgcagctatccggcccaagtctctagctatctcgtccagtctggtctctgatgtagtgcgtcccaaaacacaggggactgatctcaagacctcatcacatcctgaaatgcttcatgggatggcccctcagcaaaagcatgggcagcaatacaagaccaagtcaagctacaaggcttttgcagcaatccctacaaacacattgcttttggaacagaaggcactagatgaaccagccaagactgaaagtgtctccaaggacaacacattagaaccaccagtggagctctattttcctgcacagctcaggcagcaaactgaagagctctgtgctaccattgataaggtcttacaggattccttgtctatgcattcttctgattctccttcaaggtccccaaagacattgttgggttctgacacagtcaaaactcctacaactcttccaagagcagctggtcgagaaaccaaatatgcaaatctctcctcaccaacttctacagtatctgagagtcagctgactaagcctggagtaattcgcccagtacctgtaaaatccagaatattactgaaaaaagaggaggaagtctatgaacccaaccctttcagtaaatacttggaagataacagcgacctcttttctgaacaggatgtaacagtccctcccaagcctgtctcgctccatcctttatatcagactaaactctatcctcctgctaagtcactgctgcatccacagaccctctcacatgctgactgtcttgccccaggacccttcagtcatctgtccttctccttgagtgatgaacaggagaattctcacaccctcctcagtcacaacgcatgcaacaagctgagtcatccaatggtggctattcctgaacatgaagctcttgattccaaagagcaatgaagttggagcagaggctgaaaacacaggctgctgaagttttttggaatgctggtgctaaccacttgctagatttaacttttttttttttttccagaatgagtgctccctttatgagctgcagtgcagcagaaccaaaaaaaaagtttgctgcaattatatagcatcacagtgctctgctaacagccagcatagaagagatttacctacagctttttgcaccactgttctagcctttaatgccttctacttaatattaagctgaccgcaatactaacgtgcccctatatttggcagccaaataaagaagaatcgtgggtaaatagaagaatggctgtgactatttttcaatacaaattttatttaatgcatacatttctaactgagtcaggtttttattccccttttacttcacttttttacatgaaaaaaatcacaacttttaaagtaactaattagctttcagaagacgctgatattcagaggttctctggtgagatcttgaacatgagaaagttggtattttgtataacacacattgctttcctgttctgttgggattcggtgctgctgggacagactatgtgccaggagcagcccagtgctgatgaacatcgcgttactggagtgtctgtgtctgggataccactgtctctctgcctgtcaccacatgattcttgtgaagactactttagagttagtttgtatccaaaatcctgagagcagcagagaccatagagcaaacccatacttgatgacagtcctg

SEQ ID NO: 326588 - DNA, 1165 bp, Homo sapiens
ggcataatttgtacagtgctttgtcatctttgcagctcatcaatatcagcagctgacacaggtctctgctggtggttctgaagccaaacctctgatcttcacatttgtccccactgtcagaagactaccaacccatactcagttggctgacacctctaaattccttgttaaaattccagaagaatcaagtgataagagtccagaaactgtaaataggtctaaatccaatgactacttgaccttgaatgctgggagccaacaagagagagaccaagcgaaattgacttgtccttcagaggtcagtggaacgattttacaagaaagggaattcgaagcaaacaaacttcaagggatgcagcaaagtgacctcttcaaagctgaatatgtccttattgtggactccgaaggggaagatgaggctgcaagcagaaaagttgaacaaggccccccaggggggattggcaccgcagctatccggcccaagtctctagctatctcgtccagtctggtctctgatgtagtgcgtcccaaaacacaggggactgatctcaagacctcatcacatcctgaaatgcttcatgggatggcccctcagcaaaagcatgggcagttaacttcttctcccactacctctgagcagcttgcctgtaaaccacctgctttctcctttgtttctccaactaatccgaacacaccacccgacccagttaacctcgagggagcctctgtcctagaggagttccacactaggaggctggatgtcggtggggccgtggtggaagaatcagctacgtattttcaaactaccgctcactctacacccttttctgcatcgaagggcacctcctcgacgttactgtttccccattccactcaactatcaggttctaatttacccagttcaactgcagcagatccaaagcctggactgacctctgaagttctcaagaagacaactttaacctcgcatgtccttagtcacggagaaagtccgagaacctcttcttctccaccgtcctccagtgcttctctgaagtcgaattcggcctcgtacataccagtccgcattgtcacgcattcactctctccgagccccaaaccatttacctcctctttccacggctcttcttccaccatctgcagccaaatgtcatctagtggaaat

SEQ ID NO: 326589 - DNA, 1578 bp, Homo sapiens
atccttcgcgtactgacggaaacactggcggcacatattgaggccgtatttcaggatcagctgccggttcgaacacacgcgagaagagcaaagaagttaaaagagaagtgtctgtgtggctccttccacgtgggtgaaggactgtgccagctgagaggtggtagagcaggaagctgcctgagacctccatttatttggtgaaaaaccgccgcccttaagagagcaagtcgagggccgtgtaggagttggaggagagaaatgaaattttggaagagtcagcagaagatcgtcagtatttaaacagatcacatcatgcgtgagtacaagctagtggtccttggttcaggaggcgttgggaagtctgctctgacagttcagtttgttcagggaatttttgttgaaaaatatgacccaacgatagaagattcctacagaaagcaagttgaagtcgattgccaacagtgtatgctcgaaatcctggatactgcagggacagagcaatttacagcaatgagggatttgtatatgaagaacggccaaggttttgcactagtatattctattacagctcagtccacgtttaacgacttacaggacctgagggaacagattttacgggttaaggacacggaagatgttccaatgattttggttggcaataaatgtgacctggaagatgagcgagtagttggcaaagagcagggccagaatttagcaagacagtggtgtaactgtgcctttttagaatcttctgcaaagtcaaagatcaatgttaatgagatattttatgacctggtcagacagataaataggaaaacaccagtggaaaagaagaagcctaaaaagaaatcatgtctgctgctctaggcccatagtcagcagcagctctgagccagattacaggaatgaagaactgttgcctaattggaaagtgccagcattccagacttcaaaaataaaaaatctgaagaggcttctcctgttttatatattatgtgaagaatttagatcttatattggtttgcacaagttccctggagaaaaaaattgctctgtgtatatctcttggaaaataagacaatagtatttctcctttgcaatagcagttataacagatgtgaaaatatacttgactctaatatgattatacaaaagagcatggatgcatttcaaatgttagatattgctactataatcaaatgatttcatattgatctttttatcatgatcctccctatcaagcactaaaaagttgaaccattatactttatatctgtaatgatactgattatgaaatgtcccctcaaactcattgcagcagataacttttttgagtcattgacttcattttatatttaaaaaattatggaatatcatctgtcattatattctaattaaaattgtgcataatgctttggaaaaatgggtcttttataggaaaaaaactgggataactgatttctatggctttcaaagctaaaatatataatatactaaaccaactctaatattgcttcttgtgttttactgtcagattaaattacagcttttatggatgattaaattttagtacatttt

SEQ ID NO: 326590 - DNA, 1532 bp, Homo sapiens
ttctggaggaggcgccgccgccgctcccgaggcccctgccgccgccgctcccgctgctgtcgccgcgcagagccggagcaggagccacggccgagaggagggaggaggaggaggaggaggtggaggaggtggaggaggtggaggaggcgccggaccggggggatcgtcagtatttaaacagatcacatcatgcgtgagtacaagctagtggtccttggttcaggaggcgttgggaagtctgctctgacagttcagtttgttcagggaatttttgttgaaaaatatgacccaacgatagaagattcctacagaaagcaagttgaagtcgattgccaacagtgtatgctcgaaatcctggatactgcagggacagagcaatttacagcaatgagggatttgtatatgaagaacggccaaggttttgcactagtatattctattacagctcagtccacgtttaacgacttacaggacctgagggaacagattttacgggttaaggacacggaagatgttccaatgattttggttggcaataaatgtgacctggaagatgagcgagtagttggcaaagagcagggccagaatttagcaagacagtggtgtaactgtgcctttttagaatcttctgcaaagtcaaagatcaatgttaatgagatattttatgacctggtcagacagataaataggaaaacaccagtggaaaagaagaagcctaaaaagaaatcatgtctgctgctctaggcccatagtcagcagcagctctgagccagattacaggaatgaagaactgttgcctaattggaaagtgccagcattccagacttcaaaaataaaaaatctgaagaggcttctcctgttttatatattatgtgaagaatttagatcttatattggtttgcacaagttccctggagaaaaaaattgctctgtgtatatctcttggaaaataagacaatagtatttctcctttgcaatagcagttataacagatgtgaaaatatacttgactctaatatgattatacaaaagagcatggatgcatttcaaatgttagatattgctactataatcaaatgatttcatattgatctttttatcatgatcctccctatcaagcactaaaaagttgaaccattatactttatatctgtaatgatactgattatgaaatgtcccctcaaactcattgcagcagataacttttttgagtcattgacttcattttatatttaaaaaattatggaatatcatctgtcattatattctaattaaaattgtgcataatgctttggaaaaatgggtcttttataggaaaaaaactgggataactgatttctatggctttcaaagctaaaatatataatatactaaaccaactctaatattgcttcttgtgttttactgtcagattaaattacagcttttatggatgattaaattttagtacattttatattttagctttgaaagccatagaaatcagttatcccagtttttttcctataaaagacccatttttccgtcgacgc

SEQ ID NO: 326591 - DNA, 2233 bp, Homo sapiens
  misc_feature (9)..(9): n is a, c, g, or t
ctcgtgcgnagagagagagagagagagagagagagagagagagagagagagagtagcagttataacagatgtgaaaatatacttgactctaatatgattatacaaaagagcatggatgcatttcaaatgttagatattgctactataatcaaatgatttcatattgatctttttatcatgatcctccctatcaagcactaaaaagttgaaccattatactttatatctgtaatgatactgattatgaaatgtcccctcaaactcattgcagcagataacttttttgagtcattgacttcattttatatttaaaaaattatggaatatcatctgtcattatattctaattaaaattgtgcataatgctttggaaaaatgggtcttttataggaaaaaaactgggataactgatttctatggctttcaaagctaaaatatataatatactaaaccaactctaatattgcttcttgtgttttactgtcagattaaattacagcttttatggatgattaaattttagtacattttcatttggtttgtgtgtttttgttattgtttatagattaaagcgtttattttataatgaccacattgttttaaatgcgacagtagctcctttctgcctagtatctgcagaacactggctttaaactatactaagtaactggtgatttctctaggaacagacctcgcactttctgttctaaatatatttattcctactatacagtaaaatacatcagacaacatagaatagttttgtatattctctcttgatcttaaagattgtatcttattgaatatcccactgtatattatttttatatgtaaaaatataagtttaatactgtatcagggtttaacttttactatttcagatcttccacagcttgtaatttcatcaagggaatccttttgcattgttaatttgttgggtgtgagtccaccaatgaagtgttatgtgaaaaatttcaaacttgctttataatagattgaagaatttgagagaagtgagagaaagttaaaacacataaaaggaatgtgttacttttgcttaaactacttatggaatagtatggtagtagtaatatggaagagattgctaagttaaaattgtagcttcctatatagtggtgctttttcttttccttcccagttattttcctctttacaaaagatagggcttaagtaagacatggacccagggtgatactacttatgtagtctctataaagagaggtagaacaaaaagcttgttagccaattaagttctggaaaaggaaagaaacaagcttagaaaaccctgtgccttgtcctcaaatattaaggaggagacagaccagtcctagaaagtctaagtcattgctcagggatctctagatactgtctctttgcaactaggtatgaagaagtgttcatgccttgctgagattttccaggcatgtggtcagcctgtcacttactaaactgaaattttaaaatcaggtttcaaatgttaagctttgaccaacctgagaaaatgttaaagtattgtttttaaaaaaatggaaattttttttgtttgtgtttttgttttagtttcgaataaacttagttaccttacacttcccttctacttatccaattatgcatatgtctgggattgaggggccaaaactatagcgaacttgaatgaagtattagggccagttgtcaggtcagggtggcatcttttattttaaggtcctctaaagtcattctgctttaaaacacccctcaaacatacctttaaacttaagatcatagacagacatctcatcaaccagtaaaactttctaaatactaccttgtcacatctattgtgtagttatttaacagattaaatagaagtcatttaataagactccaagtctcagtctgcttgactagtagcataaactcagtctattctattttagaatgtggtggagaaagatgatagttattagattcctttgtcacatcttatacagtccacttgggttaaaggtggaactgtcaagaaaaacgcctttctggcacacagtgatatgcagagcaggaccagctgaagtcagatgtgcaaggaaatctgtggttgctgagcaggatgaaaagtatcctgttagaaagtgagataggtgtgtttttatattgtcctaatgtgaactccttagtcttggttccaaagggaagggtacctgaaaataaatgtatttttatagctgaaaaa

SEQ ID NO: 326592 - DNA, 1080 bp, Homo sapiens
ttctggaggaggcgccgccgccgctcccgaggcccctgccgccgccgctcccgctgctgtcgccgcgcagagccggagcaggagccacggccgagaggagggaggaggaggaggaggaggtggaggaggtggaggaggtggaggaggcgccggaccgggggggatagattcccagaagtgggataactggatcagagggtgattaccctgtgtataagagtatgtgtctcactgcaccttcaatggcattgagtagatcgtcagtatttaaacagatcacatcatgcgtgagtacaagctagtggtccttggttcaggaggcgttgggaagtctgctctgacagttcagtttgttcagggaatttttgttgaaaaatatgacccaacgatagaagattcctacagaaagcaagttgaagtcgattgccaacagtgtatgctcgaaatcctggatactgcagggacagagcaatttacagcaatgagggatttgtatatgaagaacggccaaggttttgcactagtatattctattacagctcagtccacgtttaacgacttacaggacctgagggaacagattttacgggttaaggacacggaagatgttccaatgattttggttggcaataaatgtgacctggaagatgagcgagtagttggcaaagagcagggccagaatttagcaagacagtggtgtaactgtgcctttttagaatcttctgcaaagtcaaagatcaatgttaatgagatattttatgacctggtcagacagataaataggaaaacaccagtggaaggctccggaggtggaaccggtggtggaggtaccccttctaagacaagcaacactatccgtgttttcttgccgaacaagcaaagaacagtggtcaatgtgcgaaatggaatgagcttgcatgactgccttatgaaagcactcaaggtgaggggcctgcaaccagagagctgtgcagtgttcagacttctccacgaacacaaaggtaaaaaagcacgcttagattggaatactgaagctgcgtctttgattggagaagaacttcacgtagatttcctgggcgg

SEQ ID NO: 326593 - DNA, 581 bp, Homo sapiens
ttctggaggaggcgccgccgccgctcccgaggcccctgccgccgccgctcccgctgctgtcgccgcgcagagccggagcaggagccacggccgagaggagggaggaggaggaggaggaggtggaggaggtggaggaggtggaggaggcgccggaccgggggggatagattcccagaagtgggataactggatcagagggtgattaccctgtgtataagagtatgtgtctcactgcaccttcaatggcattgagtagatcgtcagtatttaaacagatcacatcatgcgtgagtacaagctagtggtccttggttcaggaggcgttgggaagtctgctctgacagttcagtttgttcagggaatttttgttgaaaaatatgacccaacgatagaagattcctacagaaagcaagttgaagtcgattgccaacagtgtatgctcgaaatcctggatactgcagggacagagcaatttacagctgctcgggaggctgaggcaggagaatgggttgaacccgggaggcggacgtttcagtgagccgagatcgtgccactgcactccagagtgagactctgtctca

SEQ ID NO: 326594 - DNA, 616 bp, Homo sapiens
ttttttcctgaatgggatgttggtctcctagtttgagactttaaagttgattctttataatattactgttttaaataacactgggacagacattttttgtacatgtatctttgattgcatctctgttttttttttcttcctgtaggatagattcccagaagtgggataactggatcagagggtgattaccctgtgtataagagtatgtgtctcactgcaccttcaatggcattgagtaggtcagtttttacaatctttgccaatgtgatagatatctgttacattcttgggtggtaatagcagaaatcctcatattattaataatctgtaaaaccatcatagtgtatgaaagaaatttgcaattgtcctgaaatgagtttctttaaaaatattttaggtaaaagtaatctgtgaccaaaaaaaaaattactgattaaagttggaatttcagcatttttttttttggagagctagaattttaatgttcttttattaaaatgacaaacatgagaaagcttgttttatagtatgtaataaatataaatattatgtaaaactaaattatttcagatagatgaggggggtagtcacatggttctgactttgaaaaaacaaa

SEQ ID NO: 326595 - DNA, 491 bp, Homo sapiens
gagatagaataaaaatatcattgtcttcctttgtacagacaggattgtcagatgtaatgggaaacactataattgagtataactaagtataactgaggataattcaagttgatcagttatagactcctcttgtaaacttctatttttgattttttaaaacatttttaaagggaatttaaaatagcactgttactgtagctgtttagcataatttagttctcaagttatgatcagctaaaatcattatttttttattttattgaatacctgcttgtttagtaccattttctgacatcaagagattaaccatacatatatgtatatctgtatccaatgtcttagattacaggaatgaagaactgttgcctaattggaaagtgccagcattccagacttcaaaaataaaaaatctgaagaggcttctcctgttttatatattatgtgaagaatttagatcttatattggtttgcacaagttccctggagaaaaa

SEQ ID NO: 326596 - DNA, 3157 bp, Homo sapiens
ttctggaggaggcgccgccgccgctcccgaggcccctgccgccgccgctcccgctgctgtcgccgcgcagagccggagcaggagccacggccgagaggagggaggaggaggaggaggaggtggaggaggtggaggaggtggaggaggcgccggaccggggggatcgtcagtatttaaacagatcacatcatgcgtgagtacaagctagtggtccttggttcaggaggcgttgggaagtctgctctgacagttcagtttgttcagggaatttttgttgaaaaatatgacccaacgatagaagattcctacagaaagcaagttgaagtcgattgccaacagtgtatgctcgaaatcctggatactgcagggacagagcaatttacagcaatgagggatttgtatatgaagaacggccaaggttttgcactagtatattctattacagctcagtccacgtttaacgacttacaggacctgagggaacagattttacgggttaaggacacggaagatgttccaatgattttggttggcaataaatgtgacctggaagatgagcgagtagttggcaaagagcagggccagaatttagcaagacagtggtgtaactgtgcctttttagaatcttctgcaaagtcaaagatcaatgttaatgagatattttatgacctggtcagacagataaataggaaaacaccagtggaaaagaagaagcctaaaaagaaatcatgtctgctgctctaggcccatagtcagcagcagctctgagccagattacaggaatgaagaactgttgcctaattggaaagtgccagcattccagacttcaaaaataaaaaatctgaagaggcttctcctgttttatatattatgtgaagaatttagatcttatattggtttgcacaagttccctggagaaaaaaattgctctgtgtatatctcttggaaaataagacaatagtatttctcctttgcaatagcagttataacagatgtgaaaatatacttgactctaatatgattatacaaaagagcatggatgcatttcaaatgttagatattgctactataatcaaatgatttcatattgatctttttatcatgatcctccctatcaagcactaaaaagttgaaccattatactttatatctgtaatgatactgattatgaaatgtcccctcaaactcattgcagcagataacttttttgagtcattgacttcattttatatttaaaaaattatggaatatcatctgtcattatattctaattaaaattgtgcataatgctttggaaaaatgggtcttttataggaaaaaaactgggataactgatttctatggctttcaaagctaaaatatataatatactaaaccaactctaatattgcttcttgtgttttactgtcagattaaattacagcttttatggatgattaaattttagtacattttcatttggtttgtgtgtttttgttattgtttatagattaaagcgtttattttataatgaccacattgttttaaatgcgacagtagctcctttctgcctagtatctgcagaacactggctttaaactatactaagtaactggtgatttctctaggaacagacctcgcactttctgttctaaatatatttattcctactatacagtaaaatacatcagacaacatagaatagttttgtatattctctcttgatcttaaagattgtatcttattgaatatcccactgtatattatttttatatgtaaaaatataagtttaatactgtatcagggtttaacttttactatttcagatcttccacagcttgtaatttcatcaagggaatccttttgcattgttaatttgttgggtgtgagtccaccaatgaagtgttatgtgaaaaatttcaaacttgctttataatagattgaagaatttgagagaagtgagagaaagttaaaacacataaaaggaatgtgttacttttgcttaaactacttatggaatagtatggtagtagtaatatggaagagattgctaagttaaaattgtagcttcctatatagtggtgctttttcttttccttcccagttattttcctctttacaaaagatagggcttaagtaagacatggacccagggtgatactacttatgtagtctctataaagagaggtagaacaaaaagcttgttagccaattaagttctggaaaaggaaagaaacaagcttagaaaaccctgtgccttgtcctcaaatattaaggaggagacagaccagtcctagaaagtctaagtcattgctcagggatctctagatactgtctctttgcaactaggtatgaagaagtgttcatgccttgctgagattttccaggcatgtggtcagcctgtcacttactaaactgaaattttaaaatcaggtttcaaatgttaagctttgaccaacctgagaaaatgttaaagtattgtttttaaaaaaatggaaattttttttgtttgtgtttttgttttagtttcgaataaacttagttaccttacacttcccttctacttatccaattatgcatatgtctgggattgaggggccaaaactatagcgaacttgaatgaagtattagggccagttgtcaggtcagggtggcatcttttattttaaggtcctctaaagtcattctgctttaaaacacccctcaaacatacctttaaacttaagatcatagacagacatctcatcaaccagtaaaactttctaaatactaccttgtcacatctattgtgtagttatttaacagattaaatagaagtcatttaataagactccaagtctcagtctgcttgactagtagcataaactcagtctattctattttagaatgtggtggagaaagatgatagttattagattcctttgtcacatcttatacagtccacttgggttaaaggtggaactgtcaagaaaaacgcctttctggcacacagtgatatgcagagcaggaccagctgaagtcagatgtgcaaggaaatctgtggttgctgagcaggatgaaaagtatcctgttagaaagtgagataggtgtgtttttatattgtcctaatgtgaactccttagtcttggttccaaagggaagggtacctgaaaataaatgtatttttatagctgaaaaa

SEQ ID NO: 326597 - DNA, 3251 bp, Homo sapiens
ttctggaggaggcgccgccgccgctcccgaggcccctgccgccgccgctcccgctgctgtcgccgcgcagagccggagcaggagccacggccgagaggagggaggaggaggaggaggaggtggaggaggtggaggaggtggaggaggcgccggaccgggggggatagattcccagaagtgggataactggatcagagggtgattaccctgtgtataagagtatgtgtctcactgcaccttcaatggcattgagtagatcgtcagtatttaaacagatcacatcatgcgtgagtacaagctagtggtccttggttcaggaggcgttgggaagtctgctctgacagttcagtttgttcagggaatttttgttgaaaaatatgacccaacgatagaagattcctacagaaagcaagttgaagtcgattgccaacagtgtatgctcgaaatcctggatactgcagggacagagcaatttacagcaatgagggatttgtatatgaagaacggccaaggttttgcactagtatattctattacagctcagtccacgtttaacgacttacaggacctgagggaacagattttacgggttaaggacacggaagatgttccaatgattttggttggcaataaatgtgacctggaagatgagcgagtagttggcaaagagcagggccagaatttagcaagacagtggtgtaactgtgcctttttagaatcttctgcaaagtcaaagatcaatgttaatgagatattttatgacctggtcagacagataaataggaaaacaccagtggaaaagaagaagcctaaaaagaaatcatgtctgctgctctaggcccatagtcagcagcagctctgagccagattacaggaatgaagaactgttgcctaattggaaagtgccagcattccagacttcaaaaataaaaaatctgaagaggcttctcctgttttatatattatgtgaagaatttagatcttatattggtttgcacaagttccctggagaaaaaaattgctctgtgtatatctcttggaaaataagacaatagtatttctcctttgcaatagcagttataacagatgtgaaaatatacttgactctaatatgattatacaaaagagcatggatgcatttcaaatgttagatattgctactataatcaaatgatttcatattgatctttttatcatgatcctccctatcaagcactaaaaagttgaaccattatactttatatctgtaatgatactgattatgaaatgtcccctcaaactcattgcagcagataacttttttgagtcattgacttcattttatatttaaaaaattatggaatatcatctgtcattatattctaattaaaattgtgcataatgctttggaaaaatgggtcttttataggaaaaaaactgggataactgatttctatggctttcaaagctaaaatatataatatactaaaccaactctaatattgcttcttgtgttttactgtcagattaaattacagcttttatggatgattaaattttagtacattttcatttggtttgtgtgtttttgttattgtttatagattaaagcgtttattttataatgaccacattgttttaaatgcgacagtagctcctttctgcctagtatctgcagaacactggctttaaactatactaagtaactggtgatttctctaggaacagacctcgcactttctgttctaaatatatttattcctactatacagtaaaatacatcagacaacatagaatagttttgtatattctctcttgatcttaaagattgtatcttattgaatatcccactgtatattatttttatatgtaaaaatataagtttaatactgtatcagggtttaacttttactatttcagatcttccacagcttgtaatttcatcaagggaatccttttgcattgttaatttgttgggtgtgagtccaccaatgaagtgttatgtgaaaaatttcaaacttgctttataatagattgaagaatttgagagaagtgagagaaagttaaaacacataaaaggaatgtgttacttttgcttaaactacttatggaatagtatggtagtagtaatatggaagagattgctaagttaaaattgtagcttcctatatagtggtgctttttcttttccttcccagttattttcctctttacaaaagatagggcttaagtaagacatggacccagggtgatactacttatgtagtctctataaagagaggtagaacaaaaagcttgttagccaattaagttctggaaaaggaaagaaacaagcttagaaaaccctgtgccttgtcctcaaatattaaggaggagacagaccagtcctagaaagtctaagtcattgctcagggatctctagatactgtctctttgcaactaggtatgaagaagtgttcatgccttgctgagattttccaggcatgtggtcagcctgtcacttactaaactgaaattttaaaatcaggtttcaaatgttaagctttgaccaacctgagaaaatgttaaagtattgtttttaaaaaaatggaaattttttttgtttgtgtttttgttttagtttcgaataaacttagttaccttacacttcccttctacttatccaattatgcatatgtctgggattgaggggccaaaactatagcgaacttgaatgaagtattagggccagttgtcaggtcagggtggcatcttttattttaaggtcctctaaagtcattctgctttaaaacacccctcaaacatacctttaaacttaagatcatagacagacatctcatcaaccagtaaaactttctaaatactaccttgtcacatctattgtgtagttatttaacagattaaatagaagtcatttaataagactccaagtctcagtctgcttgactagtagcataaactcagtctattctattttagaatgtggtggagaaagatgatagttattagattcctttgtcacatcttatacagtccacttgggttaaaggtggaactgtcaagaaaaacgcctttctggcacacagtgatatgcagagcaggaccagctgaagtcagatgtgcaaggaaatctgtggttgctgagcaggatgaaaagtatcctgttagaaagtgagataggtgtgtttttatattgtcctaatgtgaactccttagtcttggttccaaagggaagggtacctgaaaataaatgtatttttatagctgaaaaa

SEQ ID NO: 326598 - DNA, 3160 bp, Homo sapiens
  misc_feature (140)..(140): n is a, c, g, or t
ctacctgttttggtagccccctcttgtgattaaacgtttgcttgtaaggttttgccccttattctccttttcatacatgtaaagaacttgctgtgctcctttatagcctacaggtaaacttctcttctagtgagagtatngacaggagatggcttatattcccctgtttttgtaaggggaatatcctcagggttggcttcctcatttttgctgaaactagctgcactgaacgtctcataggatgaggtcacagttcagtttgttcagggaatttttgttgaaaaatatgacccaacgatagaagattcctacagaaagcaagttgaagtcgattgccaacagtgtatgctcgaaatcctggatactgcagggacagagcaatttacagcaatgagggatttgtatatgaagaacggccaaggttttgcactagtatattctattacagctcagtccacgtttaacgacttacaggacctgagggaacagattttacgggttaaggacacggaagatgttccaatgattttggttggcaataaatgtgacctggaagatgagcgagtagttggcaaagagcagggccagaatttagcaagacagtggtgtaactgtgcctttttagaatcttctgcaaagtcaaagatcaatgttaatgagatattttatgacctggtcagacagataaataggaaaacaccagtggaaaagaagaagcctaaaaagaaatcatgtctgctgctctaggcccatagtcagcagcagctctgagccagattacaggaatgaagaactgttgcctaattggaaagtgccagcattccagacttcaaaaataaaaaatctgaagaggcttctcctgttttatatattatgtgaagaatttagatcttatattggtttgcacaagttccctggagaaaaaaattgctctgtgtatatctcttggaaaataagacaatagtatttctcctttgcaatagcagttataacagatgtgaaaatatacttgactctaatatgattatacaaaagagcatggatgcatttcaaatgttagatattgctactataatcaaatgatttcatattgatctttttatcatgatcctccctatcaagcactaaaaagttgaaccattatactttatatctgtaatgatactgattatgaaatgtcccctcaaactcattgcagcagataacttttttgagtcattgacttcattttatatttaaaaaattatggaatatcatctgtcattatattctaattaaaattgtgcataatgctttggaaaaatgggtcttttataggaaaaaaactgggataactgatttctatggctttcaaagctaaaatatataatatactaaaccaactctaatattgcttcttgtgttttactgtcagattaaattacagcttttatggatgattaaattttagtacattttcatttggtttgtgtgtttttgttattgtttatagattaaagcgtttattttataatgaccacattgttttaaatgcgacagtagctcctttctgcctagtatctgcagaacactggctttaaactatactaagtaactggtgatttctctaggaacagacctcgcactttctgttctaaatatatttattcctactatacagtaaaatacatcagacaacatagaatagttttgtatattctctcttgatcttaaagattgtatcttattgaatatcccactgtatattatttttatatgtaaaaatataagtttaatactgtatcagggtttaacttttactatttcagatcttccacagcttgtaatttcatcaagggaatccttttgcattgttaatttgttgggtgtgagtccaccaatgaagtgttatgtgaaaaatttcaaacttgctttataatagattgaagaatttgagagaagtgagagaaagttaaaacacataaaaggaatgtgttacttttgcttaaactacttatggaatagtatggtagtagtaatatggaagagattgctaagttaaaattgtagcttcctatatagtggtgctttttcttttccttcccagttattttcctctttacaaaagatagggcttaagtaagacatggacccagggtgatactacttatgtagtctctataaagagaggtagaacaaaaagcttgttagccaattaagttctggaaaaggaaagaaacaagcttagaaaaccctgtgccttgtcctcaaatattaaggaggagacagaccagtcctagaaagtctaagtcattgctcagggatctctagatactgtctctttgcaactaggtatgaagaagtgttcatgccttgctgagattttccaggcatgtggtcagcctgtcacttactaaactgaaattttaaaatcaggtttcaaatgttaagctttgaccaacctgagaaaatgttaaagtattgtttttaaaaaaatggaaattttttttgtttgtgtttttgttttagtttcgaataaacttagttaccttacacttcccttctacttatccaattatgcatatgtctgggattgaggggccaaaactatagcgaacttgaatgaagtattagggccagttgtcaggtcagggtggcatcttttattttaaggtcctctaaagtcattctgctttaaaacacccctcaaacatacctttaaacttaagatcatagacagacatctcatcaaccagtaaaactttctaaatactaccttgtcacatctattgtgtagttatttaacagattaaatagaagtcatttaataagactccaagtctcagtctgcttgactagtagcataaactcagtctattctattttagaatgtggtggagaaagatgatagttattagattcctttgtcacatcttatacagtccacttgggttaaaggtggaactgtcaagaaaaacgcctttctggcacacagtgatatgcagagcaggaccagctgaagtcagatgtgcaaggaaatctgtggttgctgagcaggatgaaaagtatcctgttagaaagtgagataggtgtgtttttatattgtcctaatgtgaactccttagtcttggttccaaagggaagggtacctgaaaataaatgtatttttatagctgaaaaa

SEQ ID NO: 326599 - DNA, 1310 bp, Homo sapiens
ttctggaggaggcgccgccgccgctcccgaggcccctgccgccgccgctcccgctgctgtcgccgcgcagagccggagcaggagccacggccgagaggagggaggaggaggaggaggaggtggaggaggtggaggaggtggaggaggcgccggaccggggggatcgtcagtatttaaacagatcacatcatgcgtgagtacaagctagtggtccttggttcaggaggcgttgggaagtctgctctgacagttcagtttgttcagggaatttttgttgaaaaatatgacccaacgatagaagattcctacagaaagcaagttgaagtcgattgccaacagtgtatgctcgaaatcctggatactgcagggacagagcaatttacagcaatgagggatttgtatatgaagaacggccaaggttttgcactagtatattctattacagctcagtccacgtttaacgacttacaggacctgagggaacagattttacgggttaaggacacggaagatgttccaatgattttggttggcaataaatgtgacctggaagatgagcgagtagttggcaaagagcagggccagaatttagcaagacagtggtgtaactgtgcctttttagaatcttctgcaaagtcaaagatcaatgttaatgagatattttatgacctggtcagacagataaataggaaaacaccagtggaaaagaagaagcctaaaaagaaatcatgtctgctgctctaggcccatagtcagcagcagctctgagccagattacaggaatgaagaactgttgcctaattggaaagtgccagcattccagacttcaaaaataaaaaatctgaagaggcttctcctgttttatatattatgtgaagaatttagatcttatattggtttgcacaagttccctggagaaaaaaattgctctgtgtatatctcttggaaaataagacaatagtatttctcctttgcaatagcagttataacagatgtgaaaatatacttgactctaatatgattatacaaaagagcatggatgcatttcaaatgttagatattgctactataatcaaatgatttcatattgatctttttatcatgatcctccctatcaagcactaaaaagttgaaccattatactttatatctgtaatgatactgattatgaaatgtcccctcaaactcattgcagcagataacttttttgagtcattgacttcattttatatttaaaaaattatggaatatcatctgtcattatattctaattaaaattgtgcataatgctttggaaaaatgggtctttt

SEQ ID NO: 326600 - DNA, 4242 bp, Homo sapiens
ggcggactacccagagggctgccgccgcctctccaagttcttgtggcccccgcggtgcggagtatggggcgctgatggccatggagggctactggcgcttcctggcgctgctggggtcggcactgctcgtcggcttcctgtcggtgatcttcgccctcgtctgggtcctccactaccgagaggggcttggctgggatgggagcgcactagagtttaactggcacccagtgctcatggtcaccggcttcgtcttcatccagggcatcgccatcatcgtctacagactgccgtggacctggaaatgcagcaagctcctgatgaaatccatccatgcagggttaaatgcagttgctgccattcttgcaattatctctgtggtggccgtgtttgagaaccacaatgttaacaatatagccaatatgtacagtctgcacagctgggttggactgatagctgtcatatgctatttgttacagcttctttcaggtttttcagtctttctgcttccatgggctccgctttctctccgagcatttctcatgcccatacatgtttattctggaattgtcatctttggaacagtgattgcaacagcacttatgggattgacagagaaactgattttttccctgagagatcctgcatacagtacattcccgccagaaggtgttttcgtaaatacgcttggccttctgatcctggtgttcggggccctcattttttggatagtcaccagaccgcaatggaaacgtcctaaggagccaaattctaccattcttcatccaaatggaggcactgaacagggagcaagaggttccatgccagcctactctggcaacaacatggacaaatcagattcagagttaaacagtgaagtagcagcaaggaaaagaaacttagctctggatgaggctgggcagagatctaccatgtaaaatgttgtagagatagagccatataacgtcacgtttcaaaactagctctacagttttgcttctcctattagccatatgataattgggctatgtagtatcaatatttactttaatcacaaaggatggtttcttgaaataatttgtattgattgaggcctatgaactgacctgaattggaaaggatgtgattaatataaataatagcagatataaattgtggttatgttacctttatcttgttgaggaccacaacattagcacggtgccttgtgcagaatagatactcaatatgtgaatatgtgtctactagtagttaattggataaactggcagcatccctggcctgttgtcatgcagtcatttcctgttaattctgggagacaatgatttcacaactagagggaagcagtcctaaaagtttaaaatccgataaggaatatctgggacagggtttagatcatgactctacacagataccatgatgagagtatattaaagaaatttaggaaagcacctggttcctttctccccatgcctgccttctgctccctccccagctggtttgggctcaaattgtccctggagactagggtttatgttagggtattgatagattagagcaggtggttgaagagatcttctctggtcagacttggaagaatttccaaaactgaagttagccccaagacttccctagggttgatgtactttatgatccagatgctaaacttcttagaatgaaaatatgcttcaacacttaagtagcatacactgccctacaaacctcagagagcacttttccccaagttcttgtttttatttttgaaagtactcacacagcacttactatgctccaaacactcctctaagcactttacacatattagctcattcagtccccagacagacgggatgaagtaggtattgttactgttcccattttacaggtgagagatttgaagcctggggaggctagtaactcaccccaaggtcacacggctcatacatggtgggactgagactcagatgcaggcagtctggcacctcagtctggattctaaccatttcactaagctatttttgtcttgtactactttgacccacccctgaataaacctcaattgctggagtggggtgtagttattaaagggatgctttttaccttttgctgtctgctgtggcagattccccagataaccaaggaaaaggggccacccatacctggaaataggccatagggcccctactactgccaacaagccatggcctaccttgacacttgtttgatcttaaaattgtgtcttggtaacaaaagatttggacaggcatatctgtagctttcaagttaattaattgcaatatttttttcttcaggattttagctgctgaacaactttcagtttggagctaaaagagacctgtctcatggtctgcccttccctggggcaatagctagggtctttcctgatttttatggaattttaggggatattttgagctttgggttctcagtagtgaattgagacttggaggtgacttttcatgtttggagtatcatctctgtctgggatctgggctgacaaattaaaacctagagtagtgcttatgctgaaatgatacttttcattttttggttgatttttttgccttcccttcaattttaaactgaagcattttaatgtgggtagaaactctacaccaaatacactaaacattttggtgcttagtggatttctttttaggtaactggtacttacttccaaagactgaatacaagccacactccatcatatcccttaaacttcatgaaaaaccattcaagatccccttgctgcaacactgttctcttcttctctactaaattctatttccaaaattggtaatagagccagaaggatccccagtacccagccctctgcctggcacaaagtggtagcacaattaaattcagtatgggtggagcatggtacagtcttggtgccatagaaggagtagttgcatagtcacacatcatttgataagttggatgttccattacatagaggaacacaaaattccagggtttttggaggaagggattagatagtgactaagccgccagaattgaggtggccattcctttttgtataggctaagaaacaggttatcagtgaaaagttaattatggctttggcactagaatagcactgttgcaaagtatttaagcaccccccatctcagccctttattttatctttcatgtgggctaatgtgaggataatcttacagatattataggaatttcttttctatctttatgaaaacaacgtatataaaatatatctagaaaacctttgtttgagactcttatttaatgggcttttgattctaatgataattgtacctttatctttcaaaagctgatatttcctacctaagcatctcccgagaaaaatatctcattaaaaagcccataaataataggggagaagaaagccttaggtatcaattccaaaacagtgattgaaatttcccaaaataattatggcttctgtcatctccagagataatctggcttggtttaccccataatctaatttcagaaaagaaagctttattttaacactcatctgaatcaacattaaagccttttctctcaaagcgtttattgagaaactcaaatgaatatactttttgaattactgtcatcaaaagtgtacggcttcctgtgctgcttgtgtcaaatggaacctgccctctaaagcactttctttcctttacttgcgtggtttcatgtaagctgtgctgtttagaaacaacatctcagactttacaaagaaatgacaaagaaggcaattgcactttttaagggatatcgacaagcagtttctgttttctaaaggacaaaatacagagtgtgtgtcatttttaattagattctttcccctgctgagttggaaattccagtgcagcactgattgaccacagttgccaatctaaaagcacaaagacagaagtaaagctttatgctaattttatttcaatatgatagaaaatttatcttggtatgtccttttttagataactccagcaggaaactgtaactgctatgtctttaggaaaatgtagaagaaagaacattattattctttaattcctacaaggtactcgaaaaccttaagtgaaaaagatttctatctttttatcttagcgcatttatggaaaaaatattaactatcctgaatattttataattttgtaggaaaaatatgcatctattttttcttgacttcttttatatagtaataaaagttattttggaaagctc

SEQ ID NO: 326601 - DNA, 1146 bp, Homo sapiens
ggcggactacccagagggctgccgccgcctctccaagttcttgtggcccccgcggtgcggagtatggggcgctgatggccatggagggctactggcgcttcctggcgctgctggggtcggcactgctcgtcggcttcctgtcggtgatcttcgccctcgtctgggtcctccactaccgagaggggcttggctgggatgggagcgcactagagtttaactggcacccagtgctcatggtcaccggcttcgtcttcatccagggcatcgccatcatcgtctacagactgccgtggacctggaaatgcagcaagctcctgatgaaatccatccatgcagggttaaatgcagttgctgccattcttgcaattatctctgtggtggccgtgtttgagaaccacaatgttaacaatatagccaatatgtacagtctgcacagctgggttggactgatagctgtcatatgctatttgttacagcttctttcaggtttttcagtctttctgcttccatgggctccgctttctctccgagcatttctcatgcccatacatgtttattctggaattgtcatctttggaacagtgattgcaacagcacttatgggattgacagagaaactgattttttccctgagagatcctgcatacagtacattcccgccagaaggtgttttcgtaaatacgcttggccttctgatcctggtgttcggggccctcattttttggatagtcaccagaccgcaatggaaacgtcctaaggagccaaattctaccattcttcatccaaatggaggcactgaacagggagcaagaggttccatgccagcctactctggcaacaacatggacaaatcagattcagagttaaacagtgaagtagcagcaaggaaaagaaacttagctctggatgaggctgggcagagatctaccatgtaaaatgttgtagagatagagccatataacgtcacgtttcaaaactagctctacagttttgcttctcctattagccatatgataattgggctatgtagtatcaatatttactttaatcacaaaggatggtttcttgaaataatttgtattgattgaggcctatgaactgacctgaattggaaaggatgtgattaatataaataatagcagatat

SEQ ID NO: 326602 - DNA, 3375 bp, Homo sapiens
gcggccgcctactactactactactactgctcgaattcaagcttctaacgatgtacggggacatgtaaaatgttgtagagatagagccatataacgtcacgtttcaaaactagctctacagttttgcttctcctattagccatatgataattgggctatgtagtatcaatatttactttaatcacaaaggatggtttcttgaaataatttgtattgattgaggcctatgaactgacctgaattggaaaggatgtgattaatataaataatagcagatataaattgtggttatgttacctttatcttgttgaggaccacaacattagcacggtgccttgtgcagaatagatactcaatatgtgaatatgtgtctactagtagttaattggataaactggcagcatccctggcctgttgtcatgcagtcatttcctgttaattctgggagacaatgatttcacaactagagggaagcagtcctaaaagtttaaaatccgataaggaatatctgggacagggtttagatcatgactctacacagataccatgatgagagtatattaaagaaatttaggaaagcacctggttcctttctccccatgcctgccttctgctccctccccagctggtttgggctcaaattgtccctggagactagggtttatgttagggtattgatagattagagcaggtggttgaagagatcttctctggtcagacttggaagaatttccaaaactgaagttagccccaagacttccctagggttgatgtactttatgatccagatgctaaacttcttagaatgaaaatatgcttcaacacttaagtagcatacactgccctacaaacctcagagagcacttttccccaagttcttgtttttatttttgaaagtactcacacagcacttactatgctccaaacactcctctaagcactttacacatattagctcattcagtccccagacagacgggatgaagtaggtattgttactgttcccattttacaggtgagagatttgaagcctggggaggctagtaactcaccccaaggtcacacggctcatacatggtgggactgagactcagatgcaggcagtctggcacctcagtctggattctaaccatttcactaagctatttttgtcttgtactactttgacccacccctgaataaacctcaattgctggagtggggtgtagttattaaagggatgctttttaccttttgctgtctgctgtggcagattccccagataaccaaggaaaaggggccacccatacctggaaataggccatagggcccctactactgccaacaagccatggcctaccttgacacttgtttgatcttaaaattgtgtcttggtaacaaaagatttggacaggcatatctgtagctttcaagttaattaattgcaatatttttttcttcaggattttagctgctgaacaactttcagtttggagctaaaagagacctgtctcatggtctgcccttccctggggcaatagctagggtctttcctgatttttatggaattttaggggatattttgagctttgggttctcagtagtgaattgagacttggaggtgacttttcatgtttggagtatcatctctgtctgggatctgggctgacaaattaaaacctagagtagtgcttatgctgaaatgatacttttcattttttggttgatttttttgccttcccttcaattttaaactgaagcattttaatgtgggtagaaactctacaccaaatacactaaacattttggtgcttagtggatttctttttaggtaactggtacttacttccaaagactgaatacaagccacactccatcatatcccttaaacttcatgaaaaaccattcaagatccccttgctgcaacactgttctcttcttctctactaaattctatttccaaaattggtaatagagccagaaggatccccagtacccagccctctgcctggcacaaagtggtagcacaattaaattcagtatgggtggagcatggtacagtcttggtgccatagaaggagtagttgcatagtcacacatcatttgataagttggatgttccattacatagaggaacacaaaattccagggtttttggaggaagggattagatagtgactaagccgccagaattgaggtggccattcctttttgtataggctaagaaacaggttatcagtgaaaagttaattatggctttggcactagaatagcactgttgcaaagtatttaagcaccccccatctcagccctttattttatctttcatgtgggctaatgtgaggataatcttacagatattataggaatttcttttctatctttatgaaaacaacgtatataaaatatatctagaaaacctttgtttgagactcttatttaatgggcttttgattctaatgataattgtacctttatctttcaaaagctgatatttcctacctaagcatctcccgagaaaaatatctcattaaaaagcccataaataataggggagaagaaagccttaggtatcaattccaaaacagtgattgaaatttcccaaaataattatggcttctgtcatctccagagataatctggcttggtttaccccataatctaatttcagaaaagaaagctttattttaacactcatctgaatcaacattaaagccttttctctcaaagcgtttattgagaaactcaaatgaatatactttttgaattactgtcatcaaaagtgtacggcttcctgtgctgcttgtgtcaaatggaacctgccctctaaagcactttctttcctttacttgcgtggtttcatgtaagctgtgctgtttagaaacaacatctcagactttacaaagaaatgacaaagaaggcaattgcactttttaagggatatcgacaagcagtttctgttttctaaaggacaaaatacagagtgtgtgtcatttttaattagattctttcccctgctgagttggaaattccagtgcagcactgattgaccacagttgccaatctaaaagcacaaagacagaagtaaagctttatgctaattttatttcaatatgatagaaaatttatcttggtatgtccttttttagataactccagcaggaaactgtaactgctatgtctttaggaaaatgtagaagaaagaacattattattctttaattcctacaaggtactcgaaaaccttaagtgaaaaagatttctatctttttatcttagcgcatttatggaaaaaatattaactatcctgaatattttataattttgtaggaaaaatatgcatctattttttcttgacttcttttatatagtaataaaagttattttggaaagctc

SEQ ID NO: 326603 - DNA, 2565 bp, Homo sapiens
ttcattttttggttgatttttttgccttcccttcaattttaaactgaagcattttaatgtgggtagaaactctacaccaaatacactaaacattttggtgcttagtggatttctttttaggtaactggcactttacacatattagctcattcagtccccagacagacgggatgaagtaggtattgttactgttcccattttacaggtgagagatttgaagcctggggaggctagtaactcaccccaaggtcacacggctcatacatggtgggactgagactcagatgcaggcagtctggcacctcagtctggattctaaccatttcactaagctatttttgtcttgtactactttgacccacccctgaataaacctcaattgctggagtggggtgtagttattaaagggatgctttttaccttttgctgtctgctgtggcagattccccagataaccaaggaaaaggggccacccatacctggaaataggccatagggcccctactactgccaacaagccatggcctaccttgacacttgtttgatcttaaaattgtgtcttggtaacaaaagatttggacaggcatatctgtagctttcaagttaattaattgcaatatttttttcttcaggattttagctgctgaacaactttcagtttggagctaaaagagacctgtctcatggtctgcccttccctggggcaatagctagggtctttcctgatttttatggaattttaggggatattttgagctttgggttctcagtagtgaattgagacttggaggtgacttttcatgtttggagtatcatctctgtctgggatctgggctgacaaattaaaacctagagtagtgcttatgctgaaatgatacttttcattttttggttgatttttttgccttcccttcaattttaaactgaagcattttaatgtgggtagaaactctacaccaaatacactaaacattttggtgcttagtggatttctttttaggtaactggtacttacttccaaagactgaatacaagccacactccatcatatcccttaaacttcatgaaaaaccattcaagatccccttgctgcaacactgttctcttcttctctactaaattctatttccaaaattggtaatagagccagaaggatccccagtacccagccctctgcctggcacaaagtggtagcacaattaaattcagtatgggtggagcatggtacagtcttggtgccatagaaggagtagttgcatagtcacacatcatttgataagttggatgttccattacatagaggaacacaaaattccagggtttttggaggaagggattagatagtgactaagccgccagaattgaggtggccattcctttttgtataggctaagaaacaggttatcagtgaaaagttaattatggctttggcactagaatagcactgttgcaaagtatttaagcaccccccatctcagccctttattttatctttcatgtgggctaatgtgaggataatcttacagatattataggaatttcttttctatctttatgaaaacaacgtatataaaatatatctagaaaacctttgtttgagactcttatttaatgggcttttgattctaatgataattgtacctttatctttcaaaagctgatatttcctacctaagcatctcccgagaaaaatatctcattaaaaagcccataaataataggggagaagaaagccttaggtatcaattccaaaacagtgattgaaatttcccaaaataattatggcttctgtcatctccagagataatctggcttggtttaccccataatctaatttcagaaaagaaagctttattttaacactcatctgaatcaacattaaagccttttctctcaaagcgtttattgagaaactcaaatgaatatactttttgaattactgtcatcaaaagtgtacggcttcctgtgctgcttgtgtcaaatggaacctgccctctaaagcactttctttcctttacttgcgtggtttcatgtaagctgtgctgtttagaaacaacatctcagactttacaaagaaatgacaaagaaggcaattgcactttttaagggatatcgacaagcagtttctgttttctaaaggacaaaatacagagtgtgtgtcatttttaattagattctttcccctgctgagttggaaattccagtgcagcactgattgaccacagttgccaatctaaaagcacaaagacagaagtaaagctttatgctaattttatttcaatatgatagaaaatttatcttggtatgtccttttttagataactccagcaggaaactgtaactgctatgtctttaggaaaatgtagaagaaagaacattattattctttaattcctacaaggtactcgaaaaccttaagtgaaaaagatttctatctttttatcttagcgcatttatggaaaaaatattaactatcctgaatattttataattttgtaggaaaaatatgcatctattttttcttgacttcttttatatagtaataaaagttattttggaaagctc

SEQ ID NO: 326604 - DNA, 4983 bp, Homo sapiens
ggcggactacccagagggctgccgccgcctctccaagttcttgtggcccccgcggtgcggagtatggggcgctgatggccatggagggctactggcgcttcctggcgctgctggggtcggcactgctcgtcggcttcctgtcggtgatcttcgccctcgtctgggtcctccactaccgagaggggcttggctgggatgggagcgcactagagtttaactggcacccagtgctcatggtcaccggcttcgtcttcatccagggcatcgccatcatcgtctacagactgccgtggacctggaaatgcagcaagctcctgatgaaatccatccatgcagggttaaatgcagttgctgccattcttgcaattatctctgtggtggccgtgtttgagaaccacaatgttaacaatatagccaatatgtacagtctgcacagctgggttggactgatagctgtcatatgctatttgttacagcttctttcaggtttttcagtctttctgcttccatgggctccgctttctctccgagcatttctcatgcccatacatgtttattctggaattgtcatctttggaacagtgattgcaacagcacttatgggattgacagagaaactgattttttccctgagagatcctgcatacagtacattcccgccagaaggtgttttcgtaaatacgcttggccttctgatcctggtgttcggggccctcattttttggatagtcaccagaccgcaatggaaacgtcctaaggagccaaattctaccattcttcatccaaatggaggcactgaacagggagcaagaggttccatgccagcctactctggcaacaacatggacaaatcagattcagagttaaacagtgaagtagcagcaaggaaaagaaacttagctctggatgaggctgggcagagatctaccatgtaaaatgttgtagagatagagccatataacgtcacgtttcaaaactagctctacagttttgcttctcctattagccatatgataattgggctatgtagtatcaatatttactttaatcacaaaggatggtttcttgaaataatttgtattgattgaggcctatgaactgacctgaattggaaaggatgtgattaatataaataatagcagatataaattgtggttatgttacctttatcttgttgaggaccacaacattagcacggtgccttgtgcagaatagatactcaatatgtgaatatgtgtctactagtagttaattggataaactggcagcatccctggcctgttgtcatgcagtcatttcctgttaattctgggagacaatgatttcacaactagagggaagcagtcctaaaagtttaaaatccgataaggaatatctgggacagggtttagatcatgactctacacagataccatgatgagagtatattaaagaaatttaggaaagcacctggttcctttctccccatgcctgccttctgctccctccccagctggtttgggctcaaattgtccctggagactagggtttatgttagggtattgatagattagagcaggtggttgaagagatcttctctggtcagacttggaagaatttccaaaactgaagttagccccaagacttccctagggttgatgtactttatgatccagatgctaaacttcttagaatgaaaatatgcttcaacacttaagtagcatacactgccctacaaacctcagagagcacttttccccaagttcttgtttttatttttgaaagtactcacacagcacttactatgctccaaacactcctctaagcactttacacatattagctcattcagtccccagacagacgggatgaagtaggtattgttactgttcccattttacaggtgagagatttgaagcctggggaggctagtaactcaccccaaggtcacacggctcatacatggtgggactgagactcagatgcaggcagtctggcacctcagtctggattctaaccatttcactaagctatttttgtcttgtactactttgacccacccctgaataaacctcaattgctggagtggggtgtagttattaaagggatgctttttaccttttgctgtctgctgtggcagattccccagataaccaaggaaaaggggccacccatacctggaaataggccatagggcccctactactgccaacaagccatggcctaccttgacacttgtttgatcttaaaattgtgtcttggtaacaaaagatttggacaggcatatctgtagctttcaagttaattaattgcaatatttttttcttcaggattttagctgctgaacaactttcagtttggagctaaaagagacctgtctcatggtctgcccttccctggggcaatagctagggtctttcctgatttttatggaattttaggggatattttgagctttgggttctcagtagtgaattgagacttggaggtgacttttcatgtttggagtatcatctctgtctgggatctgggctgacaaattaaaacctagagtagtgcttatgctgaaatgatacttttcattttttggttgatttttttgccttcccttcaattttaaactgaagcattttaatgtgggtagaaactctacaccaaatacactaaacattttggtgcttagtggatttctttttaggtaactggtacttacttccaaagactgaatacaagccacactccatcatatcccttaaacttcatgaaaaaccattcaagatccccttgctgcaacactgttctcttcttctctactaaattctatttccaaaattggtaatagagccagaaggatccccagtacccagccctctgcctggcacaaagtggtagcacaattaaattcagtatgggtggagcatggtacagtcttggtgccatagaaggagtagttgcatagtcacacatcatttgataagttggatgttccattacatagaggaacacaaaattccagggtttttggaggaagggattagatagtgactaagccgccagaattgaggtggccattcctttttgtataggctaagaaacaggttatcagtgaaaagttaattatggctttggcactagaatagcactgttgcaaagtatttaagcaccccccatctcagccctttattttatctttcatgtgggctaatgtgaggataatcttacagatattataggaatttcttttctatctttatgaaaacaacgtatataaaatatatctagaaaacctttgtttgagactcttatttaatgggcttttgattctaatgataattgtacctttatctttcaaaagctgatatttcctacctaagcatctcccgagaaaaatatctcattaaaaagcccataaataataggggagaagaaagccttaggtatcaattccaaaacagtgattgaaatttcccaaaataattatggcttctgtcatctccagagataatctggcttggtttaccccataatctaatttcagaaaagaaagctttattttaacactcatctgaatcaacattaaagccttttctctcaaagcgtttattgagaaactcaaatgaatatactttttgaattactgtcatcaaaagtgtacggcttcctgtgctgcttgtgtcaaatggaacctgccctctaaagcactttctttcctttacttgcgtggtttcatgtaagctgtgctgtttagaaacaacatctcagactttacaaagaaatgacaaagaaggcaattgcactttttaagggatatcgacaagcagtttctgttttctaaaggacaaaatacagagtgtgtgtcatttttaattagattctttcccctgctgagttggaaattccagtgcagcactgattgaccacagttgccaatctaaaagcacaaagacagaagtaaagctttatgctaattttatttcaatatgatagaaaatttatcttggtatgtccttttttagataactccagcaggaaactgtaactgctatgtctttaggaaaatgtagaagaaagaacattattattctttaattcctacaaggtactcgaaaaccttaagtgaaaaagatttctatctttttatcttagcgcatttatggaaaaaatattaactatcctgaatattttataattttgtaggaaaaatatgcatctattttttcttgacttcttttatatagtaataaaagttattttggaaagctcaaaaaaaaaaaaaaaaaaaaaaaaaaaaaaaaaaaaaaaaaaaaaaaaaaaaaaaaaaaaaaaagagagggggggcggggacaaaaaaatcctcacccagaggggggcgcaccaaaataagcgcgagacacccagttttttggagcaaacaaggggcgcccaataaaagggggagtaatataaaacgaaacgcggcgggcgagggattaaaacacaaaggggaagaacggagcaaaaccagtggaaacggggacatctggaaaaagcgacaccactacgcggggggcgcaccaacatgcggcacactccccaaagaaaatatacagcccacgaggaaaatacacacaaacaacggggcataccgcgtgtgtcacacaaacacggacgaaaaaagaaaagcggaatagaagaaattcgtcaacagagagcaaaacagaacaaaccaccttacccgccgcgcctgccgcacacatacacccaaaaaaaaacaaaaagaacaacacaaaggaaaaaaagcaggacagaacgcgagaagcaaacgaagaagacacaaaaaggctcacaaccacacaaaacacaacaacaaaaacaaaaaaaacatacaaagagagaaacaacaccacataccaaacaccaaaacaaaccaaacaagcagaaaacaaacacaaagaaacaagaacatagacgaacaagacgaaatgaacaaaacaaaagaacaaacagagcacagaaacgacacaa

SEQ ID NO: 326605 - DNA, 2043 bp, Homo sapiens
ggcggactacccagagggctgccgccgcctctccaagttcttgtggcccccgcggtgcggagtatggggcgctgatggccatggagggctactggcgcttcctggcgctgctggggtcggcactgctcgtcggcttcctgtcggtgatcttcgccctcgtctgggtcctccactaccgagaggggcttggctgggatgggagcgcactagagtttaactggcacccagtgctcatggtcaccggcttcgtcttcatccagggcatcgccatcatcgtctacagactgccgtggacctggaaatgcagcaagctcctgatgaaatccatccatgcagggttaaatgcagttgctgccattcttgcaattatctctgtggtggccgtgtttgagaaccacaatgttaacaatatagccaatatgtacagtctgcacagctgggttggactgatagctgtcatatgctatttgttacagcttctttcaggtttttcagtctttctgcttccatgggctccgctttctctccgagcatttctcatgcccatacatgtttattctggaattgtcatctttggaacagtgattgcaacagcacttatgggattgacagagaaactgattttttccctgagagatcctgcatacagtacattcccgccagaaggtgttttcgtaaatacgcttggccttctgatcctggtgttcggggccctcattttttggatagtcaccagaccgcaatggaaacgtcctaaggagccaaattctaccattcttcatccaaatggaggcactgaacagggagcaagaggttccatgccagcctactctggcaacaacatggacaaatcagattcagagttaaacagtgaagtagcagcaaggaaaagaaacttagctctggatgaggctgggcagagatctaccatgtaaaatgttgtagagatagagccatataacgtcacgtttcaaaactagctctacagttttgcttctcctattagccatatgataattgggctatgtagtatcaatatttactttaatcacaaaggatggtttcttgaaataatttgtattgattgaggcctatgaactgacctgaattggaaaggatgtgattaatataaataatagcagatataaattgtggttatgttacctttatcttgttgaggaccacaacattagcacggtgccttgtgcagaatagatactcaatatgtgaatatgtgtctactagtagttaattggataaactggcagcatccctggcctgttgtcatgcagtcatttcctgttaattctgggagacaatgatttcacaactagagggaagcagtcctaaaagtttaaaatccgataaggaatatctgggacagggtttagatcatgactctacacagataccatgatgagagtatattaaagaaatttaggaaagcacctggttcctttctccccatgcctgccttctgctccctccccagctggtttgggctcaaattgtccctggagactagggtttatgttagggtattgatagattagagcaggtggttgaagagatcttctctggtcagacttggaagaatttccaaaactgaagttagccccaagacttccctagggttgatgtactttatgatccagatgctaaacttcttagaatgaaaatatgcttcaacacttaagtagcatacactgccctacaaacctcagagagcacttttccccaagttcttgtttttatttttgaaagtactcacacagcacttactatgctccaaacactcctctaagcactttacacatattagctcattcagtccccagacagacgggatgaagtaggtattgttactgttcccattttacaggtgagagatttgaagcctggggaggctagtaactcaccccaaggtcacacggctcatacatggtgggactgagactcagatgcaggcggtgggggccccttaatgggggtttatcacctcttccaaaaagcttttttgttgggtggaactagttccgcccc

SEQ ID NO: 326606 - DNA, 4033 bp, Homo sapiens
ggcggactacccagagggctgccgccgcctctccaagttcttgtggcccccgcggtgcggagtatggggcgctgatggccatggagggctactggcgcttcctggcgctgctggggtcggcactgctcgtcggcttcctgtcggtgatcttcgccctcgtctgggtcctccactaccgagaggggcttggctgggatgggagcgcactagagtttaactggcacccagtgctcatggtcaccggcttcgtcttcatccagggcatcgcttctttcaggtttttcagtctttctgcttccatgggctccgctttctctccgagcatttctcatgcccatacatgtttattctggaattgtcatctttggaacagtgattgcaacagcacttatgggattgacagagaaactgattttttccctgagagatcctgcatacagtacattcccgccagaaggtgttttcgtaaatacgcttggccttctgatcctggtgttcggggccctcattttttggatagtcaccagaccgcaatggaaacgtcctaaggagccaaattctaccattcttcatccaaatggaggcactgaacagggagcaagaggttccatgccagcctactctggcaacaacatggacaaatcagattcagagttaaacagtgaagtagcagcaaggaaaagaaacttagctctggatgaggctgggcagagatctaccatgtaaaatgttgtagagatagagccatataacgtcacgtttcaaaactagctctacagttttgcttctcctattagccatatgataattgggctatgtagtatcaatatttactttaatcacaaaggatggtttcttgaaataatttgtattgattgaggcctatgaactgacctgaattggaaaggatgtgattaatataaataatagcagatataaattgtggttatgttacctttatcttgttgaggaccacaacattagcacggtgccttgtgcagaatagatactcaatatgtgaatatgtgtctactagtagttaattggataaactggcagcatccctggcctgttgtcatgcagtcatttcctgttaattctgggagacaatgatttcacaactagagggaagcagtcctaaaagtttaaaatccgataaggaatatctgggacagggtttagatcatgactctacacagataccatgatgagagtatattaaagaaatttaggaaagcacctggttcctttctccccatgcctgccttctgctccctccccagctggtttgggctcaaattgtccctggagactagggtttatgttagggtattgatagattagagcaggtggttgaagagatcttctctggtcagacttggaagaatttccaaaactgaagttagccccaagacttccctagggttgatgtactttatgatccagatgctaaacttcttagaatgaaaatatgcttcaacacttaagtagcatacactgccctacaaacctcagagagcacttttccccaagttcttgtttttatttttgaaagtactcacacagcacttactatgctccaaacactcctctaagcactttacacatattagctcattcagtccccagacagacgggatgaagtaggtattgttactgttcccattttacaggtgagagatttgaagcctggggaggctagtaactcaccccaaggtcacacggctcatacatggtgggactgagactcagatgcaggcagtctggcacctcagtctggattctaaccatttcactaagctatttttgtcttgtactactttgacccacccctgaataaacctcaattgctggagtggggtgtagttattaaagggatgctttttaccttttgctgtctgctgtggcagattccccagataaccaaggaaaaggggccacccatacctggaaataggccatagggcccctactactgccaacaagccatggcctaccttgacacttgtttgatcttaaaattgtgtcttggtaacaaaagatttggacaggcatatctgtagctttcaagttaattaattgcaatatttttttcttcaggattttagctgctgaacaactttcagtttggagctaaaagagacctgtctcatggtctgcccttccctggggcaatagctagggtctttcctgatttttatggaattttaggggatattttgagctttgggttctcagtagtgaattgagacttggaggtgacttttcatgtttggagtatcatctctgtctgggatctgggctgacaaattaaaacctagagtagtgcttatgctgaaatgatacttttcattttttggttgatttttttgccttcccttcaattttaaactgaagcattttaatgtgggtagaaactctacaccaaatacactaaacattttggtgcttagtggatttctttttaggtaactggtacttacttccaaagactgaatacaagccacactccatcatatcccttaaacttcatgaaaaaccattcaagatccccttgctgcaacactgttctcttcttctctactaaattctatttccaaaattggtaatagagccagaaggatccccagtacccagccctctgcctggcacaaagtggtagcacaattaaattcagtatgggtggagcatggtacagtcttggtgccatagaaggagtagttgcatagtcacacatcatttgataagttggatgttccattacatagaggaacacaaaattccagggtttttggaggaagggattagatagtgactaagccgccagaattgaggtggccattcctttttgtataggctaagaaacaggttatcagtgaaaagttaattatggctttggcactagaatagcactgttgcaaagtatttaagcaccccccatctcagccctttattttatctttcatgtgggctaatgtgaggataatcttacagatattataggaatttcttttctatctttatgaaaacaacgtatataaaatatatctagaaaacctttgtttgagactcttatttaatgggcttttgattctaatgataattgtacctttatctttcaaaagctgatatttcctacctaagcatctcccgagaaaaatatctcattaaaaagcccataaataataggggagaagaaagccttaggtatcaattccaaaacagtgattgaaatttcccaaaataattatggcttctgtcatctccagagataatctggcttggtttaccccataatctaatttcagaaaagaaagctttattttaacactcatctgaatcaacattaaagccttttctctcaaagcgtttattgagaaactcaaatgaatatactttttgaattactgtcatcaaaagtgtacggcttcctgtgctgcttgtgtcaaatggaacctgccctctaaagcactttctttcctttacttgcgtggtttcatgtaagctgtgctgtttagaaacaacatctcagactttacaaagaaatgacaaagaaggcaattgcactttttaagggatatcgacaagcagtttctgttttctaaaggacaaaatacagagtgtgtgtcatttttaattagattctttcccctgctgagttggaaattccagtgcagcactgattgaccacagttgccaatctaaaagcacaaagacagaagtaaagctttatgctaattttatttcaatatgatagaaaatttatcttggtatgtccttttttagataactccagcaggaaactgtaactgctatgtctttaggaaaatgtagaagaaagaacattattattctttaattcctacaaggtactcgaaaaccttaagtgaaaaagatttctatctttttatcttagcgcatttatggaaaaaatattaactatcctgaatattttataattttgtaggaaaaatatgcatctattttttcttgacttcttttatatagtaataaaagttattttggaaagctc

SEQ ID NO: 326607 - DNA, 4503 bp, Homo sapiens
ggcggactacccagagggctgccgccgcctctccaagttcttgtggcccccgcggtgcggagtatggggcgctgatggccatggagggctactggcgcttcctggcgctgctggggtcggcactgctcgtcggcttcctgtcggtgatcttcgccctcgtctgggtcctccactaccgagaggggcttggctgggatgggagcgcactagagtttaactggcacccagtgctcatggtcaccggcttcgtcttcatccagggcatcgccatcatcgtctacagactgccgtggacctggaaatgcagcaagctcctgatgaaatccatccatgcagggttaaatgcagttgctgccattcttgcaattatctctgtggtggccgtgtttgagaaccacaatgttaacaatatagccaatatgtacagtctgcacagctgggttggactgatagctgtcatatgctatttgttacagcttctttcaggtttttcagtctttctgcttccatgggctccgctttctctccgagcatttctcatgcccatacatgtttattctggaattgtcatctttggaacagtgattgcaacagcacttatgggattgacagagaaactgattttttccctgagagatcctgcatacagtacattcccgccagaaggtgttttcgtaaatacgcttggccttctgatcctggtgttcggggccctcattttttggatagtcaccagaccgcaatggaaacgtcctaaggagccaaattctaccattcttcatccaaatggaggcactgaacagggagcaagaggttccatgccagcctactctggcaacaacatggacaaatcagattcagagttaaacagtgaagtagcagcaaggaaaagaaacttagctctggatgaggctgggcagagatctaccatgtaaaatgttgtagagatagagccatataacgtcacgtttcaaaactagctctacagttttgcttctcctattagccatatgataattgggctatgtagtatcaatatttactttaatcacaaaggatggtttcttgaaataatttgtattgattgaggcctatgaactgacctgaattggaaaggatgtgattaatataaataatagcagatataaattgtggttatgttacctttatcttgttgaggaccacaacattagcacggtgccttgtgcagaatagatactcaatatgtgaatatgtgtctactagtagttaattggataaactggcagcatccctggcctgttgtcatgcagtcatttcctgttaattctgggagacaatgatttcacaactagagggaagcagtcctaaaagtttaaaatccgataaggaatatctgggacagggtttagatcatgactctacacagataccatgatgagagtatattaaagaaatttaggaaagcacctggttcctttctccccatgcctgccttctgctccctccccagctggtttgggctcaaattgtccctggagactagggtttatgttagggtattgatagattagagcaggtggttgaagagatcttctctggtcagacttggaagaatttccaaaactgaagttagccccaagacttccctagggttgatgtactttatgatccagatgctaaacttcttagaatgaaaatatgcttcaacacttaagtagcatacactgccctacaaacctcagagagcacttttccccaagttcttgtttttatttttgaaagtactcacacagcacttactatgctccaaacactcctctaagcactttacacatattagctcattcagtccccagacagacgggatgaagtaggtattgttactgttcccattttacaggtgagagatttgaagcctggggaggctagtaactcaccccaaggtcacacggctcatacatggtgggactgagactcagatgcaggcagtctggcacctcagtctggattctaaccatttcactaagctatttttgtcttgtactactttgacccacccctgaataaacctcaattgctggagtggggtgtagttattaaagggatgctttttaccttttgctgtctgctgtggcagattccccagataaccaaggaaaaggggccacccatacctggaaataggccatagggcccctactactgccaacaagccatggcctaccttgacacttgtttgatcttaaaattgtgtcttggtaacaaaagatttggacaggcatatctgtagctttcaagttaattaattgcaatatttttttcttcaggattttagctgctgaacaactttcagtttggagctaaaagagacctgtctcatggtctgcccttccctggggcaatagctagggtctttcctgatttttatggaattttaggggatattttgagctttgggttctcagtagtgaattgagacttggaggtgacttttcatgtttggagtatcatctctgtctgggatctgggctgacaaattaaaacctagagtagtgcttatgctgaaatgatacttttcattttttggttgatttttttgccttcccttcaattttaaactgaagcattttaatgtgggtagaaactctacaccaaatacactaaacattttggtgcttagtggatttctttttaggtaactggtacttacttccaaagactgaatacaagccacactccatcatatcccttaaacttcatgaaaaaccattcaagatccccttgctgcaacactgttctcttcttctctactaaattctatttccaaaattggtaatagagccagaaggatccccagtacccagccctctgcctggcacaaagtggtagcacaattaaattcagtatgggtggagcatggtacagtcttggtgccatagaaggagtagttgcatagtcacacatcatttgataagttggatgttccattacatagaggaacacaaaattccagggtttttggaggaagggattagatagtgactaagccgccagaattgaggtggccattcctttttgtataggctaagaaacaggttatcagtgaaaagttaattatggctttggcactagaatagcactgttgcaaagtatttaagcaccccccatctcagccctttattttatctttcatgtgggctaatgtgaggataatcttacagatattataggaatttcttttctatctttatgaaaacaacgtatataaaatatatctagaaaacctttgtttgagactcttatttaatgggcttttgattctaatgataattgtacctttatctttcaaaagctgatatttcctacctaagcatctcccgagaaaaatatctcattaaaaagcccataaataataggggagaagaaagccttaggtatcaattccaaaacagtgattgaaatttcccaaaataattatggcttctgtcatctccagagataatctggcttggtttaccccataatctaatttcagaaaagaaagctttattttaacactcatctgaatcaacattaaagccttttctctcaaagcgtttattgagaaactcaaatgaatatactttttgaattactgtcatcaaaagtgtacggcttcctgtgctgcttgtgtcaaatggaacctgccctctaaagcactttctttcctttacttgcgtggtttcatgtaagctgtgctgtttagaaacaacatctcagactttacaaagaaatgacaaagaaggcaattgcactttttaagggatatcgacaagcagtttctgttttctaaaggacaaaatacagagtgtgtgtcatttttaattagattctttcccctgctgagttggaaattccagtgcagcactgattgaccacagttgccaatctaaaagcacaaagacagaagtaaagctttatgctaattttatttcaatatgatagaaaatttatcttggtatgtccttttttagataactccagcaggaaactgtaactgctatgtctttaggaaaatgtagaagaaagaacattattattctttaattcctacaaggtactcgaaaaccttaagtgaaaaagatttctatctttttatcttagcgcatttatggaaaaaatattaactatcctgaatattttataattttgtaggaaaaatatgcatctattttttcttgacttcttttatatagtaataaaagttattttggaaagctcaaaaaaaaaaacaaacacacagaacaacaacatttgtggcccaatctaggccccagaaaaagttacaaaacattcgtgggagcgcggggcccagaggaatgagcacggcacagaccgtgcccaaggacaccggcacgaacaaggcggttccccccaaaaaaacgcggcggaccgagccgctgacaacagagggcggagctcgggccaacaggccaagagaaagacaccgcgaggacccgagacgagcagagcacaccacac

SEQ ID NO: 326608 - DNA, 2590 bp, Homo sapiens
actggttcctcccctctcaactgctctggttcttataaaaacctcacagccttccactaacatcccataggagcctctctccctactgctgctacacaagaccctgagactgacctgcaggacgaaaccatgaagagcctgatccttcttgccatcctggccgccttagcggtagtaactttgtgttatgaatcacatgaaagcatggaatcttatgaacttaatcccttcattaacaggagaaatgcaaataccttcatatcccctcagcagagatggagagctaaagtccaagagaggatccgagaacgctctaagcctgtccacgagctcaatagggaagcctgtgatgactacagactttgcgaacgctacgccatggtttatggatacaatgctgcctataatcgctacttcaggaagcgccgagggaccaaatgagactgagggaagaaaaaaaatctctttttttctggaggctggcacctgattttgtatccccctgtagcagcattactgaaatacataggcttatatacaatgcttctttcctgtatattctcttgtctggctgcacccctttttcccgcccccagattgataagtaatgaaagtgcactgcagtgagggtcaaaggagagtcaacatatgtgattgttccataataaacttctggtgtgatactttcatcttgtaaatctgctttctttgggaagatattgagatatttaaatcatggcccaccttacccaaaataggagattctgttcatctcatatctagtattaattagaaaaataactacataaaaagaaggaagctaagaaggcactcactcagccataaattctctaaaccctctctaccttggaatccgtgaatggaatctggtatgttttttgcaggattttcctattgtaaattgtggcaaatacagggctcccttcatttgcttttcatctcttatgcatcaaagtcaaaaacatttctgaatcaagataatctagaagagaaaaaaggaggaaaaggaaaagagaaagcagaagggacaaataaaagcaattggcaaaaactgtcaataatagtttatacacttaactatatcaataatcacattatatgtaaatagtctaaacaatccaattattttttacttctacttatgttatatttttacttctacatttgttaaaggttccacgctacatttttactattcttgctttaaataattttaataatttcttttaaagtttagataataagaaaatatcccgggccaggcacagtggccacacctgtaatctcagtagccatgaccataccaatgcactccagcctgtgaaacagagtgagactctgtctctacagaaaaataaaaaagaaaagaaagaaaagatctcatatatttacccatgtaattttcatttcctgttttcttcattcttctttccatctggtgtcacttcctttctgcctgacgacttcctttaacgttttttatagttcaggtctgcaggattctttaagttttgtatgcttgtttttattcttgaaagatattttcactgtatattgaatcccaagttgccacgtttcttttaattattttaaggtattccactgaattctagcttgcacaatttttcgatataaaatttgttgtaattcttacctttgttccactgtgtatactgcatcttttatctctggctgcttctaacatttttatctttattagtgcttttgaccaaattgattcagacctatcttgatttgatttttcttatttttcttgttcttgaggcttattgaccttcttggattgcataaaattagaaaaattttcagccattattttttcagatactttgatccctcactcctcctctcctttagagggtccaatgacatgcacatttgaccacttgaagtaatccaactctctgatgttattttaatttttacaaattgcttttctctgtgtgttttatttttgacactttctattaatgtgtcatcaggttcattaaccttttctttggcaatatctaatctactattaatttcatctagtgtatttttcatgccagacattgtggttttaatcaccagaagtttgatttggatgttttcatatcttccacgcctctacttatctttttaaatgtctttgatacatttaaattgttccaataactattttaacataatgtcagttatgggttggtttgattggttgattattctacttatgaaccacaattttctacttttctgcattcttgcttaattttatttgacgccagacatcatttgatgccagacatttatttgatgccaaaatgcagaaaattttattttctgcattcttgcttaattttatttgatgccagactttttgtgtactggatattcttctatttctgtatgtgttcctgagctctgctctgggattccgttaaatgatgtggataaaattgatcagtatttaatctaaggctaattatttccccacactgaggcaagacctttctgagcactgcgcccaatgtcccatgacaataaacatagccctgagttaacagca

SEQ ID NO: 326609 - DNA, 682 bp, Homo sapiens
actggttcctcccctctcaactgctctggttcttataaaaacctcacagccttccactaacatcccataggagcctctctccctactgctgctacacaagaccctgagactgacctgcaggacgaaaccatgaagagcctgatccttcttgccatcctggccgccttagcggtagtaactttgtgttatgaatcacatgaaagcatggaatcttatgaacttaatcccttcattaacaggagaaatgcaaataccttcatatcccctcagcagagatggagagctaaagtccaagagaggatccgagaacgctctaagcctgtccacgagctcaatagggaagcctgtgatgactacagactttgcgaacgctacgccatggtttatggatacaatgctgcctataatcgctacttcaggaagcgccgagggaccaaatgagactgagggaagaaaaaaaatctctttttttctggaggctggcacctgattttgtatccccctgtagcagcattactgaaatacataggcttatatacaatgcttctttcctgtatattctcttgtctggctgcacccctttttcccgcccccagattgataagtaatgaaagtgcactgcagtgagggtcaaaggagagtcaacatatgtgattgttccataataaacttctggtgtgat

SEQ ID NO: 326610 - DNA, 757 bp, Homo sapiens
actggttcctcccctctcaactgctctggttcttataaaaacctcacagccttccactaacatcccataggagcctctctccctactgctgctacacaagaccctgagactgacctgcaggacgaaaccatgaagagcctgatccttcttgccatcctggccgccttagcggtagtaactttgtgttatggagagtggcagaaagaagaaaacttcggctttgatatcgtttcagttctctctctgaactggcatcgtgcccaggaatcacatgaaagcatggaatcttatgaacttaatcccttcattaacaggagaaatgcaaataccttcatatcccctcagcagagatggagagctaaagtccaagagaggatccgagaacgctctaagcctgtccacgagctcaatagggaagcctgtgatgactacagactttgcgaacgctacgccatggtttatggatacaatgctgcctataatcgctacttcaggaagcgccgagggaccaaatgagactgagggaagaaaaaaaatctctttttttctggaggctggcacctgattttgtatccccctgtagcagcattactgaaatacataggcttatatacaatgcttctttcctgtatattctcttgtctggctgcacccctttttcccgcccccagattgataagtaatgaaagtgcactgcagtgagggtcaaaggagagtcaacatatgtgattgttccataataaacttctggtgtgat

SEQ ID NO: 326611 - DNA, 784 bp, Homo sapiens
ttagaggatcctcagtcttgctcccatcagcagagatggagagctaaagtccaagagaggatccgagaacgctctaagcctgtccacgagctcaatagggaagcctgtgatgactacagactttgcgaacgctacgccatggtttatggatacaatgctgcctataatcgctacttcaggaagcgccgagggaccaaatgagactgagggaagaaaaaaaatctctttttttctggaggctggcacctgattttgtatccccctgtagcagcattactgaaatacataggcttatatacaatgcttctttcctgtatattctcttgtctggctgcacccctttttcccgcccccagattgataagtaatgaaagtgcactgcagtgagggtcaaaggagagtcaacatatgtgattgttccataataaacttctggtgtgatgaaaaaaaaaaaaaaaaaaaaaaaaaaaaatttttggggggattgggcactggaaaaggtttttgaaaacaaattggatggagacgacggggccccaaaaagggaaagggaaccacgtggcaatagcggtgttctcacacaagagagaacagccgggggcacagggcaagaacgggctggaggtattcacgcacccaagataaaaaaaagcgccgggggggaccaaccaggaaggctgtcagaaaaacaacgccagagaaggggacatcaggaagagcactatagggggaatacataacaacaggggggacccacaggaaacgccgaagacagaatatagcg

SEQ ID NO: 326612 - DNA, 898 bp, Homo sapiens
tcaccatgttgtccaggctggtctcgaactcctggcctcaagtgatccacccaccacagcctcccaaagtgccgggattacaggcatgagccaccacacccagccagctgattgctgttgaatagctggatttataaagactgagcataggaggaaatggcacatcactctcatttttaatttattcattatttttatagtgtttaaactgttcatgtatcggcaatctagttatgcttcataaatcctcaggacagagaatttctcctcaaaaggaatttaaaatctaccaagtagaaatacagaaattaagaaaggcaaagtgatcgtccaaactcaaaaccaacaaagcctatatgacaagtctctaagacacatggattgattactgatttcatttgatcaggaagttaatgaaatctactttatactctcctttaatttttgccaatctccgtttatatgagttgcataagttaaggcactttcaaatatatttgtgtcaaggaatattcacggaaatatttccagctatgtgtcgctaaaactgcatttatttattttctgttctaagatcccttcattaacaggagaaatgcaaataccttcatatcccctcagcagagatggagagctaaagtccaagagaggtcagtaacaaaacttcatgaggagtggtcatttttcccagtgtagatcacagatctgaattggagtgggaaacagctttttcatcatatacattatttctaattgtatctttaaaatcaaaaaacttaaaagcaatattcagaaaacaactgaattattagaaaattatttggggaaagatccggaaaggagaaggaaggaggagagaaaggaggacagaaagaaaacttctattttcattaaaaaa

SEQ ID NO: 326613 - DNA, 366 bp, Homo sapiens
gcggccgcctactactactactactgctcgaattcaagcttctaacgatgtacgggtacgccatggtttatggatacaatgctgcctataatcgctacttcaggaagcgccgagggaccaaatgagactgagggaagaaaaaaaatctctttttttctggaggctggcacctgattttgtatccccctgtagcagcattactgaaatacataggcttatatacaatgcttctttcctgtatattctcttgtctggctgcacccctttttcccgcccccagattgataagtaatgaaagtgcactgcagtgagggtcaaaggagagtcaacatatgtgattgttccataataaacttctggtgtgat

SEQ ID NO: 326614 - DNA, 2560 bp, Homo sapiens
  misc_feature (2)..(3): n is a, c, g, or t
  misc_feature (5)..(5): n is a, c, g, or t
  misc_feature (18)..(18): n is a, c, g, or t
  misc_feature (30)..(30): n is a, c, g, or t
tnntnacccctttggaanaccctgactctntggatccccatatcgtgctgccctactgctgctacacaagaccctgagactgacctgcaggacgaaaccatgaagagcctgatccttcttgccatcctggccgccttagcggtagtaactttgtgttatgaatcacatgaaagcatggaatcttatgaacttaatcccttcattaacaggagaaatgcaaataccttcatatcccctcagcagagatggagagctaaagtccaagagaggatccgagaacgctctaagcctgtccacgagctcaatagggaagcctgtgatgactacagactttgcgaacgctacgccatggtttatggatacaatgctgcctataatcgctacttcaggaagcgccgagggaccaaatgagactgagggaagaaaaaaaatctctttttttctggaggctggcacctgattttgtatccccctgtagcagcattactgaaatacataggcttatatacaatgcttctttcctgtatattctcttgtctggctgcacccctttttcccgcccccagattgataagtaatgaaagtgcactgcagtgagggtcaaaggagagtcaacatatgtgattgttccataataaacttctggtgtgatactttcatcttgtaaatctgctttctttgggaagatattgagatatttaaatcatggcccaccttacccaaaataggagattctgttcatctcatatctagtattaattagaaaaataactacataaaaagaaggaagctaagaaggcactcactcagccataaattctctaaaccctctctaccttggaatccgtgaatggaatctggtatgttttttgcaggattttcctattgtaaattgtggcaaatacagggctcccttcatttgcttttcatctcttatgcatcaaagtcaaaaacatttctgaatcaagataatctagaagagaaaaaaggaggaaaaggaaaagagaaagcagaagggacaaataaaagcaattggcaaaaactgtcaataatagtttatacacttaactatatcaataatcacattatatgtaaatagtctaaacaatccaattattttttacttctacttatgttatatttttacttctacatttgttaaaggttccacgctacatttttactattcttgctttaaataattttaataatttcttttaaagtttagataataagaaaatatcccgggccaggcacagtggccacacctgtaatctcagtagccatgaccataccaatgcactccagcctgtgaaacagagtgagactctgtctctacagaaaaataaaaaagaaaagaaagaaaagatctcatatatttacccatgtaattttcatttcctgttttcttcattcttctttccatctggtgtcacttcctttctgcctgacgacttcctttaacgttttttatagttcaggtctgcaggattctttaagttttgtatgcttgtttttattcttgaaagatattttcactgtatattgaatcccaagttgccacgtttcttttaattattttaaggtattccactgaattctagcttgcacaatttttcgatataaaatttgttgtaattcttacctttgttccactgtgtatactgcatcttttatctctggctgcttctaacatttttatctttattagtgcttttgaccaaattgattcagacctatcttgatttgatttttcttatttttcttgttcttgaggcttattgaccttcttggattgcataaaattagaaaaattttcagccattattttttcagatactttgatccctcactcctcctctcctttagagggtccaatgacatgcacatttgaccacttgaagtaatccaactctctgatgttattttaatttttacaaattgcttttctctgtgtgttttatttttgacactttctattaatgtgtcatcaggttcattaaccttttctttggcaatatctaatctactattaatttcatctagtgtatttttcatgccagacattgtggttttaatcaccagaagtttgatttggatgttttcatatcttccacgcctctacttatctttttaaatgtctttgatacatttaaattgttccaataactattttaacataatgtcagttatgggttggtttgattggttgattattctacttatgaaccacaattttctacttttctgcattcttgcttaattttatttgacgccagacatcatttgatgccagacatttatttgatgccaaaatgcagaaaattttattttctgcattcttgcttaattttatttgatgccagactttttgtgtactggatattcttctatttctgtatgtgttcctgagctctgctctgggattccgttaaatgatgtggataaaattgatcagtatttaatctaaggctaattatttccccacactgaggcaagacctttctgagcactgcgcccaatgtcccatgacaataaacatagccctgagttaacagca

SEQ ID NO: 326615 - DNA, 2642 bp, Homo sapiens
gcccgactctatgaggatcccctgccatttactccatggccccatctgggatgtgaggagcgcctctgcccggccgagaccccgtctgggaggtgaggagcgtctctgcccggccgccccgtctgagaagtgagctactgctgctacacaagaccctgagactgacctgcaggacgaaaccatgaagagcctgatccttcttgccatcctggccgccttagcggtagtaactttgtgttatgaatcacatgaaagcatggaatcttatgaacttaatcccttcattaacaggagaaatgcaaataccttcatatcccctcagcagagatggagagctaaagtccaagagaggatccgagaacgctctaagcctgtccacgagctcaatagggaagcctgtgatgactacagactttgcgaacgctacgccatggtttatggatacaatgctgcctataatcgctacttcaggaagcgccgagggaccaaatgagactgagggaagaaaaaaaatctctttttttctggaggctggcacctgattttgtatccccctgtagcagcattactgaaatacataggcttatatacaatgcttctttcctgtatattctcttgtctggctgcacccctttttcccgcccccagattgataagtaatgaaagtgcactgcagtgagggtcaaaggagagtcaacatatgtgattgttccataataaacttctggtgtgatactttcatcttgtaaatctgctttctttgggaagatattgagatatttaaatcatggcccaccttacccaaaataggagattctgttcatctcatatctagtattaattagaaaaataactacataaaaagaaggaagctaagaaggcactcactcagccataaattctctaaaccctctctaccttggaatccgtgaatggaatctggtatgttttttgcaggattttcctattgtaaattgtggcaaatacagggctcccttcatttgcttttcatctcttatgcatcaaagtcaaaaacatttctgaatcaagataatctagaagagaaaaaaggaggaaaaggaaaagagaaagcagaagggacaaataaaagcaattggcaaaaactgtcaataatagtttatacacttaactatatcaataatcacattatatgtaaatagtctaaacaatccaattattttttacttctacttatgttatatttttacttctacatttgttaaaggttccacgctacatttttactattcttgctttaaataattttaataatttcttttaaagtttagataataagaaaatatcccgggccaggcacagtggccacacctgtaatctcagtagccatgaccataccaatgcactccagcctgtgaaacagagtgagactctgtctctacagaaaaataaaaaagaaaagaaagaaaagatctcatatatttacccatgtaattttcatttcctgttttcttcattcttctttccatctggtgtcacttcctttctgcctgacgacttcctttaacgttttttatagttcaggtctgcaggattctttaagttttgtatgcttgtttttattcttgaaagatattttcactgtatattgaatcccaagttgccacgtttcttttaattattttaaggtattccactgaattctagcttgcacaatttttcgatataaaatttgttgtaattcttacctttgttccactgtgtatactgcatcttttatctctggctgcttctaacatttttatctttattagtgcttttgaccaaattgattcagacctatcttgatttgatttttcttatttttcttgttcttgaggcttattgaccttcttggattgcataaaattagaaaaattttcagccattattttttcagatactttgatccctcactcctcctctcctttagagggtccaatgacatgcacatttgaccacttgaagtaatccaactctctgatgttattttaatttttacaaattgcttttctctgtgtgttttatttttgacactttctattaatgtgtcatcaggttcattaaccttttctttggcaatatctaatctactattaatttcatctagtgtatttttcatgccagacattgtggttttaatcaccagaagtttgatttggatgttttcatatcttccacgcctctacttatctttttaaatgtctttgatacatttaaattgttccaataactattttaacataatgtcagttatgggttggtttgattggttgattattctacttatgaaccacaattttctacttttctgcattcttgcttaattttatttgacgccagacatcatttgatgccagacatttatttgatgccaaaatgcagaaaattttattttctgcattcttgcttaattttatttgatgccagactttttgtgtactggatattcttctatttctgtatgtgttcctgagctctgctctgggattccgttaaatgatgtggataaaattgatcagtatttaatctaaggctaattatttccccacactgaggcaagacctttctgagcactgcgcccaatgtcccatgacaataaacatagccctgagttaacagca

SEQ ID NO: 326616 - DNA, 2564 bp, Homo sapiens
gccgtcctcctcttgctgctgacctcctcctgctgctgtcctattcctgctgctgtctactgctgctacacaagaccctgagactgacctgcaggacgaaaccatgaagagcctgatccttcttgccatcctggccgccttagcggtagtaactttgtgttatgaatcacatgaaagcatggaatcttatgaacttaatcccttcattaacaggagaaatgcaaataccttcatatcccctcagcagagatggagagctaaagtccaagagaggatccgagaacgctctaagcctgtccacgagctcaatagggaagcctgtgatgactacagactttgcgaacgctacgccatggtttatggatacaatgctgcctataatcgctacttcaggaagcgccgagggaccaaatgagactgagggaagaaaaaaaatctctttttttctggaggctggcacctgattttgtatccccctgtagcagcattactgaaatacataggcttatatacaatgcttctttcctgtatattctcttgtctggctgcacccctttttcccgcccccagattgataagtaatgaaagtgcactgcagtgagggtcaaaggagagtcaacatatgtgattgttccataataaacttctggtgtgatactttcatcttgtaaatctgctttctttgggaagatattgagatatttaaatcatggcccaccttacccaaaataggagattctgttcatctcatatctagtattaattagaaaaataactacataaaaagaaggaagctaagaaggcactcactcagccataaattctctaaaccctctctaccttggaatccgtgaatggaatctggtatgttttttgcaggattttcctattgtaaattgtggcaaatacagggctcccttcatttgcttttcatctcttatgcatcaaagtcaaaaacatttctgaatcaagataatctagaagagaaaaaaggaggaaaaggaaaagagaaagcagaagggacaaataaaagcaattggcaaaaactgtcaataatagtttatacacttaactatatcaataatcacattatatgtaaatagtctaaacaatccaattattttttacttctacttatgttatatttttacttctacatttgttaaaggttccacgctacatttttactattcttgctttaaataattttaataatttcttttaaagtttagataataagaaaatatcccgggccaggcacagtggccacacctgtaatctcagtagccatgaccataccaatgcactccagcctgtgaaacagagtgagactctgtctctacagaaaaataaaaaagaaaagaaagaaaagatctcatatatttacccatgtaattttcatttcctgttttcttcattcttctttccatctggtgtcacttcctttctgcctgacgacttcctttaacgttttttatagttcaggtctgcaggattctttaagttttgtatgcttgtttttattcttgaaagatattttcactgtatattgaatcccaagttgccacgtttcttttaattattttaaggtattccactgaattctagcttgcacaatttttcgatataaaatttgttgtaattcttacctttgttccactgtgtatactgcatcttttatctctggctgcttctaacatttttatctttattagtgcttttgaccaaattgattcagacctatcttgatttgatttttcttatttttcttgttcttgaggcttattgaccttcttggattgcataaaattagaaaaattttcagccattattttttcagatactttgatccctcactcctcctctcctttagagggtccaatgacatgcacatttgaccacttgaagtaatccaactctctgatgttattttaatttttacaaattgcttttctctgtgtgttttatttttgacactttctattaatgtgtcatcaggttcattaaccttttctttggcaatatctaatctactattaatttcatctagtgtatttttcatgccagacattgtggttttaatcaccagaagtttgatttggatgttttcatatcttccacgcctctacttatctttttaaatgtctttgatacatttaaattgttccaataactattttaacataatgtcagttatgggttggtttgattggttgattattctacttatgaaccacaattttctacttttctgcattcttgcttaattttatttgacgccagacatcatttgatgccagacatttatttgatgccaaaatgcagaaaattttattttctgcattcttgcttaattttatttgatgccagactttttgtgtactggatattcttctatttctgtatgtgttcctgagctctgctctgggattccgttaaatgatgtggataaaattgatcagtatttaatctaaggctaattatttccccacactgaggcaagacctttctgagcactgcgcccaatgtcccatgacaataaacatagccctgagttaacagca

SEQ ID NO: 326617 - DNA, 2941 bp, Homo sapiens
tcaccatgttgtccaggctggtctcgaactcctggcctcaagtgatccacccaccacagcctcccaaagtgccgggattacaggcatgagccaccacacccagccagctgattgctgttgaatagctggatttataaagactgagcataggaggaaatggcacatcactctcatttttaatttattcattatttttatagtgtttaaactgttcatgtatcggcaatctagttatgcttcataaatcctcaggacagagaatttctcctcaaaaggaatttaaaatctaccaagtagaaatacagaaattaagaaaggcaaagtgatcgtccaaactcaaaaccaacaaagcctatatgacaagtctctaagacacatggattgattactgatttcatttgatcaggaagttaatgaaatctactttatactctcctttaatttttgccaatctccgtttatatgagttgcataagttaaggcactttcaaatatatttgtgtcaaggaatattcacggaaatatttccagctatgtgtcgctaaaactgcatttatttattttctgttctaagatcccttcattaacaggagaaatgcaaataccttcatatcccctcagcagagatggagagctaaagtccaagagaggatccgagaacgctctaagcctgtccacgagctcaatagggaagcctgtgatgactacagactttgcgaacgctacgccatggtttatggatacaatgctgcctataatcgctacttcaggaagcgccgagggaccaaatgagactgagggaagaaaaaaaatctctttttttctggaggctggcacctgattttgtatccccctgtagcagcattactgaaatacataggcttatatacaatgcttctttcctgtatattctcttgtctggctgcacccctttttcccgcccccagattgataagtaatgaaagtgcactgcagtgagggtcaaaggagagtcaacatatgtgattgttccataataaacttctggtgtgatactttcatcttgtaaatctgctttctttgggaagatattgagatatttaaatcatggcccaccttacccaaaataggagattctgttcatctcatatctagtattaattagaaaaataactacataaaaagaaggaagctaagaaggcactcactcagccataaattctctaaaccctctctaccttggaatccgtgaatggaatctggtatgttttttgcaggattttcctattgtaaattgtggcaaatacagggctcccttcatttgcttttcatctcttatgcatcaaagtcaaaaacatttctgaatcaagataatctagaagagaaaaaaggaggaaaaggaaaagagaaagcagaagggacaaataaaagcaattggcaaaaactgtcaataatagtttatacacttaactatatcaataatcacattatatgtaaatagtctaaacaatccaattattttttacttctacttatgttatatttttacttctacatttgttaaaggttccacgctacatttttactattcttgctttaaataattttaataatttcttttaaagtttagataataagaaaatatcccgggccaggcacagtggccacacctgtaatctcagtagccatgaccataccaatgcactccagcctgtgaaacagagtgagactctgtctctacagaaaaataaaaaagaaaagaaagaaaagatctcatatatttacccatgtaattttcatttcctgttttcttcattcttctttccatctggtgtcacttcctttctgcctgacgacttcctttaacgttttttatagttcaggtctgcaggattctttaagttttgtatgcttgtttttattcttgaaagatattttcactgtatattgaatcccaagttgccacgtttcttttaattattttaaggtattccactgaattctagcttgcacaatttttcgatataaaatttgttgtaattcttacctttgttccactgtgtatactgcatcttttatctctggctgcttctaacatttttatctttattagtgcttttgaccaaattgattcagacctatcttgatttgatttttcttatttttcttgttcttgaggcttattgaccttcttggattgcataaaattagaaaaattttcagccattattttttcagatactttgatccctcactcctcctctcctttagagggtccaatgacatgcacatttgaccacttgaagtaatccaactctctgatgttattttaatttttacaaattgcttttctctgtgtgttttatttttgacactttctattaatgtgtcatcaggttcattaaccttttctttggcaatatctaatctactattaatttcatctagtgtatttttcatgccagacattgtggttttaatcaccagaagtttgatttggatgttttcatatcttccacgcctctacttatctttttaaatgtctttgatacatttaaattgttccaataactattttaacataatgtcagttatgggttggtttgattggttgattattctacttatgaaccacaattttctacttttctgcattcttgcttaattttatttgacgccagacatcatttgatgccagacatttatttgatgccaaaatgcagaaaattttattttctgcattcttgcttaattttatttgatgccagactttttgtgtactggatattcttctatttctgtatgtgttcctgagctctgctctgggattccgttaaatgatgtggataaaattgatcagtatttaatctaaggctaattatttccccacactgaggcaagacctttctgagcactgcgcccaatgtcccatgacaataaacatagccctgagttaacagca

SEQ ID NO: 326618 - DNA, 2447 bp, Homo sapiens
ctgagccaccgcacccagcctctccctgttctttaaatatctcttaatataggggggcatggagagaaagtctctccaatattttcttcttcttttccatttttgtatttttccactttatccttctcaattttggcctcttcttccactttctaggatccgagaacgctctaagcctgtccacgagctcaatagggaagcctgtgatgactacagactttgcgaacgctacgccatggtttatggatacaatgctgcctataatcgctacttcaggaagcgccgagggaccaaatgagactgagggaagaaaaaaaatctctttttttctggaggctggcacctgattttgtatccccctgtagcagcattactgaaatacataggcttatatacaatgcttctttcctgtatattctcttgtctggctgcacccctttttcccgcccccagattgataagtaatgaaagtgcactgcagtgagggtcaaaggagagtcaacatatgtgattgttccataataaacttctggtgtgatactttcatcttgtaaatctgctttctttgggaagatattgagatatttaaatcatggcccaccttacccaaaataggagattctgttcatctcatatctagtattaattagaaaaataactacataaaaagaaggaagctaagaaggcactcactcagccataaattctctaaaccctctctaccttggaatccgtgaatggaatctggtatgttttttgcaggattttcctattgtaaattgtggcaaatacagggctcccttcatttgcttttcatctcttatgcatcaaagtcaaaaacatttctgaatcaagataatctagaagagaaaaaaggaggaaaaggaaaagagaaagcagaagggacaaataaaagcaattggcaaaaactgtcaataatagtttatacacttaactatatcaataatcacattatatgtaaatagtctaaacaatccaattattttttacttctacttatgttatatttttacttctacatttgttaaaggttccacgctacatttttactattcttgctttaaataattttaataatttcttttaaagtttagataataagaaaatatcccgggccaggcacagtggccacacctgtaatctcagtagccatgaccataccaatgcactccagcctgtgaaacagagtgagactctgtctctacagaaaaataaaaaagaaaagaaagaaaagatctcatatatttacccatgtaattttcatttcctgttttcttcattcttctttccatctggtgtcacttcctttctgcctgacgacttcctttaacgttttttatagttcaggtctgcaggattctttaagttttgtatgcttgtttttattcttgaaagatattttcactgtatattgaatcccaagttgccacgtttcttttaattattttaaggtattccactgaattctagcttgcacaatttttcgatataaaatttgttgtaattcttacctttgttccactgtgtatactgcatcttttatctctggctgcttctaacatttttatctttattagtgcttttgaccaaattgattcagacctatcttgatttgatttttcttatttttcttgttcttgaggcttattgaccttcttggattgcataaaattagaaaaattttcagccattattttttcagatactttgatccctcactcctcctctcctttagagggtccaatgacatgcacatttgaccacttgaagtaatccaactctctgatgttattttaatttttacaaattgcttttctctgtgtgttttatttttgacactttctattaatgtgtcatcaggttcattaaccttttctttggcaatatctaatctactattaatttcatctagtgtatttttcatgccagacattgtggttttaatcaccagaagtttgatttggatgttttcatatcttccacgcctctacttatctttttaaatgtctttgatacatttaaattgttccaataactattttaacataatgtcagttatgggttggtttgattggttgattattctacttatgaaccacaattttctacttttctgcattcttgcttaattttatttgacgccagacatcatttgatgccagacatttatttgatgccaaaatgcagaaaattttattttctgcattcttgcttaattttatttgatgccagactttttgtgtactggatattcttctatttctgtatgtgttcctgagctctgctctgggattccgttaaatgatgtggataaaattgatcagtatttaatctaaggctaattatttccccacactgaggcaagacctttctgagcactgcgcccaatgtcccatgacaataaacatagccctgagttaacagca

SEQ ID NO: 326619 - DNA, 2350 bp, Homo sapiens
ttagaggatcctcagtcttgctcccatcagcagagatggagagctaaagtccaagagaggatccgagaacgctctaagcctgtccacgagctcaatagggaagcctgtgatgactacagactttgcgaacgctacgccatggtttatggatacaatgctgcctataatcgctacttcaggaagcgccgagggaccaaatgagactgagggaagaaaaaaaatctctttttttctggaggctggcacctgattttgtatccccctgtagcagcattactgaaatacataggcttatatacaatgcttctttcctgtatattctcttgtctggctgcacccctttttcccgcccccagattgataagtaatgaaagtgcactgcagtgagggtcaaaggagagtcaacatatgtgattgttccataataaacttctggtgtgatactttcatcttgtaaatctgctttctttgggaagatattgagatatttaaatcatggcccaccttacccaaaataggagattctgttcatctcatatctagtattaattagaaaaataactacataaaaagaaggaagctaagaaggcactcactcagccataaattctctaaaccctctctaccttggaatccgtgaatggaatctggtatgttttttgcaggattttcctattgtaaattgtggcaaatacagggctcccttcatttgcttttcatctcttatgcatcaaagtcaaaaacatttctgaatcaagataatctagaagagaaaaaaggaggaaaaggaaaagagaaagcagaagggacaaataaaagcaattggcaaaaactgtcaataatagtttatacacttaactatatcaataatcacattatatgtaaatagtctaaacaatccaattattttttacttctacttatgttatatttttacttctacatttgttaaaggttccacgctacatttttactattcttgctttaaataattttaataatttcttttaaagtttagataataagaaaatatcccgggccaggcacagtggccacacctgtaatctcagtagccatgaccataccaatgcactccagcctgtgaaacagagtgagactctgtctctacagaaaaataaaaaagaaaagaaagaaaagatctcatatatttacccatgtaattttcatttcctgttttcttcattcttctttccatctggtgtcacttcctttctgcctgacgacttcctttaacgttttttatagttcaggtctgcaggattctttaagttttgtatgcttgtttttattcttgaaagatattttcactgtatattgaatcccaagttgccacgtttcttttaattattttaaggtattccactgaattctagcttgcacaatttttcgatataaaatttgttgtaattcttacctttgttccactgtgtatactgcatcttttatctctggctgcttctaacatttttatctttattagtgcttttgaccaaattgattcagacctatcttgatttgatttttcttatttttcttgttcttgaggcttattgaccttcttggattgcataaaattagaaaaattttcagccattattttttcagatactttgatccctcactcctcctctcctttagagggtccaatgacatgcacatttgaccacttgaagtaatccaactctctgatgttattttaatttttacaaattgcttttctctgtgtgttttatttttgacactttctattaatgtgtcatcaggttcattaaccttttctttggcaatatctaatctactattaatttcatctagtgtatttttcatgccagacattgtggttttaatcaccagaagtttgatttggatgttttcatatcttccacgcctctacttatctttttaaatgtctttgatacatttaaattgttccaataactattttaacataatgtcagttatgggttggtttgattggttgattattctacttatgaaccacaattttctacttttctgcattcttgcttaattttatttgacgccagacatcatttgatgccagacatttatttgatgccaaaatgcagaaaattttattttctgcattcttgcttaattttatttgatgccagactttttgtgtactggatattcttctatttctgtatgtgttcctgagctctgctctgggattccgttaaatgatgtggataaaattgatcagtatttaatctaaggctaattatttccccacactgaggcaagacctttctgagcactgcgcccaatgtcccatgacaataaacatagccctgagttaacagca

SEQ ID NO: 326620 - DNA, 2584 bp, Homo sapiens
gcccgactctatgaggatcccctgccatttactccatggccccatctgggatgtgaggagcgcctctgcccggccgagaccccgtctgggaggtgaggagcgtctctgcccggccgccccgtctgagaagtgagctactgctgctacacaagaccctgagactgacctgcaggacgaaaccatgaagagcctgatccttcttgccatcctggccgccttagcggtagtaactttgtgttatgaatcacatgaaagcatggaatcttatgaacttaatcccttcattaacaggagaaatgcaaataccttcatatcccctcagcagagatggagagctaaagtccaagagaggatccgagaacgctctaagcctgtccacgagctcaatagggaagcctgtgatgactacagactttgcgaacgctacgccatggtttatggatacaatgctgcctataatcgctacttcaggaagcgccgagggaccaaatgagactgagggaagcattactgaaatacataggcttatatacaatgcttctttcctgtatattctcttgtctggctgcacccctttttcccgcccccagattgataagtaatgaaagtgcactgcagtgagggtcaaaggagagtcaacatatgtgattgttccataataaacttctggtgtgatactttcatcttgtaaatctgctttctttgggaagatattgagatatttaaatcatggcccaccttacccaaaataggagattctgttcatctcatatctagtattaattagaaaaataactacataaaaagaaggaagctaagaaggcactcactcagccataaattctctaaaccctctctaccttggaatccgtgaatggaatctggtatgttttttgcaggattttcctattgtaaattgtggcaaatacagggctcccttcatttgcttttcatctcttatgcatcaaagtcaaaaacatttctgaatcaagataatctagaagagaaaaaaggaggaaaaggaaaagagaaagcagaagggacaaataaaagcaattggcaaaaactgtcaataatagtttatacacttaactatatcaataatcacattatatgtaaatagtctaaacaatccaattattttttacttctacttatgttatatttttacttctacatttgttaaaggttccacgctacatttttactattcttgctttaaataattttaataatttcttttaaagtttagataataagaaaatatcccgggccaggcacagtggccacacctgtaatctcagtagccatgaccataccaatgcactccagcctgtgaaacagagtgagactctgtctctacagaaaaataaaaaagaaaagaaagaaaagatctcatatatttacccatgtaattttcatttcctgttttcttcattcttctttccatctggtgtcacttcctttctgcctgacgacttcctttaacgttttttatagttcaggtctgcaggattctttaagttttgtatgcttgtttttattcttgaaagatattttcactgtatattgaatcccaagttgccacgtttcttttaattattttaaggtattccactgaattctagcttgcacaatttttcgatataaaatttgttgtaattcttacctttgttccactgtgtatactgcatcttttatctctggctgcttctaacatttttatctttattagtgcttttgaccaaattgattcagacctatcttgatttgatttttcttatttttcttgttcttgaggcttattgaccttcttggattgcataaaattagaaaaattttcagccattattttttcagatactttgatccctcactcctcctctcctttagagggtccaatgacatgcacatttgaccacttgaagtaatccaactctctgatgttattttaatttttacaaattgcttttctctgtgtgttttatttttgacactttctattaatgtgtcatcaggttcattaaccttttctttggcaatatctaatctactattaatttcatctagtgtatttttcatgccagacattgtggttttaatcaccagaagtttgatttggatgttttcatatcttccacgcctctacttatctttttaaatgtctttgatacatttaaattgttccaataactattttaacataatgtcagttatgggttggtttgattggttgattattctacttatgaaccacaattttctacttttctgcattcttgcttaattttatttgacgccagacatcatttgatgccagacatttatttgatgccaaaatgcagaaaattttattttctgcattcttgcttaattttatttgatgccagactttttgtgtactggatattcttctatttctgtatgtgttcctgagctctgctctgggattccgttaaatgatgtggataaaattgatcagtatttaatctaaggctaattatttccccacactgaggcaagacctttctgagcactgcgcccaatgtcccatgacaataaacatagccctgagttaacagca

SEQ ID NO: 326621 - DNA, 2274 bp, Homo sapiens
gcggccgcctactactactactactgctcgaattcaagcttctaacgatgtacgggtacgccatggtttatggatacaatgctgcctataatcgctacttcaggaagcgccgagggaccaaatgagactgagggaagaaaaaaaatctctttttttctggaggctggcacctgattttgtatccccctgtagcagcattactgaaatacataggcttatatacaatgcttctttcctgtatattctcttgtctggctgcacccctttttcccgcccccagattgataagtaatgaaagtgcactgcagtgagggtcaaaggagagtcaacatatgtgattgttccataataaacttctggtgtgatactttcatcttgtaaatctgctttctttgggaagatattgagatatttaaatcatggcccaccttacccaaaataggagattctgttcatctcatatctagtattaattagaaaaataactacataaaaagaaggaagctaagaaggcactcactcagccataaattctctaaaccctctctaccttggaatccgtgaatggaatctggtatgttttttgcaggattttcctattgtaaattgtggcaaatacagggctcccttcatttgcttttcatctcttatgcatcaaagtcaaaaacatttctgaatcaagataatctagaagagaaaaaaggaggaaaaggaaaagagaaagcagaagggacaaataaaagcaattggcaaaaactgtcaataatagtttatacacttaactatatcaataatcacattatatgtaaatagtctaaacaatccaattattttttacttctacttatgttatatttttacttctacatttgttaaaggttccacgctacatttttactattcttgctttaaataattttaataatttcttttaaagtttagataataagaaaatatcccgggccaggcacagtggccacacctgtaatctcagtagccatgaccataccaatgcactccagcctgtgaaacagagtgagactctgtctctacagaaaaataaaaaagaaaagaaagaaaagatctcatatatttacccatgtaattttcatttcctgttttcttcattcttctttccatctggtgtcacttcctttctgcctgacgacttcctttaacgttttttatagttcaggtctgcaggattctttaagttttgtatgcttgtttttattcttgaaagatattttcactgtatattgaatcccaagttgccacgtttcttttaattattttaaggtattccactgaattctagcttgcacaatttttcgatataaaatttgttgtaattcttacctttgttccactgtgtatactgcatcttttatctctggctgcttctaacatttttatctttattagtgcttttgaccaaattgattcagacctatcttgatttgatttttcttatttttcttgttcttgaggcttattgaccttcttggattgcataaaattagaaaaattttcagccattattttttcagatactttgatccctcactcctcctctcctttagagggtccaatgacatgcacatttgaccacttgaagtaatccaactctctgatgttattttaatttttacaaattgcttttctctgtgtgttttatttttgacactttctattaatgtgtcatcaggttcattaaccttttctttggcaatatctaatctactattaatttcatctagtgtatttttcatgccagacattgtggttttaatcaccagaagtttgatttggatgttttcatatcttccacgcctctacttatctttttaaatgtctttgatacatttaaattgttccaataactattttaacataatgtcagttatgggttggtttgattggttgattattctacttatgaaccacaattttctacttttctgcattcttgcttaattttatttgacgccagacatcatttgatgccagacatttatttgatgccaaaatgcagaaaattttattttctgcattcttgcttaattttatttgatgccagactttttgtgtactggatattcttctatttctgtatgtgttcctgagctctgctctgggattccgttaaatgatgtggataaaattgatcagtatttaatctaaggctaattatttccccacactgaggcaagacctttctgagcactgcgcccaatgtcccatgacaataaacatagccctgagttaacagca

SEQ ID NO: 326622 - DNA, 2496 bp, Homo sapiens
gaaggctttttctgatttttgacaaatgaattttgcacactttcattggtgtctttcggcaacttacacacattgaaaatgagctatgtacatatttttatattctctttataaatgcatgtctgattgtacttgtaacaatattgtaatgaacggctgtgcagtaggcccagcgctgctgtgtctcgtcagaggaatagcttaccacgaacccctcagcatactgggaatctcttcctgaacaacgaatgtaaatttggtcaagtctactcttccgttcattcaattattttaagcatttgaattatttattgtatatcctaaatatatttctcctttggcagtgactagatttccactaatgtgtcttaatctatccctccagctggcacctgattttgtatccccctgtagcagcattactgaaatacataggcttatatacaatgcttctttcctgtatattctcttgtctggctgcacccctttttcccgcccccagattgataagtaatgaaagtgcactgcagtgagggtcaaaggagagtcaacatatgtgattgttccataataaacttctggtgtgatactttcatcttgtaaatctgctttctttgggaagatattgagatatttaaatcatggcccaccttacccaaaataggagattctgttcatctcatatctagtattaattagaaaaataactacataaaaagaaggaagctaagaaggcactcactcagccataaattctctaaaccctctctaccttggaatccgtgaatggaatctggtatgttttttgcaggattttcctattgtaaattgtggcaaatacagggctcccttcatttgcttttcatctcttatgcatcaaagtcaaaaacatttctgaatcaagataatctagaagagaaaaaaggaggaaaaggaaaagagaaagcagaagggacaaataaaagcaattggcaaaaactgtcaataatagtttatacacttaactatatcaataatcacattatatgtaaatagtctaaacaatccaattattttttacttctacttatgttatatttttacttctacatttgttaaaggttccacgctacatttttactattcttgctttaaataattttaataatttcttttaaagtttagataataagaaaatatcccgggccaggcacagtggccacacctgtaatctcagtagccatgaccataccaatgcactccagcctgtgaaacagagtgagactctgtctctacagaaaaataaaaaagaaaagaaagaaaagatctcatatatttacccatgtaattttcatttcctgttttcttcattcttctttccatctggtgtcacttcctttctgcctgacgacttcctttaacgttttttatagttcaggtctgcaggattctttaagttttgtatgcttgtttttattcttgaaagatattttcactgtatattgaatcccaagttgccacgtttcttttaattattttaaggtattccactgaattctagcttgcacaatttttcgatataaaatttgttgtaattcttacctttgttccactgtgtatactgcatcttttatctctggctgcttctaacatttttatctttattagtgcttttgaccaaattgattcagacctatcttgatttgatttttcttatttttcttgttcttgaggcttattgaccttcttggattgcataaaattagaaaaattttcagccattattttttcagatactttgatccctcactcctcctctcctttagagggtccaatgacatgcacatttgaccacttgaagtaatccaactctctgatgttattttaatttttacaaattgcttttctctgtgtgttttatttttgacactttctattaatgtgtcatcaggttcattaaccttttctttggcaatatctaatctactattaatttcatctagtgtatttttcatgccagacattgtggttttaatcaccagaagtttgatttggatgttttcatatcttccacgcctctacttatctttttaaatgtctttgatacatttaaattgttccaataactattttaacataatgtcagttatgggttggtttgattggttgattattctacttatgaaccacaattttctacttttctgcattcttgcttaattttatttgacgccagacatcatttgatgccagacatttatttgatgccaaaatgcagaaaattttattttctgcattcttgcttaattttatttgatgccagactttttgtgtactggatattcttctatttctgtatgtgttcctgagctctgctctgggattccgttaaatgatgtggataaaattgatcagtatttaatctaaggctaattatttccccacactgaggcaagacctttctgagcactgcgcccaatgtcccatgacaataaacatagccctgagttaacagca

SEQ ID NO: 326623 - DNA, 837 bp, Homo sapiens
  misc_feature (2)..(3): n is a, c, g, or t
  misc_feature (5)..(5): n is a, c, g, or t
  misc_feature (18)..(18): n is a, c, g, or t
  misc_feature (30)..(30): n is a, c, g, or t
tnntnacccctttggaanaccctgactctntggatccccatatcgtgctgccctactgctgctacacaagaccctgagactgacctgcaggacgaaaccatgaagagcctgatccttcttgccatcctggccgccttagcggtagtaactttgtgttatgaatcacatgaaagcatggaatcttatgaacttaatcccttcattaacaggagaaatgcaaataccttcatatcccctcagcagagatggagagctaaagtccaagagaggatccgagaacgctctaagcctgtccacgagctcaatagggaagcctgtgatgactacagactttgcgaacgctacgccatggtttatggatacaatgctgcctataatcgctacttcaggaagcgccgagggaccaaatgagactgagggaagaaaaaaaatctctttttttctggaggctggcacctgattttgtatccccctgtagcagcattactgaaatacataggcttatatacaatgcttctttcctgtatattctcttgtctggctgcacccctttttcccgcccccagattgataagtaatgaaagtgcactgcagtgagggtcaaaggagagtcaacatatgtgattgttccataataaacttctggtgtgatgacaacacaaaaaaaaaaaattttggccccctggcccggaaaagttttaacactttcggttgggccggcgccctggtattgaacgtggcgccgttcccaggaacccggcgacaggcgggttccccccaaaccccgggcccggctttgacacccaaggtcgggcagggctccacgggccgagcttc

SEQ ID NO: 326624 - DNA, 358 bp, Homo sapiens
actggttcctcccctctcaactgctctggttcttataaaaacctcacagccttccactaacatcccataggagcctctctccctactgctgctacacaagaccctgagactgacctgcaggacgaaaccatgaagagcctgatccttcttgccatcctggccgccttagcggtagtaactttgtgttatgaatcacatgaaagcatggaatcttatgaacttaatcccttcattaacaggagaaatgcaaataccttcatatcccctcagcagagatggagagctaaagtccaagagaggatccgagacgctctagcctgtccacgagctgggatcctctagatcacctgcggcaaca

SEQ ID NO: 326625 - DNA, 2557 bp, Homo sapiens
  misc_feature (183)..(183): n is a, c, g, or t
attatatacacgcaaattgcccgaccgaaactctaagcacattctgtgacttaccgacacttgaacttacagacaccgggccgacgcatccactacgtcagtcatcatcgtcattgcttctctgcggtggtaaaaacggcggccgtcagtgttatgaactctcctgaaagcatggaatcttangaacttaatcccttcattaacaggagaaatgcaaataccttcatatcccctcagcagagatggagagctaaagtccaagagaggatccgagaacgctctaagcctgtccacgagctcaatagggaagcctgtgatgactacagactttgcgaacgctacgccatggtttatggatacaatgctgcctataatcgctacttcaggaagcgccgagggaccaaatgagactgagggaagaaaaaaaatctctttttttctggaggctggcacctgattttgtatccccctgtagcagcattactgaaatacataggcttatatacaatgcttctttcctgtatattctcttgtctggctgcacccctttttcccgcccccagattgataagtaatgaaagtgcactgcagtgagggtcaaaggagagtcaacatatgtgattgttccataataaacttctggtgtgatactttcatcttgtaaatctgctttctttgggaagatattgagatatttaaatcatggcccaccttacccaaaataggagattctgttcatctcatatctagtattaattagaaaaataactacataaaaagaaggaagctaagaaggcactcactcagccataaattctctaaaccctctctaccttggaatccgtgaatggaatctggtatgttttttgcaggattttcctattgtaaattgtggcaaatacagggctcccttcatttgcttttcatctcttatgcatcaaagtcaaaaacatttctgaatcaagataatctagaagagaaaaaaggaggaaaaggaaaagagaaagcagaagggacaaataaaagcaattggcaaaaactgtcaataatagtttatacacttaactatatcaataatcacattatatgtaaatagtctaaacaatccaattattttttacttctacttatgttatatttttacttctacatttgttaaaggttccacgctacatttttactattcttgctttaaataattttaataatttcttttaaagtttagataataagaaaatatcccgggccaggcacagtggccacacctgtaatctcagtagccatgaccataccaatgcactccagcctgtgaaacagagtgagactctgtctctacagaaaaataaaaaagaaaagaaagaaaagatctcatatatttacccatgtaattttcatttcctgttttcttcattcttctttccatctggtgtcacttcctttctgcctgacgacttcctttaacgttttttatagttcaggtctgcaggattctttaagttttgtatgcttgtttttattcttgaaagatattttcactgtatattgaatcccaagttgccacgtttcttttaattattttaaggtattccactgaattctagcttgcacaatttttcgatataaaatttgttgtaattcttacctttgttccactgtgtatactgcatcttttatctctggctgcttctaacatttttatctttattagtgcttttgaccaaattgattcagacctatcttgatttgatttttcttatttttcttgttcttgaggcttattgaccttcttggattgcataaaattagaaaaattttcagccattattttttcagatactttgatccctcactcctcctctcctttagagggtccaatgacatgcacatttgaccacttgaagtaatccaactctctgatgttattttaatttttacaaattgcttttctctgtgtgttttatttttgacactttctattaatgtgtcatcaggttcattaaccttttctttggcaatatctaatctactattaatttcatctagtgtatttttcatgccagacattgtggttttaatcaccagaagtttgatttggatgttttcatatcttccacgcctctacttatctttttaaatgtctttgatacatttaaattgttccaataactattttaacataatgtcagttatgggttggtttgattggttgattattctacttatgaaccacaattttctacttttctgcattcttgcttaattttatttgacgccagacatcatttgatgccagacatttatttgatgccaaaatgcagaaaattttattttctgcattcttgcttaattttatttgatgccagactttttgtgtactggatattcttctatttctgtatgtgttcctgagctctgctctgggattccgttaaatgatgtggataaaattgatcagtatttaatctaaggctaattatttccccacactgaggcaagacctttctgagcactgcgcccaatgtcccatgacaataaacatagccctgagttaacagca

SEQ ID NO: 326626 - DNA, 2532 bp, Homo sapiens
actggttcctcccctctcaactgctctggttcttataaaaacctcacagccttccactaacatcccataggagcctctctccctactgctgctacacaagaccctgagactgacctgcaggacgaaaccatgaagagcctgatccttcttgccatcctggccgccttagcggtagtaactttgtgttatgaatcacatgaaagcatggaatcttatgaacttaatcccttcattaacaggagaaatgcaaataccttcatatcccctcagcagagatggagagctaaagtccaagagaggatccgagaacgctctaagcctgtccacgagctcaatagggaagcctgtgatgactacagactttgcgaacgctacgccatggtttatggatacaatgctgcctataatcgctacttcaggaagcgccgagggaccaaatgagactgagggaagcattactgaaatacataggcttatatacaatgcttctttcctgtatattctcttgtctggctgcacccctttttcccgcccccagattgataagtaatgaaagtgcactgcagtgagggtcaaaggagagtcaacatatgtgattgttccataataaacttctggtgtgatactttcatcttgtaaatctgctttctttgggaagatattgagatatttaaatcatggcccaccttacccaaaataggagattctgttcatctcatatctagtattaattagaaaaataactacataaaaagaaggaagctaagaaggcactcactcagccataaattctctaaaccctctctaccttggaatccgtgaatggaatctggtatgttttttgcaggattttcctattgtaaattgtggcaaatacagggctcccttcatttgcttttcatctcttatgcatcaaagtcaaaaacatttctgaatcaagataatctagaagagaaaaaaggaggaaaaggaaaagagaaagcagaagggacaaataaaagcaattggcaaaaactgtcaataatagtttatacacttaactatatcaataatcacattatatgtaaatagtctaaacaatccaattattttttacttctacttatgttatatttttacttctacatttgttaaaggttccacgctacatttttactattcttgctttaaataattttaataatttcttttaaagtttagataataagaaaatatcccgggccaggcacagtggccacacctgtaatctcagtagccatgaccataccaatgcactccagcctgtgaaacagagtgagactctgtctctacagaaaaataaaaaagaaaagaaagaaaagatctcatatatttacccatgtaattttcatttcctgttttcttcattcttctttccatctggtgtcacttcctttctgcctgacgacttcctttaacgttttttatagttcaggtctgcaggattctttaagttttgtatgcttgtttttattcttgaaagatattttcactgtatattgaatcccaagttgccacgtttcttttaattattttaaggtattccactgaattctagcttgcacaatttttcgatataaaatttgttgtaattcttacctttgttccactgtgtatactgcatcttttatctctggctgcttctaacatttttatctttattagtgcttttgaccaaattgattcagacctatcttgatttgatttttcttatttttcttgttcttgaggcttattgaccttcttggattgcataaaattagaaaaattttcagccattattttttcagatactttgatccctcactcctcctctcctttagagggtccaatgacatgcacatttgaccacttgaagtaatccaactctctgatgttattttaatttttacaaattgcttttctctgtgtgttttatttttgacactttctattaatgtgtcatcaggttcattaaccttttctttggcaatatctaatctactattaatttcatctagtgtatttttcatgccagacattgtggttttaatcaccagaagtttgatttggatgttttcatatcttccacgcctctacttatctttttaaatgtctttgatacatttaaattgttccaataactattttaacataatgtcagttatgggttggtttgattggttgattattctacttatgaaccacaattttctacttttctgcattcttgcttaattttatttgacgccagacatcatttgatgccagacatttatttgatgccaaaatgcagaaaattttattttctgcattcttgcttaattttatttgatgccagactttttgtgtactggatattcttctatttctgtatgtgttcctgagctctgctctgggattccgttaaatgatgtggataaaattgatcagtatttaatctaaggctaattatttccccacactgaggcaagacctttctgagcactgcgcccaatgtcccatgacaataaacatagccctgagttaacagca

SEQ ID NO: 326627 - DNA, 6286 bp, Homo sapiens
  misc_feature (660)..(660): n is a, c, g, or t
  misc_feature (772)..(772): n is a, c, g, or t
tgaagaaagggtggcagagagcactggctatagtgtgtgacttcaaactctttctgtacgatattgctgaaggaaaagcatctcagcccagtgttgtcattagtcaagtgattgacatgagggatgaagaattttctgtgagttcagtcttggcttctgatgttatccatgcaagtcggaaagatataccctgtatatttagggtcacagcttcccagctctcagcatctaataacaaatgttcaatcctgatgctagcagacactgagaatgagaagaataagtgggtgggagtgctgagtgaattgcacaagattttgaagaaaaacaaattcagagaccgctcagtctatgttcccaaagaggcttatgacagcactctacccctcattaaaacaacccaggcagccgcaatcatagatcatgaaagaattgctttgggaaacgaagaagggttatttgttgtacatgtcaccaaagatgaaattattagagttggtgacaataagaagattcatcagattgaactcattccaaatgatcagcttgttgctgtgatctcaggacgaaatcgtcatgtacgactttttcctatgtcagcattggatgggcgagagaccgatttttacaagctgtcagaaactaaagggtgtcaaaccntaacttctggaaaggtgcgccatggagctctcacatgcctgtgtgtggctatgaaaaggcaggtcctctgttatgaactatttcagagcaagaccgtcacagaaaatttaangaaattcaagtcccatataatgtccagtggatggcaatcttcagtgaacaactctgtgtgggattccagtcaggatttctaagataccccttgaatggagaaggaaatccatacagtatgctccattcaaatgaccatacactatcatttattgcacatcaaccaatggatgctatctgcgcagttgagatctccagtaaagaatatctgctgtgttttaacagcattgggatatacactgactgccagggccgaagatctagacaacaggaattgatgtggccagcaaatccttcctcttgttgttacaatgcaccatatctctcggtgtacagtgaaaatgcagttgatatctttgatgtgaactccatggaatggattcagactcttcctctcaaaaaggttcgacccttaaacaatgaaggatcattaaatcttttagggttggagaccattagattaatatatttcaaaaataagatggcagaaggggacgaactggtagtacctgaaacatcagataatagtcggaaacaaatggttagaaacattaacaataagcggcgttattccttcagagtcccagaagaggaaaggatgcagcagaggagggaaatgctacgagatccagaaatgagaaataaattaatttctaatccaactaattttaatcacatagcacacatgggtcctggagatggaatacagatcctgaaagatctgcccatgaaccctcggcctcaggaaagtcggacagtattcagtggctcagtcagtattccatctatcaccaaatcccgccctgagccaggccgctccatgagtgctagcagtggcttgtcagcaaggtcatccgcacagaatggcagcgcattaaagagggaattctctggaggaagctacagtgccaagcggcagcccatgccctccccgtcagagggctctttgtcctccggaggcatggaccaaggaagtgatgccccagcgagggactttgacggagaggactctgactctccgaggcattccacagcttccaacagttccaacctaagcagccccccaagcccagtttcaccccgaaaaaccaagagcctctccctggagagcactgaccgcgggagctgggacccgtgagctgcctcagcactgggacctctcgctctccgctccctgccactcacctcctctcactttcatctcttccctccacctcgcctgctcggcctgaaagccaccaggggctggcagcagtagcaggacagggcttcaggagttctgacgacacgactctcagatccacgcccccagcctaacagcaacaacaaagacagactttccgtagcagcttagattaacgttgatttcattccatgcacttagagttgctttcagtaacattttacccctactcccaaaggtagcttaaatagacagattacacaaatgtaagtgataagaataagattagacagattttgctttcacagtagagtctcattatagtcctaaaatagctcatgggcttctccgcatccagaagggagaattggtccctggagtggctcactaagctcttaatcagcaaacgcagtgagtatcaacctgattgttgccaggaaatccttatgaattaaaacaatgcatattttactacagtacagagtttaaatgaatacataaatgtagaagtactgaatgtatatatttaaaaggagcctcttgtattcaacaaaagatggatgcatatataagagagatgatttaatttaaagaaatatgttgtttcttgtctgtaatgtaatgtaaagggtggaaaggcctcaagctcacatttgtagagagagagcgagagaaatcagagttccctttattgccctgtcctcaaactggtcataggctctagtcacctggggagctgtagaaaacacttgcagagccaggttttgctggtttggggcatgccctgggcaccagagctttaacatttgaagccacttcagcagcagcagcaaaaggcgaactcatctctacccaagatgtttcttttcctagtggtggaatttgaacacttctcactttttattgtattttatcttccgcagataaatgtagaaatacacggttctgtcacctctgatcccttccatctgaaagggtacaaggagtgttgtagcttctgaaggtgcagaaaacaatttctaaaaatgcttttattcctgggctaatcctgtccctccctaagtcgcagcgaggtgtctgtcccagggctggagatgcttcccaaggaggagtctgttttgttgagagtgggcgtgggcttcttcacataagcctggggaaggaagaaaaaacggctttcattaccaaataatgtaaaacctcaaaagcaagggcttcaacagccttaaccaaatattattccccatagccagtggaaaatggatgtgacaaccccagtgcgcaggccagagtgagtgagcccagcacggcgctccgactggcttcctctctcaggtgctggattgtggggttagtggcatttccagctggattcctcctgttgtagttgccataaggaaatgagatgcagaatcagaaggatctatttctacagaatcatttcaccagttaagcacatgagtagagaaagagataaaaataaaagtatctcatgaaggaaagagattttgcctctcttttacttttcacctaagtttctctgagaaatagagacaggattctctctttaaaattcagtgaaaatgaagaaagttttcctgcagttgctaacctgagttgcagtgtttaaggccatcatttcactgctgctgtctgtgactccacgtctgtgtcactgaggtgacctgcgtgtcactgaggtggccaccatgctggcctgcggcatgtgcagggagctgaggctgtttccaggtgatgctgctgtgtggagaaggttctgagatgcagtgagggaagaaaggatcctgctggggattccattgtaagcacctataatcgggaattttcatgtaacagctttgacatttaaacattctgagtttggtgccagctcagatttgattatattttattttggatgggtgtaattcacagcacagttctaatctcccaaatctttctgctttttagaatgaagtataaaaatacttttctcacctgaataccaagggttggccctttagttggatcattgtcatatgacttggtagatccttgtcctcagcacctcacgtgagagaagggagtcagccagccggccccctgcttggtgctcgtgaccagctcgcaccccttctgtccacccttctctcctctcctccccactctccccaccctcctcactctccccaccctcccctcctctcctcctcactcttcccaccctccccatccccaccctccccatcctcctcttccctttccccttgccttctcctctctcccttctcttctcaggcagggaggaggccatcccaagccgagattaacaggacttgacataagccattagtttgtagctttgacaagtaattatgaatttttgttgcttattttgcaaaggatgcttttaagatcaaaataataaccctacctaaagtctagctccactgctatgggtcatactcttcagcctcccaacagggcagagagagagagctactgaggcttgtctaggttgccaggctaactgggcggcttgtccatattcaccccatggattgcaccatggcactctttgatttttccactgcaatggcaagtaatctcatcagtcataatagagcagtcccgaatgcgtgcagattctaaaagcagggctttaggagagaaacactgccagggggaatagttttggggagggttttcccaaaataacggtcatcctactgggtttatcccacccttaaatatgaagcctgttacctccagaagcttctgagaagaatgatgtgaaaagacagggagtgggttctaggcaaagaaaacataatgaccatttagaggagtcagtagcaaagctcacagataaagtattttattactatctgaagttttcttttgttttcatgcaggacattttaaaaacgtatgtggcagcagaaacttgtttctcaatagaaaaaatacattcagaggcatttctgggatagtctatctgtgttagtatttggtgctatctatgtccagccaagttatctaccctcaaattctgactaatcatgtttgtgctttgggtatttaaaattacatacatatatattctttttgccaaaaacaaaagtcttgcttcttgtcaaatgattgctaaagtagatcttacattttttgttattatgtatatatttatacacacccccaacacacttagtgatttctgttatttcctagggagcacagctttaaggctatgagatacaactaaaaggagcccatctatttggttttccagccaattattgtactcacatttcaggggagaatctgaaattcctgtcatgtttacagcaacaatctatcattcctggctagctctcagcctctctctccttccataggttagaattatgtcattttgttacttagtggccacgtctatttctgagaaagactggttacatttatgtggcatctcaggtatcattaaggaaaagccagagcaggggtgagcagaggtcaaaaccacagacgcagcagggccatttgccgcctttggccgggatcacaaccactgcagtctcccagcaggtaggccttgccaagcctaaggctccccatccaatctagacagaggggcgctcagagcagactttgccgtagcccatgtctggtgagcacaacagggaatgaattgggcactccactcccccgtctctctggcccagccctgaactagatgagctgcatttcatggagcccattttaaaacctctttccttatgactttgttactcaagtccagagttctctgtgcacttctgctagataaggagtgtaagccctgccccccagcactggcagcacgctgggccctccccacacaggacaccgtgcagttccgggggaagctgactcaaatcaaccttgaaatctcatgaaaacaaaatgacttgtctttttatttgatagtgtaatatcattcattttataaattttttagggtttttctcgtgtaatattgtacagttttgcatggcctggtgtgatcattttttggttagaatataatgctgacaaatgtggatggaggggaagatactgctttagcctatcactccttattttattttgtttggttttatgccctcagtgtcttagggaactttttaagagatcctctgctaccaaacaatgatgtggattcttttgcacagaaatatttaaggtgggatggtaaaaaatgtcacaaaagactcctcaccaatactttatgttgatatcacttaatattaaccagactttgctgtattgcaataaaacagagaactgtta

SEQ ID NO: 326628 - DNA, 6472 bp, Homo sapiens
  misc_feature (660)..(660): n is a, c, g, or t
  misc_feature (772)..(772): n is a, c, g, or t
tgaagaaagggtggcagagagcactggctatagtgtgtgacttcaaactctttctgtacgatattgctgaaggaaaagcatctcagcccagtgttgtcattagtcaagtgattgacatgagggatgaagaattttctgtgagttcagtcttggcttctgatgttatccatgcaagtcggaaagatataccctgtatatttagggtcacagcttcccagctctcagcatctaataacaaatgttcaatcctgatgctagcagacactgagaatgagaagaataagtgggtgggagtgctgagtgaattgcacaagattttgaagaaaaacaaattcagagaccgctcagtctatgttcccaaagaggcttatgacagcactctacccctcattaaaacaacccaggcagccgcaatcatagatcatgaaagaattgctttgggaaacgaagaagggttatttgttgtacatgtcaccaaagatgaaattattagagttggtgacaataagaagattcatcagattgaactcattccaaatgatcagcttgttgctgtgatctcaggacgaaatcgtcatgtacgactttttcctatgtcagcattggatgggcgagagaccgatttttacaagctgtcagaaactaaagggtgtcaaaccntaacttctggaaaggtgcgccatggagctctcacatgcctgtgtgtggctatgaaaaggcaggtcctctgttatgaactatttcagagcaagaccgtcacagaaaatttaangaaattcaagtcccatataatgtccagtggatggcaatcttcagtgaacaactctgtgtgggattccagtcaggatttctaagataccccttgaatggagaaggaaatccatacagtatgctccattcaaatgaccatacactatcatttattgcacatcaaccaatggatgctatctgcgcagttgagatctccagtaaagaatatctgctgtgttttaacagcattgggatatacactgactgccagggccgaagatctagacaacaggaattgatgtggccagcaaatccttcctcttgttgttacaatgcaccatatctctcggtgtacagtgaaaatgcagttgatatctttgatgtgaactccatggaatggattcagactcttcctctcaaaaaggttcgacccttaaacaatgaaggatcattaaatcttttagggttggagaccattagattaatatatttcaaaaataagatggcagaaggggacgaactggtagtacctgaaacatcagataatagtcggaaacaaatggttagaaacattaacaataagcggcgttattccttcagagtcccagaagaggaaaggatgcagcagaggagggaaatgctacgagatccagaaatgagaaataaattaatttctaatccaactaattttaatcacatagcacacatgggtcctggagatggaatacagatcctgaaagatctgcccatgccaggtttcccttatccatcccctcatcatcactccggtctgatctcctctccgatcaactttgaacacatctatcacatgactgttaattctgctgaaaaatttctctctcctgattccataaaccctgaatattccccgtctctgcgctctgtccctggtacaccaagctttatgactctgaggaaccctcggcctcaggaaagtcggacagtattcagtggctcagtcagtattccatctatcaccaaatcccgccctgagccaggccgctccatgagtgctagcagtggcttgtcagcaaggtcatccgcacagaatggcagcgcattaaagagggaattctctggaggaagctacagtgccaagcggcagcccatgccctccccgtcagagggctctttgtcctccggaggcatggaccaaggaagtgatgccccagcgagggactttgacggagaggactctgactctccgaggcattccacagcttccaacagttccaacctaagcagccccccaagcccagtttcaccccgaaaaaccaagagcctctccctggagagcactgaccgcgggagctgggacccgtgagctgcctcagcactgggacctctcgctctccgctccctgccactcacctcctctcactttcatctcttccctccacctcgcctgctcggcctgaaagccaccaggggctggcagcagtagcaggacagggcttcaggagttctgacgacacgactctcagatccacgcccccagcctaacagcaacaacaaagacagactttccgtagcagcttagattaacgttgatttcattccatgcacttagagttgctttcagtaacattttacccctactcccaaaggtagcttaaatagacagattacacaaatgtaagtgataagaataagattagacagattttgctttcacagtagagtctcattatagtcctaaaatagctcatgggcttctccgcatccagaagggagaattggtccctggagtggctcactaagctcttaatcagcaaacgcagtgagtatcaacctgattgttgccaggaaatccttatgaattaaaacaatgcatattttactacagtacagagtttaaatgaatacataaatgtagaagtactgaatgtatatatttaaaaggagcctcttgtattcaacaaaagatggatgcatatataagagagatgatttaatttaaagaaatatgttgtttcttgtctgtaatgtaatgtaaagggtggaaaggcctcaagctcacatttgtagagagagagcgagagaaatcagagttccctttattgccctgtcctcaaactggtcataggctctagtcacctggggagctgtagaaaacacttgcagagccaggttttgctggtttggggcatgccctgggcaccagagctttaacatttgaagccacttcagcagcagcagcaaaaggcgaactcatctctacccaagatgtttcttttcctagtggtggaatttgaacacttctcactttttattgtattttatcttccgcagataaatgtagaaatacacggttctgtcacctctgatcccttccatctgaaagggtacaaggagtgttgtagcttctgaaggtgcagaaaacaatttctaaaaatgcttttattcctgggctaatcctgtccctccctaagtcgcagcgaggtgtctgtcccagggctggagatgcttcccaaggaggagtctgttttgttgagagtgggcgtgggcttcttcacataagcctggggaaggaagaaaaaacggctttcattaccaaataatgtaaaacctcaaaagcaagggcttcaacagccttaaccaaatattattccccatagccagtggaaaatggatgtgacaaccccagtgcgcaggccagagtgagtgagcccagcacggcgctccgactggcttcctctctcaggtgctggattgtggggttagtggcatttccagctggattcctcctgttgtagttgccataaggaaatgagatgcagaatcagaaggatctatttctacagaatcatttcaccagttaagcacatgagtagagaaagagataaaaataaaagtatctcatgaaggaaagagattttgcctctcttttacttttcacctaagtttctctgagaaatagagacaggattctctctttaaaattcagtgaaaatgaagaaagttttcctgcagttgctaacctgagttgcagtgtttaaggccatcatttcactgctgctgtctgtgactccacgtctgtgtcactgaggtgacctgcgtgtcactgaggtggccaccatgctggcctgcggcatgtgcagggagctgaggctgtttccaggtgatgctgctgtgtggagaaggttctgagatgcagtgagggaagaaaggatcctgctggggattccattgtaagcacctataatcgggaattttcatgtaacagctttgacatttaaacattctgagtttggtgccagctcagatttgattatattttattttggatgggtgtaattcacagcacagttctaatctcccaaatctttctgctttttagaatgaagtataaaaatacttttctcacctgaataccaagggttggccctttagttggatcattgtcatatgacttggtagatccttgtcctcagcacctcacgtgagagaagggagtcagccagccggccccctgcttggtgctcgtgaccagctcgcaccccttctgtccacccttctctcctctcctccccactctccccaccctcctcactctccccaccctcccctcctctcctcctcactcttcccaccctccccatccccaccctccccatcctcctcttccctttccccttgccttctcctctctcccttctcttctcaggcagggaggaggccatcccaagccgagattaacaggacttgacataagccattagtttgtagctttgacaagtaattatgaatttttgttgcttattttgcaaaggatgcttttaagatcaaaataataaccctacctaaagtctagctccactgctatgggtcatactcttcagcctcccaacagggcagagagagagagctactgaggcttgtctaggttgccaggctaactgggcggcttgtccatattcaccccatggattgcaccatggcactctttgatttttccactgcaatggcaagtaatctcatcagtcataatagagcagtcccgaatgcgtgcagattctaaaagcagggctttaggagagaaacactgccagggggaatagttttggggagggttttcccaaaataacggtcatcctactgggtttatcccacccttaaatatgaagcctgttacctccagaagcttctgagaagaatgatgtgaaaagacagggagtgggttctaggcaaagaaaacataatgaccatttagaggagtcagtagcaaagctcacagataaagtattttattactatctgaagttttcttttgttttcatgcaggacattttaaaaacgtatgtggcagcagaaacttgtttctcaatagaaaaaatacattcagaggcatttctgggatagtctatctgtgttagtatttggtgctatctatgtccagccaagttatctaccctcaaattctgactaatcatgtttgtgctttgggtatttaaaattacatacatatatattctttttgccaaaaacaaaagtcttgcttcttgtcaaatgattgctaaagtagatcttacattttttgttattatgtatatatttatacacacccccaacacacttagtgatttctgttatttcctagggagcacagctttaaggctatgagatacaactaaaaggagcccatctatttggttttccagccaattattgtactcacatttcaggggagaatctgaaattcctgtcatgtttacagcaacaatctatcattcctggctagctctcagcctctctctccttccataggttagaattatgtcattttgttacttagtggccacgtctatttctgagaaagactggttacatttatgtggcatctcaggtatcattaaggaaaagccagagcaggggtgagcagaggtcaaaaccacagacgcagcagggccatttgccgcctttggccgggatcacaaccactgcagtctcccagcaggtaggccttgccaagcctaaggctccccatccaatctagacagaggggcgctcagagcagactttgccgtagcccatgtctggtgagcacaacagggaatgaattgggcactccactcccccgtctctctggcccagccctgaactagatgagctgcatttcatggagcccattttaaaacctctttccttatgactttgttactcaagtccagagttctctgtgcacttctgctagataaggagtgtaagccctgccccccagcactggcagcacgctgggccctccccacacaggacaccgtgcagttccgggggaagctgactcaaatcaaccttgaaatctcatgaaaacaaaatgacttgtctttttatttgatagtgtaatatcattcattttataaattttttagggtttttctcgtgtaatattgtacagttttgcatggcctggtgtgatcattttttggttagaatataatgctgacaaatgtggatggaggggaagatactgctttagcctatcactccttattttattttgtttggttttatgccctcagtgtcttagggaactttttaagagatcctctgctaccaaacaatgatgtggattcttttgcacagaaatatttaaggtgggatggtaaaaaatgtcacaaaagactcctcaccaatactttatgttgatatcacttaatattaaccagactttgctgtattgcaataaaacagagaactgtta

SEQ ID NO: 326629 - DNA, 6446 bp, Homo sapiens
  misc_feature (660)..(660): n is a, c, g, or t
  misc_feature (772)..(772): n is a, c, g, or t
tgaagaaagggtggcagagagcactggctatagtgtgtgacttcaaactctttctgtacgatattgctgaaggaaaagcatctcagcccagtgttgtcattagtcaagtgattgacatgagggatgaagaattttctgtgagttcagtcttggcttctgatgttatccatgcaagtcggaaagatataccctgtatatttagggtcacagcttcccagctctcagcatctaataacaaatgttcaatcctgatgctagcagacactgagaatgagaagaataagtgggtgggagtgctgagtgaattgcacaagattttgaagaaaaacaaattcagagaccgctcagtctatgttcccaaagaggcttatgacagcactctacccctcattaaaacaacccaggcagccgcaatcatagatcatgaaagaattgctttgggaaacgaagaagggttatttgttgtacatgtcaccaaagatgaaattattagagttggtgacaataagaagattcatcagattgaactcattccaaatgatcagcttgttgctgtgatctcaggacgaaatcgtcatgtacgactttttcctatgtcagcattggatgggcgagagaccgatttttacaagctgtcagaaactaaagggtgtcaaaccntaacttctggaaaggtgcgccatggagctctcacatgcctgtgtgtggctatgaaaaggcaggtcctctgttatgaactatttcagagcaagaccgtcacagaaaatttaangaaattcaagtcccatataatgtccagtggatggcaatcttcagtgaacaactctgtgtgggattccagtcaggatttctaagataccccttgaatggagaaggaaatccatacagtatgctccattcaaatgaccatacactatcatttattgcacatcaaccaatggatgctatctgcgcagttgagatctccagtaaagaatatctgctgtgttttaacagcattgggatatacactgactgccagggccgaagatctagacaacaggaattgatgtggccagcaaatccttcctcttgttgttacaatgcaccatatctctcggtgtacagtgaaaatgcagttgatatctttgatgtgaactccatggaatggattcagactcttcctctcaaaaaggttcgacccttaaacaatgaaggatcattaaatcttttagggttggagaccattagattaatatatttcaaaaataagatggcagaaggggacgaactggtagtacctgaaacatcagataatagtcggaaacaaatggttagaaacattaacaataagcggcgttattccttcagagtcccagaagaggaaaggatgcagcagaggagggaaatgctacgagatccagaaatgagaaataaattaatttctaatccaactaattttaatcacatagcacacatgggtcctggagatggaatacagatcctgaaagatctgcccatgccaggtttcccttatccatcccctcatcatcactccggtctgatctcctctccgatcaactttgaacacatctatcacatgactgttaattctgctgaaaaatttctctctcctgattccataaaccctgaatattccccgtctctgcgctctgtccctgaaccctcggcctcaggaaagtcggacagtattcagtggctcagtcagtattccatctatcaccaaatcccgccctgagccaggccgctccatgagtgctagcagtggcttgtcagcaaggtcatccgcacagaatggcagcgcattaaagagggaattctctggaggaagctacagtgccaagcggcagcccatgccctccccgtcagagggctctttgtcctccggaggcatggaccaaggaagtgatgccccagcgagggactttgacggagaggactctgactctccgaggcattccacagcttccaacagttccaacctaagcagccccccaagcccagtttcaccccgaaaaaccaagagcctctccctggagagcactgaccgcgggagctgggacccgtgagctgcctcagcactgggacctctcgctctccgctccctgccactcacctcctctcactttcatctcttccctccacctcgcctgctcggcctgaaagccaccaggggctggcagcagtagcaggacagggcttcaggagttctgacgacacgactctcagatccacgcccccagcctaacagcaacaacaaagacagactttccgtagcagcttagattaacgttgatttcattccatgcacttagagttgctttcagtaacattttacccctactcccaaaggtagcttaaatagacagattacacaaatgtaagtgataagaataagattagacagattttgctttcacagtagagtctcattatagtcctaaaatagctcatgggcttctccgcatccagaagggagaattggtccctggagtggctcactaagctcttaatcagcaaacgcagtgagtatcaacctgattgttgccaggaaatccttatgaattaaaacaatgcatattttactacagtacagagtttaaatgaatacataaatgtagaagtactgaatgtatatatttaaaaggagcctcttgtattcaacaaaagatggatgcatatataagagagatgatttaatttaaagaaatatgttgtttcttgtctgtaatgtaatgtaaagggtggaaaggcctcaagctcacatttgtagagagagagcgagagaaatcagagttccctttattgccctgtcctcaaactggtcataggctctagtcacctggggagctgtagaaaacacttgcagagccaggttttgctggtttggggcatgccctgggcaccagagctttaacatttgaagccacttcagcagcagcagcaaaaggcgaactcatctctacccaagatgtttcttttcctagtggtggaatttgaacacttctcactttttattgtattttatcttccgcagataaatgtagaaatacacggttctgtcacctctgatcccttccatctgaaagggtacaaggagtgttgtagcttctgaaggtgcagaaaacaatttctaaaaatgcttttattcctgggctaatcctgtccctccctaagtcgcagcgaggtgtctgtcccagggctggagatgcttcccaaggaggagtctgttttgttgagagtgggcgtgggcttcttcacataagcctggggaaggaagaaaaaacggctttcattaccaaataatgtaaaacctcaaaagcaagggcttcaacagccttaaccaaatattattccccatagccagtggaaaatggatgtgacaaccccagtgcgcaggccagagtgagtgagcccagcacggcgctccgactggcttcctctctcaggtgctggattgtggggttagtggcatttccagctggattcctcctgttgtagttgccataaggaaatgagatgcagaatcagaaggatctatttctacagaatcatttcaccagttaagcacatgagtagagaaagagataaaaataaaagtatctcatgaaggaaagagattttgcctctcttttacttttcacctaagtttctctgagaaatagagacaggattctctctttaaaattcagtgaaaatgaagaaagttttcctgcagttgctaacctgagttgcagtgtttaaggccatcatttcactgctgctgtctgtgactccacgtctgtgtcactgaggtgacctgcgtgtcactgaggtggccaccatgctggcctgcggcatgtgcagggagctgaggctgtttccaggtgatgctgctgtgtggagaaggttctgagatgcagtgagggaagaaaggatcctgctggggattccattgtaagcacctataatcgggaattttcatgtaacagctttgacatttaaacattctgagtttggtgccagctcagatttgattatattttattttggatgggtgtaattcacagcacagttctaatctcccaaatctttctgctttttagaatgaagtataaaaatacttttctcacctgaataccaagggttggccctttagttggatcattgtcatatgacttggtagatccttgtcctcagcacctcacgtgagagaagggagtcagccagccggccccctgcttggtgctcgtgaccagctcgcaccccttctgtccacccttctctcctctcctccccactctccccaccctcctcactctccccaccctcccctcctctcctcctcactcttcccaccctccccatccccaccctccccatcctcctcttccctttccccttgccttctcctctctcccttctcttctcaggcagggaggaggccatcccaagccgagattaacaggacttgacataagccattagtttgtagctttgacaagtaattatgaatttttgttgcttattttgcaaaggatgcttttaagatcaaaataataaccctacctaaagtctagctccactgctatgggtcatactcttcagcctcccaacagggcagagagagagagctactgaggcttgtctaggttgccaggctaactgggcggcttgtccatattcaccccatggattgcaccatggcactctttgatttttccactgcaatggcaagtaatctcatcagtcataatagagcagtcccgaatgcgtgcagattctaaaagcagggctttaggagagaaacactgccagggggaatagttttggggagggttttcccaaaataacggtcatcctactgggtttatcccacccttaaatatgaagcctgttacctccagaagcttctgagaagaatgatgtgaaaagacagggagtgggttctaggcaaagaaaacataatgaccatttagaggagtcagtagcaaagctcacagataaagtattttattactatctgaagttttcttttgttttcatgcaggacattttaaaaacgtatgtggcagcagaaacttgtttctcaatagaaaaaatacattcagaggcatttctgggatagtctatctgtgttagtatttggtgctatctatgtccagccaagttatctaccctcaaattctgactaatcatgtttgtgctttgggtatttaaaattacatacatatatattctttttgccaaaaacaaaagtcttgcttcttgtcaaatgattgctaaagtagatcttacattttttgttattatgtatatatttatacacacccccaacacacttagtgatttctgttatttcctagggagcacagctttaaggctatgagatacaactaaaaggagcccatctatttggttttccagccaattattgtactcacatttcaggggagaatctgaaattcctgtcatgtttacagcaacaatctatcattcctggctagctctcagcctctctctccttccataggttagaattatgtcattttgttacttagtggccacgtctatttctgagaaagactggttacatttatgtggcatctcaggtatcattaaggaaaagccagagcaggggtgagcagaggtcaaaaccacagacgcagcagggccatttgccgcctttggccgggatcacaaccactgcagtctcccagcaggtaggccttgccaagcctaaggctccccatccaatctagacagaggggcgctcagagcagactttgccgtagcccatgtctggtgagcacaacagggaatgaattgggcactccactcccccgtctctctggcccagccctgaactagatgagctgcatttcatggagcccattttaaaacctctttccttatgactttgttactcaagtccagagttctctgtgcacttctgctagataaggagtgtaagccctgccccccagcactggcagcacgctgggccctccccacacaggacaccgtgcagttccgggggaagctgactcaaatcaaccttgaaatctcatgaaaacaaaatgacttgtctttttatttgatagtgtaatatcattcattttataaattttttagggtttttctcgtgtaatattgtacagttttgcatggcctggtgtgatcattttttggttagaatataatgctgacaaatgtggatggaggggaagatactgctttagcctatcactccttattttattttgtttggttttatgccctcagtgtcttagggaactttttaagagatcctctgctaccaaacaatgatgtggattcttttgcacagaaatatttaaggtgggatggtaaaaaatgtcacaaaagactcctcaccaatactttatgttgatatcacttaatattaaccagactttgctgtattgcaataaaacagagaactgtta

SEQ ID NO: 326630 - DNA, 324 bp, Homo sapiens
gtcactcgggctgcaaactgcagttttcccagaggcattcagacttctggcttttgtgtgaaaataccatcatctgtaaaggcctacagaaaggacggagcttgtatgttccgtgcctcttcctcagctcatagaaggggctttataccgacagtgaggccgccccatggggttatttggtcagggtggctggagggggcggtggtaatctgagccccttctgcctccctttctccccctccttctcattaatgttttactttgggccttacaggactctgactctccgaggcattccacagcttccaacagttccaacctaag

SEQ ID NO: 326631 - DNA, 567 bp, Homo sapiens
gtcttgttatcttgggtagtatttacaatgtaagctgaacttcatcttacaccaagtttgacttttatgctatttagaaagaaacccatgagtgttattttaatgaaatatgagtgaaagttaaaatggtaccattaaaatgtttctcagaataaaaagtcattctgtatttgaagaatgtgttctcacattttctcatagcttaatgatatgtgtctcatctgctactttaccaaccagaatggcagacttataaaacgtgtacattatctgtaggtcttcaccatgcaattacatatgtaatttaagggatattttcatttgagttgttttggctgtttgtctgtctaaaacaaaactaagattcctaagccagctggagtgaagaaagggtggcagagagcactggctatagtgtgtgacttcaaactctttctgtacgatattgctgaaggaaaagcatctcagcccagtgttgtcattagtcaagtgattgacatgaggtaagagtttgaaggtaaaattatttgtatcattgcaacataggaattttaaagtttctgattt

SEQ ID NO: 326632 - DNA, 2542 bp, Homo sapiens
  misc_feature (660)..(660): n is a, c, g, or t
  misc_feature (772)..(772): n is a, c, g, or t
  misc_feature (1735)..(1735): n is a, c, g, or t
tgaagaaagggtggcagagagcactggctatagtgtgtgacttcaaactctttctgtacgatattgctgaaggaaaagcatctcagcccagtgttgtcattagtcaagtgattgacatgagggatgaagaattttctgtgagttcagtcttggcttctgatgttatccatgcaagtcggaaagatataccctgtatatttagggtcacagcttcccagctctcagcatctaataacaaatgttcaatcctgatgctagcagacactgagaatgagaagaataagtgggtgggagtgctgagtgaattgcacaagattttgaagaaaaacaaattcagagaccgctcagtctatgttcccaaagaggcttatgacagcactctacccctcattaaaacaacccaggcagccgcaatcatagatcatgaaagaattgctttgggaaacgaagaagggttatttgttgtacatgtcaccaaagatgaaattattagagttggtgacaataagaagattcatcagattgaactcattccaaatgatcagcttgttgctgtgatctcaggacgaaatcgtcatgtacgactttttcctatgtcagcattggatgggcgagagaccgatttttacaagctgtcagaaactaaagggtgtcaaaccntaacttctggaaaggtgcgccatggagctctcacatgcctgtgtgtggctatgaaaaggcaggtcctctgttatgaactatttcagagcaagaccgtcacagaaaatttaangaaattcaagtcccatataatgtccagtggatggcaatcttcagtgaacaactctgtgtgggattccagtcaggatttctaagataccccttgaatggagaaggaaatccatacagtatgctccattcaaatgaccatacactatcatttattgcacatcaaccaatggatgctatctgcgcagttgagatctccagtaaagaatatctgctgtgttttaacagcattgggatatacactgactgccagggccgaagatctagacaacaggaattgatgtggccagcaaatccttcctcttgttgttacaatgcaccatatctctcggtgtacagtgaaaatgcagttgatatctttgatgtgaactccatggaatggattcagactcttcctctcaaaaaggttcgacccttaaacaatgaaggatcattaaatcttttagggttggagaccattagattaatatatttcaaaaataagatggcagaaggggacgaactggtagtacctgaaacatcagataatagtcggaaacaaatggttagaaacattaacaataagcggcgttattccttcagagtcccagaagaggaaaggatgcagcagaggagggaaatgctacgagatccagaaatgagaaataaattaatttctaatccaactaattttaatcacatagcacacatgggtcctggagatggaatacagatcctgaaagatctgcccatgaaccctcggcctcaggaaagtcggacagtattcagtggctcagtcagtattccatctatcaccaaatcccgccctgagccaggccgctccatgagtgctagcagtggcttgtcagcaagtaagtgccggggctacaggaaggtgcctctgagacagggtgacccccagctccctcccctcctgtcccgtgggtgacatgtccttcacttacgtgtgcccattgcattctcaagnggctgcagtgtctcagaccctgctgggtaatgcctaataggcacaaatgcagttgttaagaaaatagtcccagagtccttctagagtgtacaggccatctgggagacagacaaatatgattacaaattgtgatgataaaggctctgaaggaagtaaacagcatacattaatagagaataacaaggggtagctgttagggatgaatccctacttggcagaataattaggaaaatcactccctagaggtggagtcatgtttgagtaatgtttggttaactgaaagaaggctagtatggctacatggtagtggtgaggaagtaacaaaaattagagcggggtagcaggtaagggtcagaccagcagggacttgaagaccaaggtaagacattttttactttattcaaaaggaaaaggaagacttttaagtagggaagaattttctttcaatttacattcttaaaacaatcctgcgggctgccaagtggagaatggactagaggcaggaagagtggaagccagcatccagataggagactcctagagtggtcccaatggaaaccaatgagggcttgggatgcagcaggggcagaaggagagaagatggtagattctccagatatattttcagagttaaaagcagtaagacttgatgatgaattagtcatggaaaagtaagggagagagttaaagatgactcccagacttcctgctagggccttagtatgataccatttactcccatttaccaccgtttaagaaggggctgaggcaggacattccacgcatgtccaaaggtcccgaggtagc

SEQ ID NO: 326633 - DNA, 5659 bp, Homo sapiens
  misc_feature (660)..(660): n is a, c, g, or t
  misc_feature (772)..(772): n is a, c, g, or t
tgaagaaagggtggcagagagcactggctatagtgtgtgacttcaaactctttctgtacgatattgctgaaggaaaagcatctcagcccagtgttgtcattagtcaagtgattgacatgagggatgaagaattttctgtgagttcagtcttggcttctgatgttatccatgcaagtcggaaagatataccctgtatatttagggtcacagcttcccagctctcagcatctaataacaaatgttcaatcctgatgctagcagacactgagaatgagaagaataagtgggtgggagtgctgagtgaattgcacaagattttgaagaaaaacaaattcagagaccgctcagtctatgttcccaaagaggcttatgacagcactctacccctcattaaaacaacccaggcagccgcaatcatagatcatgaaagaattgctttgggaaacgaagaagggttatttgttgtacatgtcaccaaagatgaaattattagagttggtgacaataagaagattcatcagattgaactcattccaaatgatcagcttgttgctgtgatctcaggacgaaatcgtcatgtacgactttttcctatgtcagcattggatgggcgagagaccgatttttacaagctgtcagaaactaaagggtgtcaaaccntaacttctggaaaggtgcgccatggagctctcacatgcctgtgtgtggctatgaaaaggcaggtcctctgttatgaactatttcagagcaagaccgtcacagaaaatttaangaaattcaagtcccatataatgtccagtggatggcaatcttcagtgaacaactctgtgtgggattccagtcaggatttctaagataccccttgaatggagaaggaaatccatacagtatgctccattcaaatgaccatacactatcatttattgcacatcaaccaatggatgctatctgcgcagttgagatctccagtaaagaatatctgctgtgttttaacagcattgggatatacactgactgccagggccgaagatctagacaacaggaattgatgtggccagcaaatccttcctcttgttgttacaatgcaccatatctctcggtgtacagtgaaaatgcagttgatatctttgatgtgaactccatggaatggattcagactcttcctctcaaaaaggttcgacccttaaacaatgaaggatcattaaatcttttagggttggagaccattagattaatatatttcaaaaataagatggcagaaggggacgaactggtagtacctgaaacatcagataatagtcggaaacaaatggttagaaacattaacaataagcggcgttattccttcagagtcccagaagaggaaaggatgcagcagaggagggaaatgctacgagatccagaaatgagaaataaattaatttctaatccaactaattttaatcacatagcacacatgggtcctggagatggaatacagatcctgaaagatctgcccatgaaccctcggcctcaggaaagtcggacagtattcagtggctcagtcagtattccatctatcaccaaatcccgccctgagccaggccgctccatgagtgctagcagtggcttgtcagcaaggtcatccgcacagaatggcagcgcattaaagagggaattctctggaggaagctacagtgccaagcggcagcccatgccctccccgtcagagggctctttgtcctccggaggcatggaccaaggaagtgatgccccagcgagggactttgacggagaggactctgactctccgaggcattccacagcttccaacagttccaacctaagcagccccccaagcccagtttcaccccgaaaaaccaagagcctctccctggagagcactgaccgcgggagctgggacccgtgagctgcctcagcactgggacctctcgctctccgctccctgccactcacctcctctcactttcatctcttccctccacctcgcctgctcggcctgaaagccaccaggggctggcagcagtagcaggacagggcttcaggagttctgacgacacgactctcagatccacgcccccagcctaacagcaacaacaaagacagactttccgtagcagcttagattaacgttgatttcattccatgcacttagagttgctttcagtaacattttacccctactcccaaaggtagcttaaatagacagattacacaaatgtaagtgataagaataagattagacagattttgctttcacagtagagtctcattatagtcctaaaatagctcatgggcttctccgcatccagaagggagaattggtccctggagtggctcactaagctcttaatcagcaaacgcagtgagtatcaacctgattgttgccaggaaatccttatgaattaaaacaatgcatattttactacagtacagagtttaaatgaatacataaatgtagaagtactgaatgtatatatttaaaaggagcctcttgtattcaacaaaagatggatgcatatataagagagatgatttaatttaaagaaatatgttgtttcttgtctgtaatgtaatgtaaagggtggaaaggcctcaagctcacatttgtagagagagagcgagagaaatcagagttccctttattgccctgtcctcaaactggtcataggctctagtcacctggggagctgtagaaaacacttgcagagccaggttttgctggtttggggcatgccctgggcaccagagctttaacatttgaagccacttcagcagcagcagcaaaaggcgaactcatctctacccaagatgtttcttttcctagtggtggaatttgaacacttctcactttttattgtattttatcttccgcagataaatgtagaaatacacggttctgtcacctctgatcccttccatctgaaagggtacaaggagtgttgtagcttctgaaggtgcagaaaacaatttctaaaaatgcttttattcctgggctaatcctgtccctccctaagtcgcagcgaggtgtctgtcccagggctggagatgcttcccaaggaggagtctgttttgttgagagtgggcgtgggcttcttcacataagcctgagttgcagtgtttaaggccatcatttcactgctgctgtctgtgactccacgtctgtgtcactgaggtgacctgcgtgtcactgaggtggccaccatgctggcctgcggcatgtgcagggagctgaggctgtttccaggtgatgctgctgtgtggagaaggttctgagatgcagtgagggaagaaaggatcctgctggggattccattgtaagcacctgaataccaagggttggccctttagttggatcattgtcatatgacttggtagatccttgtcctcagcacctcacgtgagagaagggagtcagccagccggccccctgcttggtgctcgtgaccagctcgcaccccttctgtccacccttctctcctctcctccccactctccccaccctcctcactctccccaccctcccctcctctcctcctcactcttcccaccctccccatccccaccctccccatcctcctcttccctttccccttgccttctcctctctcccttctcttctcaggcagggaggaggccatcccaagccgagattaacaggacttgacataagccattagtttgtagctttgacaagtaattatgaatttttgttgcttattttgcaaaggatgcttttaagatcaaaataataaccctacctaaagtctagctccactgctatgggtcatactcttcagcctcccaacagggcagagagagagagctactgaggcttgtctaggttgccaggctaactgggcggcttgtccatattcaccccatggattgcaccatggcactctttgatttttccactgcaatggcaagtaatctcatcagtcataatagagcagtcccgaatgcgtgcagattctaaaagcagggctttaggagagaaacactgccagggggaatagttttggggagggttttcccaaaataacggtcatcctactgggtttatcccacccttaaatatgaagcctgttacctccagaagcttctgagaagaatgatgtgaaaagacagggagtgggttctaggcaaagaaaacataatgaccatttagaggagtcagtagcaaagctcacagataaagtattttattactatctgaagttttcttttgttttcatgcaggacattttaaaaacgtatgtggcagcagaaacttgtttctcaatagaaaaaatacattcagaggcatttctgggatagtctatctgtgttagtatttggtgctatctatgtccagccaagttatctaccctcaaattctgactaatcatgtttgtgctttgggtatttaaaattacatacatatatattctttttgccaaaaacaaaagtcttgcttcttgtcaaatgattgctaaagtagatcttacattttttgttattatgtatatatttatacacacccccaacacacttagtgatttctgttatttcctagggagcacagctttaaggctatgagatacaactaaaaggagcccatctatttggttttccagccaattattgtactcacatttcaggggagaatctgaaattcctgtcatgtttacagcaacaatctatcattcctggctagctctcagcctctctctccttccataggttagaattatgtcattttgttacttagtggccacgtctatttctgagaaagactggttacatttatgtggcatctcaggtatcattaaggaaaagccagagcaggggtgagcagaggtcaaaaccacagacgcagcagggccatttgccgcctttggccgggatcacaaccactgcagtctcccagcaggtaggccttgccaagcctaaggctccccatccaatctagacagaggggcgctcagagcagactttgccgtagcccatgtctggtgagcacaacagggaatgaattgggcactccactcccccgtctctctggcccagccctgaactagatgagctgcatttcatggagcccattttaaaacctctttccttatgactttgttactcaagtccagagttctctgtgcacttctgctagataaggagtgtaagccctgccccccagcactggcagcacgctgggccctccccacacaggacaccgtgcagttccgggggaagctgactcaaatcaaccttgaaatctcatgaaaacaaaatgacttgtctttttatttgatagtgtaatatcattcattttataaattttttagggtttttctcgtgtaatattgtacagttttgcatggcctggtgtgatcattttttggttagaatataatgctgacaaatgtggatggaggggaagatactgctttagcctatcactccttattttattttgtttggttttatgccctcagtgtcttagggaactttttaagagatcctctgctaccaaacaatgatgtggattcttttgcacagaaatatttaaggtgggatggtaaaaaatgtcacaaaagactcctcaccaatactttatgttgatatcacttaatattaaccagactttgctgtattgcaataaaacagagaactgtta

SEQ ID NO: 326634 - DNA, 3454 bp, Homo sapiens
  misc_feature (660)..(660): n is a, c, g, or t
  misc_feature (772)..(772): n is a, c, g, or t
tgaagaaagggtggcagagagcactggctatagtgtgtgacttcaaactctttctgtacgatattgctgaaggaaaagcatctcagcccagtgttgtcattagtcaagtgattgacatgagggatgaagaattttctgtgagttcagtcttggcttctgatgttatccatgcaagtcggaaagatataccctgtatatttagggtcacagcttcccagctctcagcatctaataacaaatgttcaatcctgatgctagcagacactgagaatgagaagaataagtgggtgggagtgctgagtgaattgcacaagattttgaagaaaaacaaattcagagaccgctcagtctatgttcccaaagaggcttatgacagcactctacccctcattaaaacaacccaggcagccgcaatcatagatcatgaaagaattgctttgggaaacgaagaagggttatttgttgtacatgtcaccaaagatgaaattattagagttggtgacaataagaagattcatcagattgaactcattccaaatgatcagcttgttgctgtgatctcaggacgaaatcgtcatgtacgactttttcctatgtcagcattggatgggcgagagaccgatttttacaagctgtcagaaactaaagggtgtcaaaccntaacttctggaaaggtgcgccatggagctctcacatgcctgtgtgtggctatgaaaaggcaggtcctctgttatgaactatttcagagcaagaccgtcacagaaaatttaangaaattcaagtcccatataatgtccagtggatggcaatcttcagtgaacaactctgtgtgggattccagtcaggatttctaagataccccttgaatggagaaggaaatccatacagtatgctccattcaaatgaccatacactatcatttattgcacatcaaccaatggatgctatctgcgcagttgagatctccagtaaagaatatctgctgtgttttaacagcattgggatatacactgactgccagggccgaagatctagacaacaggaattgatgtggccagcaaatccttcctcttgttgttacaatgcaccatatctctcggtgtacagtgaaaatgcagttgatatctttgatgtgaactccatggaatggattcagactcttcctctcaaaaaggttcgacccttaaacaatgaaggatcattaaatcttttagggttggagaccattagattaatatatttcaaaaataagatggcagaaggggacgaactggtagtacctgaaacatcagataatagtcggaaacaaatggttagaaacattaacaataagcggcgttattccttcagagtcccagaagaggaaaggatgcagcagaggagggaaatgctacgagatccagaaatgagaaataaattaatttctaatccaactaattttaatcacatagcacacatgggtcctggagatggaatacagatcctgaaagatctgcccatgaaccctcggcctcaggaaagtcggacagtattcagtggctcagtcagtattccatctatcaccaaatcccgccctgagccaggccgctccatgagtgctagcagtggcttgtcagcaaggtcatccgcacagaatggcagcgcattaaagagggaattctctggaggaagctacagtgccaagcggcagcccatgccctccccgtcagagggctctttgtcctccggaggcatggaccaaggaagtgatgccccagcgagggactttgacggagaggactctgactctccgaggcattccacagcttccaacagttccaacctaagcagccccccaagcccagtttcaccccgaaaaaccaagagcctctccctggagagcactgaccgcgggagctgggacccgtgagctgcctcagcactgggacctctcgctctccgctccctgccactcacctcctctcactttcatctcttccctccacctcgcctgctcggcctgaaagccaccaggggctggcagcagtagcaggacagggcttcaggagttctgacgacacgactctcagatccacgcccccagcctaacagcaacaacaaagacagactttccgtagcagcttagattaacgttgatttcattccatgcacttagagttgctttcagtaacattttacccctactcccaaaggtagcttaaatagacagattacacaaatgtaagtgataagaataagattagacagattttgctttcacagtagagtctcattatagtcctaaaatagctcatgggcttctccgcatccagaagggagaattggtccctggagtggctcactaagctcttaatcagcaaacgcagtgagtatcaacctgattgttgccaggaaatccttatgaattaaaacaatgcatattttactacagtacagagtttaaatgaatacataaatgtagaagtactgaatgtatatatttaaaaggagcctcttgtattcaacaaaagatggatgcatatataagagagatgatttaatttaaagaaatatgttgtttcttgtctgtaatgtaatgtaaagggtggaaaggcctcaagctcacatttgtagagagagagcgagagaaatcagagttccctttattgccctgtcctcaaactggtcataggctctagtcacctggggagctgtagaaaacacttgcagagccaggttttgctggtttggggcatgccctgggcaccagagctttaacatttgaagccacttcagcagcagcagcaaaaggcgaactcatctctacccaagatgtttcttttcctagtggtggaatttgaacacttctcactttttattgtattttatcttccgcagataaatgtagaaatacacggttctgtcacctctgatcccttccatctgaaagggtacaaggagtgttgtagcttctgaaggtgcagaaaacaatttctaaaaatgcttttattcctgggctaatcctgtccctccctaagtcgcagcgaggtgtctgtcccagggctggagatgcttcccaaggaggagtctgttttgttgagagtgggcgtgggcttcttcacataagcctggggaaggaagaaaaaacggctttcattaccaaataatgtaaaacctcaaaagcaagggcttcaacagccttaaccaaatattattccccatagccagtggaaaatggatgtgacaaccccagtgcgcaggccagagtgagtgagcccagcacggcgctccgactggcttcctctctcaggtgctggattgtggggttagtggcatttccagctggattcctcctgttgtagttgccataaggaaatgagatgcagaatcagaaggatctatttctacagaatcatttcaccagttaagcacatgagtagagaaagagataaaaataaaagtatctcatgaagga

SEQ ID NO: 326635 - DNA, 6597 bp, Homo sapiens
ccttattctcactgtgtgtgactatgctggtcataaatgtgttcatacccactatgtgtctataagacaaaacctattctgacttgtcttttcccatgctttttcatctttctactctaggctaagagtagaggtagatcttggagaagagggacctgacaaaattttaatgtagttgtctttttctttgacaaaggaaggaaagcccatctcaagaggtcctttctttttctgtgttttgctttctccatcatttcttaagaggtcaaagtgttcctgcagccctctgcctgtccaaaatctcccattgccaccctgagtctccaagacctgctttaccctcataattctcaaattccaaatttgtgtcccacattctcattcacttcaaaaattctgttctttggctgggcatggtggcgcatgtgcctgtaatcccagctctttgggaggccaagacaggaggatcacttgagcccaggaggtcgaggctgcagtgagctatcatggtgccactacacttcagcctgggcaacagagcaagaccctgcctcaaataaataataataataataataataataataattctatttttaaaatatttactgttaggaaagcagtctgcctaagccatatgattatgccacgaggatcatgttgcatttctgctaattatcacctttgttttcttctaggctcgtttggcttcttctcacctcctccttctcacttcagctttttgggtgttgaaaatttctaaactttgctctttttccttatcttatttagataatgacaccatttgttgtgttatatggatacagttgtctatttttttcttattttcacacagcccagcatgttttgggagtccctggcagacagttttgtttacttctagatattaaaactgacatcggataagactatcactgggttgctaggtgtatatgattaaacatcatctacccccaagatcagaagaggagaaatagcgacagattcttaccttttataaaggaagggtagtggaagcacagctccttctttttactccgtatctcatagactgaaccttgcaaaggaaatttttttattatgtaaagatagttgtaattgttatttaccacttatggtaaatcaggcttaccatttatgccgattactgttcagggtaacagtagtagctctttaacaacaccctaagccattgaaatcaatacctggagggagagaaaatatagtattgagatactggggtggggtggctgattagtgacagaacaccaaggcaactgcagttttcttctagtaaaattatgtcctactgtgtttataatcaagtaaaagtgaaagtagattttgcaagctatgtttactttcagcatattatctgtttacataggttctgttaaatattatttactgggttatcaacacaacatttaaaaaccagaattgcatgtacttgtactatcaatgtttgtactgtcttggaggttaatagataaaaagcattttaacagtttaaagaacatcattatcgtttgtatttttattttaacagaaggggacgaactggtagtacctgaaacatcagataatagtcggaaacaaatggttagaaacattaacaataagcggcgttattccttcagagtcccagaagaggaaaggatgcagcagaggagggaaatgctacgagatccagaaatgagaaataaattaatttctaatccaactaattttaatcacatagcacacatgggtcctggagatggaatacagatcctgaaagatctgcccatgaaccctcggcctcaggaaagtcggacagtattcagtggctcagtcagtattccatctatcaccaaatcccgccctgagccaggccgctccatgagtgctagcagtggcttgtcagcaaggtcatccgcacagaatggcagcgcattaaagagggaattctctggaggaagctacagtgccaagcggcagcccatgccctccccgtcagagggctctttgtcctccggaggcatggaccaaggaagtgatgccccagcgagggactttgacggagaggactctgactctccgaggcattccacagcttccaacagttccaacctaagcagccccccaagcccagtttcaccccgaaaaaccaagagcctctccctggagagcactgaccgcgggagctgggacccgtgagctgcctcagcactgggacctctcgctctccgctccctgccactcacctcctctcactttcatctcttccctccacctcgcctgctcggcctgaaagccaccaggggctggcagcagtagcaggacagggcttcaggagttctgacgacacgactctcagatccacgcccccagcctaacagcaacaacaaagacagactttccgtagcagcttagattaacgttgatttcattccatgcacttagagttgctttcagtaacattttacccctactcccaaaggtagcttaaatagacagattacacaaatgtaagtgataagaataagattagacagattttgctttcacagtagagtctcattatagtcctaaaatagctcatgggcttctccgcatccagaagggagaattggtccctggagtggctcactaagctcttaatcagcaaacgcagtgagtatcaacctgattgttgccaggaaatccttatgaattaaaacaatgcatattttactacagtacagagtttaaatgaatacataaatgtagaagtactgaatgtatatatttaaaaggagcctcttgtattcaacaaaagatggatgcatatataagagagatgatttaatttaaagaaatatgttgtttcttgtctgtaatgtaatgtaaagggtggaaaggcctcaagctcacatttgtagagagagagcgagagaaatcagagttccctttattgccctgtcctcaaactggtcataggctctagtcacctggggagctgtagaaaacacttgcagagccaggttttgctggtttggggcatgccctgggcaccagagctttaacatttgaagccacttcagcagcagcagcaaaaggcgaactcatctctacccaagatgtttcttttcctagtggtggaatttgaacacttctcactttttattgtattttatcttccgcagataaatgtagaaatacacggttctgtcacctctgatcccttccatctgaaagggtacaaggagtgttgtagcttctgaaggtgcagaaaacaatttctaaaaatgcttttattcctgggctaatcctgtccctccctaagtcgcagcgaggtgtctgtcccagggctggagatgcttcccaaggaggagtctgttttgttgagagtgggcgtgggcttcttcacataagcctggggaaggaagaaaaaacggctttcattaccaaataatgtaaaacctcaaaagcaagggcttcaacagccttaaccaaatattattccccatagccagtggaaaatggatgtgacaaccccagtgcgcaggccagagtgagtgagcccagcacggcgctccgactggcttcctctctcaggtgctggattgtggggttagtggcatttccagctggattcctcctgttgtagttgccataaggaaatgagatgcagaatcagaaggatctatttctacagaatcatttcaccagttaagcacatgagtagagaaagagataaaaataaaagtatctcatgaaggaaagagattttgcctctcttttacttttcacctaagtttctctgagaaatagagacaggattctctctttaaaattcagtgaaaatgaagaaagttttcctgcagttgctaacctgagttgcagtgtttaaggccatcatttcactgctgctgtctgtgactccacgtctgtgtcactgaggtgacctgcgtgtcactgaggtggccaccatgctggcctgcggcatgtgcagggagctgaggctgtttccaggtgatgctgctgtgtggagaaggttctgagatgcagtgagggaagaaaggatcctgctggggattccattgtaagcacctataatcgggaattttcatgtaacagctttgacatttaaacattctgagtttggtgccagctcagatttgattatattttattttggatgggtgtaattcacagcacagttctaatctcccaaatctttctgctttttagaatgaagtataaaaatacttttctcacctgaataccaagggttggccctttagttggatcattgtcatatgacttggtagatccttgtcctcagcacctcacgtgagagaagggagtcagccagccggccccctgcttggtgctcgtgaccagctcgcaccccttctgtccacccttctctcctctcctccccactctccccaccctcctcactctccccaccctcccctcctctcctcctcactcttcccaccctccccatccccaccctccccatcctcctcttccctttccccttgccttctcctctctcccttctcttctcaggcagggaggaggccatcccaagccgagattaacaggacttgacataagccattagtttgtagctttgacaagtaattatgaatttttgttgcttattttgcaaaggatgcttttaagatcaaaataataaccctacctaaagtctagctccactgctatgggtcatactcttcagcctcccaacagggcagagagagagagctactgaggcttgtctaggttgccaggctaactgggcggcttgtccatattcaccccatggattgcaccatggcactctttgatttttccactgcaatggcaagtaatctcatcagtcataatagagcagtcccgaatgcgtgcagattctaaaagcagggctttaggagagaaacactgccagggggaatagttttggggagggttttcccaaaataacggtcatcctactgggtttatcccacccttaaatatgaagcctgttacctccagaagcttctgagaagaatgatgtgaaaagacagggagtgggttctaggcaaagaaaacataatgaccatttagaggagtcagtagcaaagctcacagataaagtattttattactatctgaagttttcttttgttttcatgcaggacattttaaaaacgtatgtggcagcagaaacttgtttctcaatagaaaaaatacattcagaggcatttctgggatagtctatctgtgttagtatttggtgctatctatgtccagccaagttatctaccctcaaattctgactaatcatgtttgtgctttgggtatttaaaattacatacatatatattctttttgccaaaaacaaaagtcttgcttcttgtcaaatgattgctaaagtagatcttacattttttgttattatgtatatatttatacacacccccaacacacttagtgatttctgttatttcctagggagcacagctttaaggctatgagatacaactaaaaggagcccatctatttggttttccagccaattattgtactcacatttcaggggagaatctgaaattcctgtcatgtttacagcaacaatctatcattcctggctagctctcagcctctctctccttccataggttagaattatgtcattttgttacttagtggccacgtctatttctgagaaagactggttacatttatgtggcatctcaggtatcattaaggaaaagccagagcaggggtgagcagaggtcaaaaccacagacgcagcagggccatttgccgcctttggccgggatcacaaccactgcagtctcccagcaggtaggccttgccaagcctaaggctccccatccaatctagacagaggggcgctcagagcagactttgccgtagcccatgtctggtgagcacaacagggaatgaattgggcactccactcccccgtctctctggcccagccctgaactagatgagctgcatttcatggagcccattttaaaacctctttccttatgactttgttactcaagtccagagttctctgtgcacttctgctagataaggagtgtaagccctgccccccagcactggcagcacgctgggccctccccacacaggacaccgtgcagttccgggggaagctgactcaaatcaaccttgaaatctcatgaaaacaaaatgacttgtctttttatttgatagtgtaatatcattcattttataaattttttagggtttttctcgtgtaatattgtacagttttgcatggcctggtgtgatcattttttggttagaatataatgctgacaaatgtggatggaggggaagatactgctttagcctatcactccttattttattttgtttggttttatgccctcagtgtcttagggaactttttaagagatcctctgctaccaaacaatgatgtggattcttttgcacagaaatatttaaggtgggatggtaaaaaatgtcacaaaagactcctcaccaatactttatgttgatatcacttaatattaaccagactttgctgtattgcaataaaacagagaactgtta

SEQ ID NO: 326636 - DNA, 585 bp, Homo sapiens
cattgaaaaccactgttgagatggagccatctggagtctgcaggcctggccaggtcccatttgctaaatgagggcattgtttgcagagaaagagcatcctcctcaaaggcatattaatgacaagccagacactggacaaccaagaatggacccagctaacatcatggataaagggaaacctgacatgcgacagcagaaccagagagtggctttgctgttgttggcggatcatttctggaaaaaggtgcagctccagtggccccaaatcctgggaaaggagaatccgttcaacccccagattaaacaggtgtttggagaccaaggcgggcactgagcctctcaggagcatgcacccctggggagcacagggaggcagaggcttgggtaaactcattccacaaaccctatgggggctgccacgtcacaggcccaaaggactcttcttcagcagcatctttgcaaaatgtctttctctcaatgaagagcatatctggacgactgtgcaatgctgtgtgctcccgggatcagtaacccttccgctgttcctgaaataacctttcataaagtgctttgggtgccattcca

SEQ ID NO: 326637 - DNA, 626 bp, Homo sapiens
acctaccctgatcctctgtaatcaaaagtgttttcccgctctcaggtcagcccctgccacggctggatgtcttccaacaagacgttgcggactctcacttcagagagagcagagcaactctccaacacactgaaaaaaattgcagccagtgagaaatttacaaacttcaatcttttctacatggattttgccttccatgaaatcatacaggagtggcagaagagaggcggacagccctggcagctcatcgagcccgtggatggattccaccccaacgaggtaagcacagtcacatggtggctgcagaaggctatttgatggtttgttggtttttaattatggttacacattcatgtgtttatttttatcctgttttgttccagaaaggatttgaggtagtgtacatacatgtataggatagaagatttaataaaaacaaagtgaaatttgggaccatagggaaataaagtagaaattatacctggattcctgatttaatttctataattcataaaatatgtgcagggcattcctgagaaactgccagaagggcagctctgtgcgatgctaaaaggggcagtaagccatggcttccataatacaagaaaaataaatcaagcactcca

SEQ ID NO: 326638 - DNA, 2316 bp, Homo sapiens
ttccggcaagcctcgaggctcacggggtttatgcacactaacttcactgagccagggagcacggaagttgtgccactgtgcaacttgggttttctttatcctgcagtctttacctcagcagaaccgcacaccacagactccctccagctctttgtgtgtggctctctcagggtccaacaagagcaagctgtgggtctgtgagtgtttatgtgtgcttttattcacttcacacttattgaaaagtgtgtatgtgagagggtggggtgtgtgtgtcaaagagagtgaggaagagaaggagagagagatcaattgattctgcagcctcagctccagcatccctcagttgggagcttccaaagccgggtgatcacttggggtgcatagctcggagatgcagtccccctggtctccagccaacgatgaccagtccaggcccagcctctcgaatgggcacacctgtgtagggtgtgtgctggtggtgtctgtaatagaacagcttgctcaagttcacaactcgacggtccaggcctcgatggagagactgtgcagctacctgcctgaaaaactgttcttgaaaaccacctgctatttagtcattgacaagtttggatcagacatcataaaactgcttagcgcagatatgaatgctgatgtggtatgtcacactctggagttttgtaaacagaacactggccaaccattgtgtcatctctaccctcttcccaaggagacatggaaatttacactacagaaggcaagacaaattgtcaagaagtccccgattctgaaatattctagaagtggttctgacatttgttcactcccggttttggccaagatctgccagaaaattaaattagctatggaacagtctgtgccattcaaagatgtggattcagacaaatacagcgttttcccaacactgcggggctatcactggcgggggagagactgtaatgacagcgacgagtcagtgtacccaggtagaaggccgaacaactgggatgtccatcaggattcaaactgtaatggcatttggggtgtcgatccaaaagatggagttccatatgagaagaaattctgtgaaggttcacagcccaggggaatcattttgctgggagactcagctggggctcattttcacatctctcctgaatggatcacagcgtcgcagatgtctttgaactctttcatcaatctaccaacagcccttaccaacgagcttgactggccccaactctctggtgctacaggatttctggactccactgttggaattaaagaaaaatctatttaccttcgcttatggaaaagaaaccactgtaatcacagggactaccagaatatttcaagaaatggtgcatcttcccgaaacctgaagaaatttatagaaagcttgtctagaaacaaggtgttggactatcccgccatcgttatatatgccatgattggaaatgatgtctgcagtgggaagagtgacccagtcccagccatgaccactcctgagaaactctactccaacgtcatgcagactctgaagcatctaaattcccacctgcccaatggcagccatgttattttgtatggcttaccagatggaacctttctctgggataatttgcacaacagatatcatcctctcggccagctaaataaagacatgacctatgcgcagttgtactccttcctgaactgcctccaggtcagcccctgccacggctggatgtcttccaacaagacgttgcggactctcacttcagagagagcagagcaactctccaacacactgaaaaaaattgcagccagtgagaaatttacaaacttcaatcttttctacatggattttgccttccatgaaatcatacaggagtggcagaagagaggcggacagccctggcagctcatcgagcccgtggatggattccaccccaacgaggtggctttgctgttgttggcggatcatttctggaaaaaggtgcagctccagtggccccaaatcctgggaaaggagaatccgttcaacccccagattaaacaggtgtttggagaccaaggcgggcactgagcctctcaggagcatgcacccctggggagcacagggaggcagaggcttgggtaaactcattccacaaaccctatgggggctgccacgtcacaggcccaaaggactcttcttcagcagcatctttgcaaaatgtctttctctcaatgaagagcatatctggacgactgtgcaatgctgtgtgctcccgggatcagtaacccttccgctgttcctgaaataacctttcataaagtgctttgggtgccattcca

SEQ ID NO: 326639 - DNA, 2015 bp, Homo sapiens
ttccggcaagcctcgaggctcacggggtttatgcacactaacttcactgagccagggagcacggaagttgtgccactgtgcaacttgggttttctttatcctgcagtctttacctcagcagaaccgcacaccacagactccctccagctctttgtgtgtggctctctcagggtccaacaagagcaagctgtgggtctgtgagtgtttatgtgtgcttttattcacttcacacttattgaaaagtgtgtatgtgagagggtggggtgtgtgtgtcaaagagagtgaggaagagaaggagagagagatcaattgattctgcagcctcagctccagcatccctcagttgggagcttccaaagccgggtgatcacttggggtgcatagctcggagatgcagtccccctggaaaatccttacggtggcgcctctattcttgctcctgtctcttcagtcctcggcctctccagccaacgatgaccagtccaggcccagcctctcgaatgggcacacctgtgtagggtgtgtgctggtggtgtctgtaatagaacagcttgctcaagttcacaactcgacggtccaggcctcgatggagagactgtgcagctacctgcctgaaaaactgttcttgaaaaccacctgctatttagtcattgacaagtttggatcagacatcataaaactgcttagcgcagatatgaatgctgatgtggtatgtcacactctggagttttgtaaacagaacactggccaaccattgtgtcatctctaccctcttcccaaggagacatggaaatttacactacagaaggcaagacaaattgtcaagaagtccccgattctgaaatattctagaagtggttctgacatttgttcactcccggttttggccaagatctgccagaaaattaaattagctatggaacagtctgtgccattcaaagatgtggattcagacaaatacagcgttttcccaacactgcggggctatcactggcgggggagagactgtaatgacagcgacgagtcagtgtacccaggtagaaggccgaacaactgggatgtccatcaggattcaaactgtaatggcatttgggtaagcaactaaattcagcttgaaccccattctcctttgttcctccctcccctaaagctcatcacatatttgctttagttagatccagggaagactatgacagcctaaagcaactcttttccttctgcttagaagaggggtatagaatcctgatgatgcatgaagagtgtcaatgatgtcatgagagttgaggctttctcagtcatggcccctttaagccttgcttaaggtcacccacatctaatccctttatactgttttgaacagtgtgaaattaaatgaagagtggtgttaacaaagttttacagcaacccacacagctgttggagcaaaccacatgctgtccttattttgttgcagccattttttttttctgtttcataagcctagccgggcagagcagaaattactcagtatttacccgaccactcacaccttgaggcatttaatgctggtgtcctagtttcctatgaataatggatttgcagctcccggggaaagaaaagggaagaaaagaggaaagccaaactaacacagcaacaggcttaagtttgtggggtgttaagcttacaagatttgagggttcctcatgaaaaaaagaatatctacttaaaaatacaaaatcaaataggaaaatgaataatttttaaaacaatcacagaaatcttaacaaattcctggagtctcagaaattcagttccctttcttttgagatctcatttctggtttaccagaactgtttacatggaaacatgttctggcctcccctctccacctagaatactcttagaaaatgaaagtgccaacacagctcatgttatttttttttttttttgaggccaagtctcactctgttgccaggctgaagtgcaatggccacaatcttggctcactgcaaccacagctcacgttttttaattgc

SEQ ID NO: 326640 - DNA, 1035 bp, Homo sapiens
gcaccaattgcatcactgaatctgtgcctccccctttttgatgggcttcttttttttttcttaggccgaacaactgggatgtccatcaggattcaaactgtaatggcatttgggtaagcaactaaattcagcttgaaccccattctcctttgttcctccctcccctaaagctcatcacatatttgctttagttagatccagggaagactatgacagcctaaagcaactcttttccttctgcttagaagaggggtatagaatcctgatgatgcatgaagagtgtcaatgatgtcatgagagttgaggctttctcagtcatggcccctttaagccttgcttaaggtcacccacatctaatccctttatactgttttgaacagtgtgaaattaaatgaagagtggtgttaacaaagttttacagcaacccacacagctgttggagcaaaccacatgctgtccttattttgttgcagccattttttttttctgtttcataagcctagccgggcagagcagaaattactcagtatttacccgaccactcacaccttgaggcatttaatgctggtgtcctagtttcctatgaataatggatttgcagctcccggggaaagaaaagggaagaaaagaggaaagccaaactaacacagcaacaggcttaagtttgtggggtgttaagcttacaagatttgagggttcctcatgaaaaaaagaatatctacttaaaaatacaaaatcaaataggaaaatgaataatttttaaaacaatcacagaaatcttaacaaattcctggagtctcagaaattcagttccctttcttttgagatctcatttctggtttaccagaactgtttacatggaaacatgttctggcctcccctctccacctagaatactcttagaaaatgaaagtgccaacacagctcatgttatttttttttttttttgaggccaagtctcactctgttgccaggctgaagtgcaatggccacaatcttggctcactgcaaccacagctcacgttttttaattgc

SEQ ID NO: 326641 - DNA, 707 bp, Homo sapiens
ttccggcaagcctcgaggctcacggggtttatgcacactaacttcactgagccagggagcacggaagttgtgccactgtgcaacttgggttttctttatcctgcagtctttacctcagcagaaccgcacaccacagactccctccagctctttgtgtgtggctctctcagggtccaacaagagcaagctgtgggtctgtgagtgtttatgtgtgcttttattcacttcacacttattgaaaagtgtgtatgtgagagggtggggtgtgtgtgtcaaagagagtgaggaagagaaggagagagagatcaattgattctgcagcctcagctccagcatccctcagttgggagcttccaaagccgggtgatcacttggggtgcatagctcggagatgcagtccccctggtctccagccaacgatgaccagtccaggcccagcctctcgaatgggcacacctgtgtaggtatgcaaataaatatttttgtattttctatgtagacataacaatgggatccagtactttgcttgcgtaataaatcacatattttattaaatcaagaattgtaagattccaggtaaggcaccagtaacctcactgacacagagaaatgtggagtctaagagtagacattgacactacatacatctatgtgaataaaaagcatactagtttaaattgggcataaaactcttccacctcattggc

SEQ ID NO: 326642 - DNA, 725 bp, Homo sapiens
gccatttgtacgtgactagaatttaatgtgcagagctgctgtctgctgatggcttggagaaatgaaagtagagtaggatggggaagatcgatttctttgttctgcctgaattgtctcactaaagccaaagtctagatttcatgaaattctccctgtttcctctctcttcagagagcagagcaactctccaacacactgaaaaaaattgcagccagtgagaaatttacaaacttcaatcttttctacatggattttgccttccatgaaatcatacaggagtggcagaagagaggcggacagccctggcagctcatcgagcccgtggatggattccaccccaacgaggtggctttgctgttgttggcggatcatttctggaaaaaggtgcagctccagtggccccaaatcctgggaaaggagaatccgttcaacccccagattaaacaggtgtttggagaccaaggcgggcactgagcctctcaggagcatgcacccctggggagcacagggaggcagaggcttgggtaaactcattccacaaaccctatgggggctgccacgtcacaggcccaaaggactcttcttcagcagcatctttgcaaaatgtctttctctcaatgaagagcatatctggacgactgtgcaatgctgtgtgctcccgggatcagtaacccttccgctgttcctgaaataacctttcataaagtgctttgggtgccattcca

SEQ ID NO: 326643 - DNA, 2370 bp, Homo sapiens
ttccggcaagcctcgaggctcacggggtttatgcacactaacttcactgagccagggagcacggaagttgtgccactgtgcaacttgggttttctttatcctgcagtctttacctcagcagaaccgcacaccacagactccctccagctctttgtgtgtggctctctcagggtccaacaagagcaagctgtgggtctgtgagtgtttatgtgtgcttttattcacttcacacttattgaaaagtgtgtatgtgagagggtggggtgtgtgtgtcaaagagagtgaggaagagaaggagagagagatcaattgattctgcagcctcagctccagcatccctcagttgggagcttccaaagccgggtgatcacttggggtgcatagctcggagatgcagtccccctggaaaatccttacggtggcgcctctattcttgctcctgtctcttcagtcctcggcctctccagccaacgatgaccagtccaggcccagcctctcgaatgggcacacctgtgtagggtgtgtgctggtggtgtctgtaatagaacagcttgctcaagttcacaactcgacggtccaggcctcgatggagagactgtgcagctacctgcctgaaaaactgttcttgaaaaccacctgctatttagtcattgacaagtttggatcagacatcataaaactgcttagcgcagatatgaatgctgatgtggtatgtcacactctggagttttgtaaacagaacactggccaaccattgtgtcatctctaccctcttcccaaggagacatggaaatttacactacagaaggcaagacaaattgtcaagaagtccccgattctgaaatattctagaagtggttctgacatttgttcactcccggttttggccaagatctgccagaaaattaaattagctatggaacagtctgtgccattcaaagatgtggattcagacaaatacagcgttttcccaacactgcggggctatcactggcgggggagagactgtaatgacagcgacgagtcagtgtacccaggtagaaggccgaacaactgggatgtccatcaggattcaaactgtaatggcatttggggtgtcgatccaaaagatggagttccatatgagaagaaattctgtgaaggttcacagcccaggggaatcattttgctgggagactcagctggggctcattttcacatctctcctgaatggatcacagcgtcgcagatgtctttgaactctttcatcaatctaccaacagcccttaccaacgagcttgactggccccaactctctggtgctacaggatttctggactccactgttggaattaaagaaaaatctatttaccttcgcttatggaaaagaaaccactgtaatcacagggactaccagaatatttcaagaaatggtgcatcttcccgaaacctgaagaaatttatagaaagcttgtctagaaacaaggtgttggactatcccgccatcgttatatatgccatgattggaaatgatgtctgcagtgggaagagtgacccagtcccagccatgaccactcctgagaaactctactccaacgtcatgcagactctgaagcatctaaattcccacctgcccaatggcagccatgttattttgtatggcttaccagatggaacctttctctgggataatttgcacaacagatatcatcctctcggccagctaaataaagacatgacctatgcgcagttgtactccttcctgaactgcctccaggtcagcccctgccacggctggatgtcttccaacaagacgttgcggactctcacttcagagagagcagagcaactctccaacacactgaaaaaaattgcagccagtgagaaatttacaaacttcaatcttttctacatggattttgccttccatgaaatcatacaggagtggcagaagagaggcggacagccctggcagctcatcgagcccgtggatggattccaccccaacgaggtggctttgctgttgttggcggatcatttctggaaaaaggtgcagctccagtggccccaaatcctgggaaaggagaatccgttcaacccccagattaaacaggtgtttggagaccaaggcgggcactgagcctctcaggagcatgcacccctggggagcacagggaggcagaggcttgggtaaactcattccacaaaccctatgggggctgccacgtcacaggcccaaaggactcttcttcagcagcatctttgcaaaatgtctttctctcaatgaagagcatatctggacgactgtgcaatgctgtgtgctcccgggatcagtaacccttccgctgttcctgaaataacctttcataaagtgctttgggtgccattcca

SEQ ID NO: 326644 - DNA, 2429 bp, Homo sapiens
ttccggcaagcctcgaggctcacggggtttatgcacactaacttcactgagccagggagcacggaagttgtgccactgtgcaacttgggttttctttatcctgcagtctttacctcagcagaaccgcacaccacagactccctccagctctttgtgtgtggctctctcagggtccaacaagagcaagctgtgggtctgtgagtgtttatgtgtgcttttattcacttcacacttattgaaaagtgtgtatgtgagagggtggggtgtgtgtgtcaaagagagtgaggaagagaaggagagagagatcaattgattctgcagcctcagctccagcatccctcagttgggagcttccaaagccgggtgatcacttggggtgcatagctcggagatgcagtccccctggaaaatccttacggtggcgcctctattcttgctcctgtctcttcagtcctcggcctctccagccaacgatgaccagtccaggcccagcctctcgaatgggcacacctgtgtagggtgtgtgctggtggtgtctgtaatagaacagcttgctcaagttcacaactcgacggtccaggcctcgatggagagactgtgcagctacctgcctgaaaaactgttcttgaaaaccacctgctatttagtcattgacaagtttggatcagacatcataaaactgcttagcgcagatatgaatgctgatgtggtatgtcacactctggagttttgtaaacagaacactggccaaccattgtgtcatctctaccctcttcccaaggagacatggaaatttacactacagaaggcaagacaaattgtcaagaagtccccgattctgaaatattctagaagtggttctgacatttgttcactcccggttttggccaagatctgccagaaaattaaattagctatggaacagtctgtgccattcaaagatgtggattcagacaaatacagcgttttcccaacactgcggggctatcactggcgggggagagactgtaatgacagcgacgagtcagtgtacccaggtagaaggccgaacaactgggatgtccatcaggattcaaactgtaatggcatttggggtgtcgatccaaaagatggagttccatatgagaagaaattctgtgaaggttcacagcccaggggaatcattttgctgggagactcagctggggctcattttcacatctctcctgaatggatcacagcgtcgcagatgtctttgaactctttcatcaatctaccaacagcccttaccaacgagcttgactggccccaactctctggtgctacaggatttctggactccactgttggaattaaagaaaaatctatttaccttcgcttatggaaaagaaaccactgtaatcacagggactaccagaatatttcaagaaatggtgcatcttcccgaaacctgaagaaatttatagaaagcttgtctagaaacaaggtgttggactatcccgccatcgttatatatgccatgattggaaatgatgtctgcagtgggaagagtgacccagtcccagccatgaccactcctgagaaactctactccaacgtcatgcagactctgaagcatctaaattcccacctgcccaatggcagccatgttattttgtatggcttaccagatggaacctttctctgggataatttgcacaacagatatcatcctctcggccagctaaataaagacatgacctatgcgcagttgtactccttcctgaactgcctccaggtcagcccctgccacggctggatgtcttccaacaagacgttgcggactctcacttcagagagagcagagcaactctccaacacactgaaaaaaattgcagccagtgagaaatttacaaacttcaatcttttctacatggattttgccttccatgaaatcatacaggagtggcagaagagaggcggacagccctggcagctcatcgagcccgtggatggattccaccccaacgaggtggctttgctgttgttggcggatcatttctggaaaaaggtgcagctccagtggccccaaatcctgggaaaggagaatccgttcaacccccagattaaacaggtgtttggagaccaaggcgggcactgagcctctcaggagcatgcacccctggggagcacagggaggcagaggcttgggtaaactcattccacaaaccctatgggggctgccacgtcacaggcccaaaggactcttcttcagcagcatctttgcaaaatgtctttctctcaatgaagagcatatctggacgactgtgcaatgctgtgtgctcccgggatcagtaacccttccgctgttcctgaaataacctttcataaagtgctttgggtgccattccaaacaagagagtatctgtgccctttacagctaattgttctaaaaggagtttctaaaaaca

SEQ ID NO: 326645 - DNA, 2337 bp, Homo sapiens
ttccggcaagcctcgaggctcacggggtttatgcacactaacttcactgagccagggagcacggaagttgtgccactgtgcaacttgggttttctttatcctgcagtctttacctcagcagaaccgcacaccacagactccctccagctctttgtgtgtggctctctcagggtccaacaagagcaagctgtgggtctgtgagtgtttatgtgtgcttttattcacttcacacttattgaaaagtgtgtatgtgagagggtggggtgtgtgtgtcaaagagagtgaggaagagaaggagagagagatcaattgattctgcagcctcagctccagcatccctcagttgggagcttccaaagccgggtgatcacttggggtgcatagctcggagatgcagtccccctggaaaatccttacggtggcgcctctattcttgctcctgtctcttcagtcctcggcctctccagccaacgatgaccagtccaggcccagcctctcgaatgggcacacctgtgtagggtgtgtgctggtggtgtctgtaatagaacagcttgctcaagttcacaactcgacggtccaggcctcgatggagagactgtgcagctacctgcctgaaaaactgttcttgaaaaccacctgctatttagtcattgacaagtttggatcagacatcataaaactgcttagcgcagatatgaatgctgatgtggtatgtcacactctggagttttgtaaacagaacactggccaaccattgtgtcatctctaccctcttcccaaggagacatggaaatttacactacagaaggcaagacaaattgtcaagaagtccccgattctgaaatattctagaagtggttctgacatttgttcactcccggttttggccaagatctgccagaaaattaaattagctatggaacagtctgtgccattcaaagatgtggattcagacaaatacagcgttttcccaacactgcggggctatcactggcgggggagagactgtaatgacagcgacgagtcagtgtacccaggtagaaggccgaacaactgggatgtccatcaggattcaaactgtaatggcatttggggtgtcgatccaaaagatggagttccatatgagaagaaattctgtgaaggttcacagcccaggggaatcattttgctgggagactcagctggggctcattttcacatctctcctgaatggatcacagcgtcgcagatgtctttgaactctttcatcaatctaccaacagcccttaccaacgagcttgactggccccaactctctggtgctacaggatttctggactccactgttggaattaaagaaaaatctatttaccttcgcttatggaaaagaaaccactgtaatcacagggactaccagaatatttcaagaaatggtgcatcttcccgaaacctgaagaaatttatagaaagcttgtctagaaacaaggtgttggactatcccgccatcgttatatatgccatgattggaaatgatgtctgcagtgggaagagtgacccagtcccagccatgaccactcctgagaaactctactccaacgtcatgcagactctgaagcatctaaattcccacctgcccaatggcagccatgttattttgtatggcttaccagatggaacctttctctgggataatttgcacaacagatatcatcctctcggccagctaaataaagacatgacctatgcgcagttgtactccttcctgaactgcctccaggtcagcccctgccacggctggatgtcttccaacaagacgttgcggactctcacttcagagagagcagagcaactctccaacacactgaaaaaaattgcagccagtgagaaatttacaaacttcaatcttttctacatggattttgccttccatgaaatcatacaggagtggcagaagagaggcggacagccctggcagctcatcgagcccgtggatggattccaccccaacgaggtaagcacagtcacatggtggctgcagaaggctatttgatggtttgttggtttttaattatggttacacattcatgtgtttatttttatcctgttttgttccagaaaggatttgaggtagtgtacatacatgtataggatagaagatttaataaaaacaaagtgaaatttgggaccatagggaaataaagtagaaattatacctggattcctgatttaatttctataattcataaaatatgtgcagggcattcctgagaaactgccagaagggcagctctgtgcgatgctaaaaggggcagtaagccatggcttccataatacaagaaaaataaatcaagcactcca

SEQ ID NO: 326646 - DNA, 1703 bp, Homo sapiens
ttccggcaagcctcgaggctcacggggtttatgcacactaacttcactgagccagggagcacggaagttgtgccactgtgcaacttgggttttctttatcctgcagtctttacctcagcagaaccgcacaccacagactccctccagctctttgtgtgtggctctctcagggtccaacaagagcaagctgtgggtctgtgagtgtttatgtgtgcttttattcacttcacacttattgaaaagtgtgtatgtgagagggtggggtgtgtgtgtcaaagagagtgaggaagagaaggagagagagatcaattgattctgcagcctcagctccagcatccctcagttgggagcttccaaagccgggtgatcacttggggtgcatagctcggagatgcagtccccctggaaaatccttacggtggcgcctctattcttgctcctgtctcttcagtcctcggcctctccagccaacgatgaccagtccaggcccagcctctcgaatgggcacacctgtgtagggtgtgtgctggtggtgtctgtaatagaacagcttgctcaagttcacaactcgacggtccaggcctcgatggagagactgtgcagctacctgcctgaaaaactgttcttgaaaaccacctgctatttagtcattgacaagtttggatcagacatcataaaactgcttagcgcagatatgaatgctgatgtggtatgtcacactctggagttttgtaaacagaacactggccaaccattgtgtcatctctaccctcttcccaaggagacatggaaatttacactacagaaggcaagacaaattgtcaagaagtccccgattctgaaatattctagaagtggttctgacatttgttcactcccggttttggccaagatctgccagaaaattaaattagctatggaacagtctgtgccattcaaagatgtggattcagacaaatacagcgttttcccaacactgcggggctatcactggcgggggagagactgtaatgacagcgacgagtcagtgtacccaggtagaaggccgaacaactgggatgtccatcaggattcaaactgtaatggcatttggggtgtcgatccaaaagatggagttccatatgagaagaaattctgtgaaggttcacagcccaggggaatcattttgctgggagactcagctggggctcattttcacatctctcctgaatggatcacagcgtcgcagatgtctttgaactctttcatcaatctaccaacagcccttaccaacgagcttgactggccccaactctctggtgctacaggatttctggactccactgttggaattaaagaaaaatctatttaccttcgcttatggaaaagaaaccactgtaatcacagggactaccagaatatttcaagaaatggtgcatcttcccgaaacctgaagaaatttatagaaaggaagagtgacccagtcccagccatgaccactcctgagaaactctactccaacgtcatgcagactctgaagcatctaaattcccacctgcccaatggcagccatgttattttgtatggcttaccagatggaacctttctctgggataatttgcacaacagatatcatcctctcggccagctaaataaagacatgacctatgcgcagttgtactccttcctgaactgcctccaggtgagcactcactggcttgctt

SEQ ID NO: 326647 - DNA, 286 bp, Homo sapiens
ccaccgtgcccggaaattctttcaaggctaaataatatccctttgtatggacataccatattttgtttatccatttatcagttgatgaacatttgggttgttttcacttctgctattataaatatccatgagtacctctatgaacaagtttttgtgggaacatgtgttttcaatcctcctaagaatgaagtagttgagccatatggtaactcagagtttaactttttgaggaactgtcaaactgttttccaaagcagctacactattttacatttccactggcaat

SEQ ID NO: 326648 - DNA, 493 bp, Homo sapiens
ccaagatgggtaaggggaggggacaggcttgactgttcacagtggccctggccctgctgtctcaggctagtatctgcttgttggtctcaccacattctaggctcagaaactggggagcaaagtaatgaaagaaccaggctgggaggccatggggaactcatgcctggagttcagctctcagtgtgcttttgggtcaaggacgcttccctgtcttaagtcactcatgtcagagcctttgccaagagcaatgctgtgttttgttttgggggtgagggaacacccgcgggctgaggggagggttgggccatgctagagaggccgtctgttgtccttgaacctcccaaagctgggaaataagggcctgggctggacggcggtggcgaggacaggttgcgagagagacatggctgggttttcttgcttagggtcctgaatagagagcaaggttgaggccgcagggaccccagcccccaatggactgctgagtcgctgg

SEQ ID NO: 326649 - DNA, 193 bp, Homo sapiens
gaatccactgactctaggtaaaacagggcatgtcaggaagtgagtgcagtcttcccataacctcagagtagcagaaggagaaggtgggactctgaaagctggagccacgtttcctgtgaagaaagatggagtggaccttccttgcttcaggtaccagatcacaggtctcttctcagtcggggatgcctcatct

SEQ ID NO: 326650 - DNA, 243 bp, Homo sapiens
cagttgtcctggggcggtccattgcatggaagaaataaaggcatgttctaatacttgcgtattaaagagcagcagaaagagagctctcagggtgagcttatagttcaaaggccaaatggaaccgatgcaaggagactttcaagccacaagcagaatttttttctgccttcccagaaggtccgatggaatgagcacttcacccaaacttgaagtcactcaagtcttgcttttattttgaaccag

SEQ ID NO: 326651 - DNA, 379 bp, Homo sapiens
atgccagggttggggagagggtgcctggaaatccagtctggctctgcagctactttccatcagcagctcaagactatggaagggattaaaaaattttgttggccagttggacatctctgctacataatacagtaagcgctgtagtacagatgcatacagaagacagagacagtcaattctgccttaaaaataatgggaggttttgtagaggacctgacagcttagctgagtcatcaggtggatgacagagagaaatgtgcaaagcatagactcacgaaagagcttatcaagttattgtgctgtttgtgggggattttttttttttgccctttttccccattttttggtcaaacctcacgacctagcaagtcatttaact

SEQ ID NO: 326652 - DNA, 142 bp, Homo sapiens
aggaaggaggatagaccatagaggaactcaggagatctttgctgaatacaagcgttcaggttcagaggggacagaggattttatagctccttatcaggcattcctgccccatcatcatcttttttttttttttttttttttt

SEQ ID NO: 326653 - DNA, 2200 bp, Homo sapiens
agcccgggcggcgggctagggcgctcgcagggcttctgggccgaccccgctccggcgcctccgcttcccgcccggggcccgccctcgcggcccggcctcgctcccgggtcccagatgaccaccgagggcgggccgccgccggccccgctccgccgcgcgtgcagcccggtccccggcgcgctccaggccgccctgatgagcccgccgcccgccgccgccgccgccgccgccgccgccccggagaccacctcctcctcctcgtcgtcgtcctccgcctcctgcgcctcgtcctcgtcctcctccaattcggccagcgccccctcggctgcctgcaagagcgcgggcggcggcggcgcgggcgccgggagcgggggcgccaagaaggcgagctcggggctgcggcggcccgagaagccgccctactcgtacatcgcgctcatcgtcatggccatccagagctcgcccagcaagcgcctgacgctcagcgagatctaccagttcctgcaggcgcgcttccccttcttccgcggcgcctaccagggctggaagaactcggtgcgccacaatctctcgctcaacgagtgcttcatcaagctgcctaagggcctcgggcggcccggcaagggccactactggaccatcgacccggccagcgagttcatgttcgaggagggctcgttccgccgccggccgcgcggcttcaggcggaagtgccaggcgctcaagcccatgtaccaccgcgtggtgagcggcttgggcttcggggcgtcgctgctgccccagggcttcgacttccaggcgcccccgtcggcgccgctcggctgccacagccagggcggctacggcggcctcgacatgatgcccgcgggctacgacgccggcgcgggcgcccccagccacgcgcaccctcaccaccaccaccaccaccacgtcccgcacatgtcgcccaacccgggttccacctacatggccagctgcccggtgcccgcgggacccgggggcgtcggtgcggccgggggcggcggcggcggcgactacgggccggacagcagcagcagcccggtaccctcgtccccggccatggcgagcgccatcgaatgccactcgccctacacgagccctgcggcgcactggagctcgcctggcgcctcgccttacctcaagcagccgcctgccctgacgcccagcagcaaccccgccgcctcggcaggcctgcactccagcatgtcctcctactcgctggagcagagctacttgcaccagaacgctcgcgaggacctctcagtgggactgccccgttaccagcatcactctactccagtgtgtgacagaaaagatttcgtcctcaacttcaatgggatttcttctttccatccctcagctagcgggtcgtattatcaccatcaccaccagagcgtctgtcaggatattaagccctgcgtcatgtgaacggaaagaggccaagcgatggccgctctctcctctcccctcctcagagggggcagatagaaactgggacggattcaagtcacatgcacgcggatagcagtaagccacacacctgccacttagccagaatgcccaggatcgcgttggtcactgttatttgcctactgctggaagaaggacaaccgctggcaaggtagcgttccccaatctgaatacctgcaggctcccacatgagggagagggcagactcaggtgggaagatgtgccatgcgtaaggcatcaacgtgtatctgtgggatcttcgttgccttcagtaatcagggtgtgaaaaaagcagacaagttgtgtgtgtgtgtgtgtgtctaagaaaacttgtgtgcttttcaaaaaggcagtgctaagcacaagatttcaagaaagcctcttcttgttgcctagctgagtgggagagtcattttccccagacactacatttggatacaggtgccaaagaacattattaaggaattatttagaaacaatgtgtctagtttaagaaagtggttttcagtattgtgacaatacaacgtttttacaaggttgttttctaccaccatattttaaagatatttttatgaccgtgtatactcacactttgcttgtattttaaaaggaggatatatttgcacttatgtatacttttacagtttgccaaaatattttgttgtaaaatttttttcaataaaatgtatataacaaataaaaaaaatag

SEQ ID NO: 326654 - DNA, 5515 bp, Homo sapiens
cgcgcttccgggttggctgtggctgtggctgcggcggcggcgcaggagcagaaaccggtgcggcgcagaagccccagaggcgggcggggcggagcggagggccagcgggccccggcgtgggtctcccgccaggccgccggatttaacccttagtggcttctgaagaaaatggcagaaacatcgccagagccttctgggcagcttgttgtacactcagacgctcacagtgacactgtgctggccagttttgaggatcagaggaagaaaggcttcctctgtgacattactttaatcgtggagaatgtacatttccgggcccacaaagccttacttgctgccagtagtgaatacttctcaatgatgtttgcagaagagggggaaatcggccaatccatttatatgctggaaggcatggttgcagacacctttggtatcctgctggaatttatctacacaggttatctccatgccagtgagaaaagtacagaacaaatcctggctactgctcagttcttaaaagtctatgacctggtaaaggcttacacagacttccaaaataatcatagctccccaaagccaacaactttgaacactgctggtgccccagtggttgttatctctaataagaaaaacgatcctccaaagcggaaacggggaagaccaaaaaaagtcaatacattgcaggaggagaaatcagaactggctgcagaggaagaaatacagttaagagtgaacaattcagttcagaatagacaaaactttgtggttaaaggagacagtggtgtactgaatgagcaaattgcagcaaaagaaaaggaagaatcggagcctacttgtgagccaagtagagaggaggaaatgccagttgaaaaagatgagaactatgatcccaagaccgaggatggccaggcaagccagagtcgatacagcaagcggaggatttggagatccgtcaaacttaaagattacaaacttgttggggatcaagaggaccatggttcagccaagaggatctgtggaaggagaaagcgccctggaggccctgaggcccgctgtaaagactgtggcaaggtctttaagtacaatcactttttagcaatccaccagaggagccacacaggggagcgacctttcaaatgtaatgagtgtggaaaaggctttgcccagaagcactcgctacaggtccacaccaggatgcacacaggcgagcggccgtacacctgcaccgtgtgcagcaaggctctgaccaccaagcactcactgctggagcacatgagcctgcactcaggacagaagtcttttacctgtgatcaatgcggaaaatatttcagccagaacagacagctaaagagccattaccgagttcatacaggccactcattaccggaatgcaaagactgccatcgcaaattcatggatgtgtctcagctaaagaaacatctgcgaacacacacaggtgagaagccatttacttgtgaaatctgtggcaaatctttcacagcaaagagttctcttcagacccacatcagaatccatcgaggagaaaagccatactcctgtggcatttgtggcaaatccttctctgactccagtgccaaaaggagacactgcattctacacactggcaagaagcctttctcctgccctgagtgtaacttacagtttgctcgcttagacaacttgaaggctcacttgaaaattcatagcaaggagaagcatgcttcagatgccagcagcatttctggcagtagtaatacagaagaggtcaggaatattcttcagctacagccatatcaactctctacctcgggagagcaggaaattcagcttctcgtaaccgattctgtacataacatcaatttcatgcccggtcctagccagggaatcagcattgtgactgcagagagttcccaaaacatgactgcagaccaggctgctaatcttaccctgctcacgcagcagccagagcaactgcagaatttaattctttcagctcaacaggagcaaacagaacacattcagagcctcaatatgattgaaagccagatggggccctcacaaacagagccagtgcacgtgatcactctgtccaaggaaacactggaacatcttcatgcccatcaagagcaaacagaggagctccatttagctacaagtacttcagatccagctcagcacctgcagctgacacaggagcctggtccgccaccacccactcaccacgtgccccagccaacgccacttggccaggagcagagctgacctgtaaacacgtttgactgcttgattgggctcttcttataagccagctctgactggattttgaacgcttgaaatcaggctctccacaccattgacttgcagatgcttctgtgagagctgtgatggctaactgatgtttataatgccctccatccaggtagcaagatgtgtgtatgtcttgtctaaggtactgatttgtattgagcatttcaatattattgaatggttttcattttaatctgcaatgtctcataaagactcgggtagtttttctttgggggcattgatctcagtttttctgtaaggtttaaatgttcacagccataggttatggtcttgccaacctccccagttatgtttttttgttttctaggacaaagggagtcattttggttgaactgggcagaatggtttgttctattttcttatttttcttaggcaacacagttgttaccacaagacaagtcagggctaaatatgacagatcacaatgtatggggaatttgcccttttaataatttccagtcccctaagacaaagtaaccctcaacgttttatctttatgcagtacagtgggcttattgtgttaacacttcagaaagattcaaactcataaactcagtattttaactcaaaattcatgtaacaagatagccaaaagcataggatttcttaaaattctgaattcgtcttttctgagaaacataaatttacatatttttcaacagaaggctatcaaaattttaattaagtttaaaatacaaaattggatcaagacattcaccctaaattctgaatttttgtcagaaaagagatttgattttcatgaaggtaaagctttcttcactattctggaacataaaactttattcagtgtaatttaagtcttatatatactctactgaattctaactgatctcctgaaaatgttgatctacgtgttgtgtctgataactttctggagatggaagcttataattcatttttattgcagactagttaaatcccacaaagtgaatatcttctcctaatctttccttttttagagacagggtctcactgtatcacccaggccagagtgtagtggcacaatcattgctcactgtaacctcgaattcctgggctcaagcaaccctcccaccttagcctccctagtagctgggactacagggatgtaccaccacacccagctaatcttcatctaatcttaaaactttgagcctcagagactttgtagccagcatgtgtctgtaattgtatgatttttaaatcatcatcaaaagattaaattatgtttgggttaggttttcaagctaagcttattgaattcttttaccactttcatgtaagctggtaggggatttttgagaaaagaaggtgggcactagtatatctaaattaacaatgctgatggggagtagggggtaatctactctaaaattaatagagcctttccatcaattgttttgttttagacatccttgatttctccctaaatcaaataagttatttggaggttagagtaatagagaattcttcaggtttgagagaagataaaaacattttggttgcatatttgctaagctatattttattatatgtaattcacaaaacttccaaaatgatatatatcttatatgtatcaaccaaactaatgttaaatcaggcctgactagagcaaagataacaattttttacaaacactgttaagccctaagtattatttcaggttctcgtttaaactgtttaattttattcttaaaacacaaagtttttaccaacttttcaaagcccaccaatccacattttctccaggaaattaaatatttaagtaagtgagtgtttactcactctggatagctaggtgattattcagaaaatacggttacatagctatttataagtcaagtttcactggctctataacagtctacctctacactaagagaactataacatgaacaacataggtcactttaaatgttctagtagcaacttttaaaaacataaaaagaagcaggtgaaaatgttaataaaagtttatttaatccaacatttgccaaatatttcaacatataaaaatatattagtgagacattttacattctctttttcatactaagctttcgaaatctggtgtgtattttacactttctgcacatctccatttggatgctaatgttcattggacatacttgatctgtatttagatttcatacaacttacagttgaaaacagattctcatatcaagtagctaagacaaaagtttttttcaagaattgaaataagtatcagtttaaaaatttatattaaatttattaaaattaaaatccagttccttgttgcatgggacacagtgcaaatgcttgataagcacatgtggctagtggctgctatattggacagcatgggccacctgtttctaacttgagcatcagtcctagctatgcctgaattatttgaccagctgtcaaagagaaacaaggaaatgatagctttgttaatctagcctctttctttgtcccacatatacattctacccctttgaataaaaaagttcaatgacgccgggcgtggaggctcatgcctgtaatcccagcactttgggaggccaaggtgggcggatcacgaggtcaggagttcgagggcagcctgaccaacatagtgaaaccccatctctactaaaaatacaaaaattagctgggcgtggtggtgtacccctgtaatcccagctactcgggaggctgagacaggagaatcacttgagcccaggaggcggaggctgcagtgagctgagatcacgccattgcactcaagcctggcgacagagcgagactccgtctcaaaaaaaaaaagttaaatgacttgagtacccaaaagaaatgtcgtgaacatgaaagtacttctcatgtgtccttgagaaatgatgttgctagtgcagtgtttcacaattcattttctactaaatgtgtaccattttttaaattgttttaacagaaatatagagtgtgtttcttaggaaatagaatgttatgctttggggctcctgaaacacctcgttttgaaggtgaatctttggttttctcccagaagagggtctgccttgggatgattggagctcttaccatcaaaatcagttattcaagtgcttgcccagtgcttcttgaaactcacctctactctgtattttctacagttggttcttgtgttataaatgttgtgagcaacagattaaatgatgctgaggaatga

SEQ ID NO: 326655 - DNA, 1342 bp, Homo sapiens
cgcgcttccgggttggctgtggctgtggctgcggcggcggcgcaggagcagaaaccggtgcggcgcagaagccccagaggcgggcggggcggagcggagggccagcgggccccggcgtgggtctcccgccaggccgccggatttaacccttagtggcttctgaagaaaatggcagaaacatcgccagagccttctgggcagcttgttgtacactcagacgctcacagtgacactgtgctggccagttttgaggatcagaggaagaaaggcttcctctgtgacattactttaatcgtggagaatgtacatttccgggcccacaaagccttacttgctgccagtagtgaatacttctcaatgatgtttgcagaagagggggaaatcggccaatccatttatatgctggaaggcatggttgcagacacctttggtatcctgctggaatttatctacacaggttatctccatgccagtgagaaaagtacagaacaaatcctggctactgctcagttcttaaaagtctatgacctggtaaaggcttacacagacttccaaaataatcatagctccccaaagccaacaactttgaacactgctggtgccccagtggttgttatctctaataagaaaaacgatcctccaaagcggaaacggggaagaccaaaaaaagtcaatacattgcaggaggagaaatcagaactggctgcagaggaagaaatacagttaagagtgaacaattcagttcagaatagacaaaactttgtggttaaaggagacagtggtgtactgaatgagcaaattgcagcaaaagaaaaggaagaatcggagcctacttgtgagccaagtagagaggaggaaatgccagttgaaaaagatgagaactatgatcccaagaccgaggatggccaggcaagccagagtcgatacagcaagcggaggatttggagatccgtcaaacttaaagattacaaacttgttggggatcaagaggaccatggttcagccaagaggatctgtggaaggagaaagcgccctggaggccctgaggcccgctgtaaagactgtggcaaggtctttaagtacaatcactttttagcaatccaccagaggagccacacaggtaatgatgttttcaaagctgattgcagtgtgttgcagaattgggagtagtgatgataataatagcttccatttactgtgcaacttctgtgtgatgggcattgtaataaagcctttatacatgttattgcagttaattttctccacaatcctgcaaggtgggtaatatcctcattatacattgtatgattaaaatcatatttactcatatgtaagagagggt

SEQ ID NO: 326656 - DNA, 5598 bp, Homo sapiens
cgcgcttccgggttggctgtggctgtggctgcggcggcggcgcaggagcagaaaccggtgcggcgcagaagccccagaggcgggcggggcggagcggagggccagcgggccccggcgtgggtctcccgccaggccgccggatttaacccttagtggcttctgaagaaaatggcagaaacatcgccagagccttctgggcagcttgttgtacactcagacgctcacagtgacactgtgctggccagttttgaggatcagaggaagaaaggcttcctctgtgacattactttaatcgtggagaatgtacatttccgggcccacaaagccttacttgctgccagtagtgaatacttctcaatgatgtttgcagaagagggggaaatcggccaatccatttatatgctggaaggcatggttgcagacacctttggtatcctgctggaatttatctacacaggttatctccatgccagtgagaaaagtacagaacaaatcctggctactgctcagttcttaaaagtctatgacctggtaaaggcttacacagacttccaaaataatcatagctccccaaagccaacaactttgaacactgctggtgccccagtggttgttatctctaataagaaaaacgatcctccaaagcggaaacggggaagaccaaaaaaagtcaatacattgcaggaggagaaatcagaactggctgcagaggaagaaatacagttaagagtgaacaattcagttcagaatagacaaaactttgtggttaaaggagacagtggtgtactgaatgagcaaattgcagcaaaagaaaaggaagaatcggagcctacttgtgagccaagtagagaggaggaaatgccagttgaaaaagatgagaactatgatcccaagaccgaggatggccaggcaagccagagtcgatacagcaagcggaggatttggagatccgtcaaacttaaagattacaaacttgttggggatcaagaggaccatggttcagccaagaggatctgtggaaggagaaagcgccctggaggccctgaggcccgctgtaaagactgtggcaaggtctttaagtacaatcactttttagcaatccaccagaggagccacacaggggagcgacctttcaaatgtaatgagtgtggaaaaggctttgcccagaagcactcgctacaggtccacaccaggatgcacacaggcgagcggccgtacacctgcaccgtgtgcagcaaggctctgaccaccaagcactcactgctggagcacatgagcctgcactcaggacagaagtcttttacctgtgatcaatgcggaaaatatttcagccagaacagacagctaaagagccattaccgagttcatacaggccactcattaccggaatgcaaagactgccatcgcaaattcatggatgtgtctcagctaaagaaacatctgcgaacacacacaggtgagaagccatttacttgtgaaatctgtggcaaatctttcacagcaaagagttctcttcagacccacatcagaatccatcgaggagaaaagccatactcctgtggcatttgtggcaaatccttctctgactccagtgccaaaaggagacactgcattctacacactggcaagaagcctttctcctgccctgagtgtaacttacagtttgctcgcttagacaacttgaaggctcacttgaaaattcatagcaaggagaagcatgcttcagatgccagcagcatttctggcagtagtaatacagaagaggtcaggaatattcttcagctacagccatatcaactctctacctcgggagagcaggaaattcagcttctcgtaaccgattctgtacataacatcaatttcatgcccggtcctagccagggaatcagcattgtgactgcagagagttcccaaaacatgactgcagaccaggctgctaatcttaccctgctcacgcagcagccagagcaactgcagaatttaattctttcagctcaacaggagcaaacagaacacattcagagcctcaatatgattgaaagccagatggggccctcacaaacagagccagtgcacgtgatcactctgtccaaggaaacactggaacatcttcatgcccatcaagagcaaacagaggagctccatttagctacaagtacttcagatccagctcagcacctgcagctgacacaggagcctggtccgccaccacccactcaccacgtgccccagccaacgccacttggccaggagcagagctgacctgtaaacacgtttgactgcttgattgggctcttcttataagccagctctgactggattttgaacgcttgaaatcaggctctccacaccattgacttgcagatgcttctgtgagagctgtgatggctaactgatgtttataatgccctccatccaggtagcaagatgtgtgtatgtcttgtctaaggtactgatttgtattgagcatttcaatattattgaatggttttcattttaatctgcaatgtctcataaagactcgggtagtttttctttgggggcattgatctcagtttttctgtaaggtttaaatgttcacagccataggttatggtcttgccaacctccccagttatgtttttttgttttctaggacaaagggagtcattttggttgaactgggcagaatggtttgttctattttcttatttttcttaggcaacacagttgttaccacaagacaagtcagggctaaatatgacagatcacaatgtatggggaatttgcccttttaataatttccagtcccctaagacaaagtaaccctcaacgttttatctttatgcagtacagtgggcttattgtgttaacacttcagaaagattcaaactcataaactcagtattttaactcaaaattcatgtaacaagatagccaaaagcataggatttcttaaaattctgaattcgtcttttctgagaaacataaatttacatatttttcaacagaaggctatcaaaattttaattaagtttaaaatacaaaattggatcaagacattcaccctaaattctgaatttttgtcagaaaagagatttgattttcatgaaggtaaagctttcttcactattctggaacataaaactttattcagtgtaatttaagtcttatatatactctactgaattctaactgatctcctgaaaatgttgatctacgtgttgtgtctgataactttctggagatggaagcttataattcatttttattgcagactagttaaatcccacaaagtgaatatcttctcctaatctttccttttttagagacagggtctcactgtatcacccaggccagagtgtagtggcacaatcattgctcactgtaacctcgaattcctgggctcaagcaaccctcccaccttagcctccctagtagctgggactacagggatgtaccaccacacccagctaatcttcatctaatcttaaaactttgagcctcagagactttgtagccagcatgtgtctgtaattgtatgatttttaaatcatcatcaaaagattaaattatgtttgggttaggttttcaagctaagcttattgaattcttttaccactttcatgtaagctggtaggggatttttgagaaaagaaggtgggcactagtatatctaaattaacaatgctgatggggagtagggggtaatctactctaaaattaatagagcctttccatcaattgttttgttttagacatccttgatttctccctaaatcaaataagttatttggaggttagagtaatagagaattcttcaggtttgagagaagataaaaacattttggttgcatatttgctaagctatattttattatatgtaattcacaaaacttccaaaatgatatatatcttatatgtatcaaccaaactaatgttaaatcaggcctgactagagcaaagataacaattttttacaaacactgttaagccctaagtattatttcaggttctcgtttaaactgtttaattttattcttaaaacacaaagtttttaccaacttttcaaagcccaccaatccacattttctccaggaaattaaatatttaagtaagtgagtgtttactcactctggatagctaggtgattattcagaaaatacggttacatagctatttataagtcaagtttcactggctctataacagtctacctctacactaagagaactataacatgaacaacataggtcactttaaatgttctagtagcaacttttaaaaacataaaaagaagcaggtgaaaatgttaataaaagtttatttaatccaacatttgccaaatatttcaacatataaaaatatattagtgagacattttacattctctttttcatactaagctttcgaaatctggtgtgtattttacactttctgcacatctccatttggatgctaatgttcattggacatacttgatctgtatttagatttcatacaacttacagttgaaaacagattctcatatcaagtagctaagacaaaagtttttttcaagaattgaaataagtatcagtttaaaaatttatattaaatttattaaaattaaaatccagttccttgttgcatgggacacagtgcaaatgcttgataagcacatgtggctagtggctgctatattggacagcatgggccacctgtttctaacttgagcatcagtcctagctatgcctgaattatttgaccagctgtcaaagagaaacaaggaaatgatagctttgttaatctagcctctttctttgtcccacatatacattctacccctttgaataaaaaagttcaatgacgccgggcgtggaggctcatgcctgtaatcccagcactttgggaggccaaggtgggcggatcacgaggtcaggagttcgagggcagcctgaccaacatagtgaaaccccatctctactaaaaatacaaaaattagctgggcgtggtggtgtacccctgtaatcccagctactcgggaggctgagacaggagaatcacttgagcccaggaggcggaggctgcagtgagctgagatcacgccattgcactcaagcctggcgacagagcgagactccgtctcaaaaaaaaaaagttaaatgacttgagtacccaaaagaaatgtcgtgaacatgaaagtacttctcatgtgtccttgagaaatgatgttgctagtgcagtgtttcacaattcattttctactaaatgtgtaccattttttaaattgttttaacagaaatatagagtgtgtttcttaggaaatagaatgttatgctttggggctcctgaaacacctcgttttgaaggtgaatctttggttttctcccagaagagggtctgccttgggatgattggagctcttaccatcaaaatcagttattcaagtgcttgcccagtgcttcttgaaactcacctctactctgtattttctacagttggttcttgtgttataaatgttgtgagcaacagattaaatgatgctgaggaatgaaaaaagattctcattataaatgcttacctaggattctcattatagatgcttatctaggttttcataaatgggaatgtaacaat

SEQ ID NO: 326657 - DNA, 4647 bp, Homo sapiens
gcctgggtgatagagtgagaccctgttacaaaggaaaaacaaaaaattaggttatgttagtgctactcactgctggcttcagattcatctgttcagcttccaaaattttattgctgatgtctcttgtgttcattgttggccttttggatgtgtgccttttaagaaaaatcctttattgtttttttaatttgggagagacagaaaaatgtgtggattcttacttataccatgcttctggggctcttcttccaggggagcgacctttcaaatgtaatgagtgtggaaaaggctttgcccagaagcactcgctacaggtccacaccaggatgcacacaggcgagcggccgtacacctgcaccgtgtgcagcaaggctctgaccaccaagcactcactgctggagcacatgagcctgcactcaggacagaagtcttttacctgtgatcaatgcggaaaatatttcagccagaacagacagctaaagagccattaccgagttcatacaggccactcattaccggaatgcaaagactgccatcgcaaattcatggatgtgtctcagctaaagaaacatctgcgaacacacacaggtgagaagccatttacttgtgaaatctgtggcaaatctttcacagcaaagagttctcttcagacccacatcagaatccatcgaggagaaaagccatactcctgtggcatttgtggcaaatccttctctgactccagtgccaaaaggagacactgcattctacacactggcaagaagcctttctcctgccctgagtgtaacttacagtttgctcgcttagacaacttgaaggctcacttgaaaattcatagcaaggagaagcatgcttcagatgccagcagcatttctggcagtagtaatacagaagaggtcaggaatattcttcagctacagccatatcaactctctacctcgggagagcaggaaattcagcttctcgtaaccgattctgtacataacatcaatttcatgcccggtcctagccagggaatcagcattgtgactgcagagagttcccaaaacatgactgcagaccaggctgctaatcttaccctgctcacgcagcagccagagcaactgcagaatttaattctttcagctcaacaggagcaaacagaacacattcagagcctcaatatgattgaaagccagatggggccctcacaaacagagccagtgcacgtgatcactctgtccaaggaaacactggaacatcttcatgcccatcaagagcaaacagaggagctccatttagctacaagtacttcagatccagctcagcacctgcagctgacacaggagcctggtccgccaccacccactcaccacgtgccccagccaacgccacttggccaggagcagagctgacctgtaaacacgtttgactgcttgattgggctcttcttataagccagctctgactggattttgaacgcttgaaatcaggctctccacaccattgacttgcagatgcttctgtgagagctgtgatggctaactgatgtttataatgccctccatccaggtagcaagatgtgtgtatgtcttgtctaaggtactgatttgtattgagcatttcaatattattgaatggttttcattttaatctgcaatgtctcataaagactcgggtagtttttctttgggggcattgatctcagtttttctgtaaggtttaaatgttcacagccataggttatggtcttgccaacctccccagttatgtttttttgttttctaggacaaagggagtcattttggttgaactgggcagaatggtttgttctattttcttatttttcttaggcaacacagttgttaccacaagacaagtcagggctaaatatgacagatcacaatgtatggggaatttgcccttttaataatttccagtcccctaagacaaagtaaccctcaacgttttatctttatgcagtacagtgggcttattgtgttaacacttcagaaagattcaaactcataaactcagtattttaactcaaaattcatgtaacaagatagccaaaagcataggatttcttaaaattctgaattcgtcttttctgagaaacataaatttacatatttttcaacagaaggctatcaaaattttaattaagtttaaaatacaaaattggatcaagacattcaccctaaattctgaatttttgtcagaaaagagatttgattttcatgaaggtaaagctttcttcactattctggaacataaaactttattcagtgtaatttaagtcttatatatactctactgaattctaactgatctcctgaaaatgttgatctacgtgttgtgtctgataactttctggagatggaagcttataattcatttttattgcagactagttaaatcccacaaagtgaatatcttctcctaatctttccttttttagagacagggtctcactgtatcacccaggccagagtgtagtggcacaatcattgctcactgtaacctcgaattcctgggctcaagcaaccctcccaccttagcctccctagtagctgggactacagggatgtaccaccacacccagctaatcttcatctaatcttaaaactttgagcctcagagactttgtagccagcatgtgtctgtaattgtatgatttttaaatcatcatcaaaagattaaattatgtttgggttaggttttcaagctaagcttattgaattcttttaccactttcatgtaagctggtaggggatttttgagaaaagaaggtgggcactagtatatctaaattaacaatgctgatggggagtagggggtaatctactctaaaattaatagagcctttccatcaattgttttgttttagacatccttgatttctccctaaatcaaataagttatttggaggttagagtaatagagaattcttcaggtttgagagaagataaaaacattttggttgcatatttgctaagctatattttattatatgtaattcacaaaacttccaaaatgatatatatcttatatgtatcaaccaaactaatgttaaatcaggcctgactagagcaaagataacaattttttacaaacactgttaagccctaagtattatttcaggttctcgtttaaactgtttaattttattcttaaaacacaaagtttttaccaacttttcaaagcccaccaatccacattttctccaggaaattaaatatttaagtaagtgagtgtttactcactctggatagctaggtgattattcagaaaatacggttacatagctatttataagtcaagtttcactggctctataacagtctacctctacactaagagaactataacatgaacaacataggtcactttaaatgttctagtagcaacttttaaaaacataaaaagaagcaggtgaaaatgttaataaaagtttatttaatccaacatttgccaaatatttcaacatataaaaatatattagtgagacattttacattctctttttcatactaagctttcgaaatctggtgtgtattttacactttctgcacatctccatttggatgctaatgttcattggacatacttgatctgtatttagatttcatacaacttacagttgaaaacagattctcatatcaagtagctaagacaaaagtttttttcaagaattgaaataagtatcagtttaaaaatttatattaaatttattaaaattaaaatccagttccttgttgcatgggacacagtgcaaatgcttgataagcacatgtggctagtggctgctatattggacagcatgggccacctgtttctaacttgagcatcagtcctagctatgcctgaattatttgaccagctgtcaaagagaaacaaggaaatgatagctttgttaatctagcctctttctttgtcccacatatacattctacccctttgaataaaaaagttcaatgacgccgggcgtggaggctcatgcctgtaatcccagcactttgggaggccaaggtgggcggatcacgaggtcaggagttcgagggcagcctgaccaacatagtgaaaccccatctctactaaaaatacaaaaattagctgggcgtggtggtgtacccctgtaatcccagctactcgggaggctgagacaggagaatcacttgagcccaggaggcggaggctgcagtgagctgagatcacgccattgcactcaagcctggcgacagagcgagactccgtctcaaaaaaaaaaagttaaatgacttgagtacccaaaagaaatgtcgtgaacatgaaagtacttctcatgtgtccttgagaaatgatgttgctagtgcagtgtttcacaattcattttctactaaatgtgtaccattttttaaattgttttaacagaaatatagagtgtgtttcttaggaaatagaatgttatgctttggggctcctgaaacacctcgttttgaaggtgaatctttggttttctcccagaagagggtctgccttgggatgattggagctcttaccatcaaaatcagttattcaagtgcttgcccagtgcttcttgaaactcacctctactctgtattttctacagttggttcttgtgttataaatgttgtgagcaacagattaaatgatgctgaggaatga

SEQ ID NO: 326658 - DNA, 275 bp, Homo sapiens
gtgctgccttccatctgcttcaaagcattttttggatccatcattattcagtgaaatgccccttggcattctttggtgctgagcaagaagctgcatgcaaagcaataccaaaacgattgcctaaacctactgcccttcaccatgaaacttagcctttgtcctcaagcatcactacaccctccccaaacaagggttggagaaatgaaagtttatagtaaaaggcaatgttctgcctcccacaaaattgcacactaaagggtagcatggacatgctg

SEQ ID NO: 326659 - DNA, 1027 bp, Homo sapiens
gggattacaggcattagccaccatgcctggccaaaataaatgactttcaaaaaaactgcacatatttatttttatttatatttatttatttatttgagacagagtctggctctgtcgcccaggctggagtgcagtagcacaatctcagctcactgcaagctccgcctcctgggttcatgccattctcctgcctcagcctcctgagtagctgggactataggcgcccacagccacgcccggctaatttttctatttttagtagagacagggtttcaccgtgttagccaggatggtctcgatctcctggccatgtgatccgcctgcctcggcctcccaaagtgctgggattacaggcatgagcccccgtgcctggccaaaactgcacatatttaaactgtaaagtgtgataagttttgacattaataagcctgtaatatgatccatcaccttcatatttacctggagtctggtaacgtctttacctctgccttccagatgaccattgataactttgctttataatagattattttacattttctacatttttatacgtgatttgatgtcgtgaagtgtttaatctttatccctggatggtatcgtgcggtatatttattttgagatttgtcagtgatgatacttgagtagttcactcctttttatattgctgagatgacatgctatgaaatatcactgtatattcattcatctgtttatacatcattaatctatttctcatttttggcttccataaataaaactacagacactttagtacagttctttatgtaaatatgtttcttttttatgtgttactatctgggggttcaataactgaatcagaataggtaaatctatagctttttgtttgtttgtctgttttgagatggagtctcgctctgtcactcaggctggagtgcagtgatgcaatctcggctcactgcaacctccacctcccaggttaaagtgattcttgtgcctcagctacttcggagggtgagccaggaaaattgctgaccacgcaggg

SEQ ID NO: 326660 - DNA, 621 bp, Homo sapiens
cccaacttctatccgctataaaaatgtagaaaatgtaaaataatctattataaagcaaagttatcaatggtcatctggaaggcagaggtaaagacgttaccagactccaggtaaatatgaaggtgatggatcatattacaggcttattaatgtcaaaacttatcacactttacagtttaaatatgtgcagttttggccaggcatcgtggcattcgcctataatcccagctacttgggaggctgaggcacaagaatcactttaacctgggaggtggaggctgcagtgagctcaggtaatgccaccccataccaggatgagcaacaagagcgaaactatctcaaaaataccataattttggggttcataggtcaacctgaaagggtggcagttttcatcacaatctctggtgcttctgagagcaacatgaaattgttctctacttcacaagggatggtgcattatgtttcagtgctgttgagggtaccttcacaggttgtgaggttatagtggaaatgataagtttttcggaattactgcattttaaaagggcttctactatgatccagacatggctgtgaaggatgaatacaaacagaaattctcaggaccttcttaattga

SEQ ID NO: 326661 - DNA, 602 bp, Homo sapiens
gccattttggcctgtcaggtccatccggcgatgctgggtctggacgagctcgggaggagtggttgtggccattgcacacaggcggatctgaggttcggcgacgccgctggtcgcgacccgggacaggacaacgacaggaacaccgccgagcccgcgttccccccccgcccagagtcatggcggcagcagccgctctgagggcgcctgctcagagcagtgtgacctttgaagacgtggctgtaaacttttccctggaggaatggagtcttcttaatgaggctcagggatgcctgtaccatgatgtgatgctggagaccttgacacttatatcctccctgaaagggtgcactcgccagcagttttgcaacaggagcacactgaacaaagaagacagggtcatttataacctgaggcgttcaccctcctgccggtttccattgcctggaacaggacctcatattctgtatgtgtcctgattggctagcaacttagaaccttttaagaggcaaaggtagaggagaacaaagaaaggaggaagtaacttgtggaatgctgagaaaggtaaaaacacttttaaataaggaagaggaacaggctatgac

SEQ ID NO: 326662 - DNA, 2098 bp, Homo sapiens
aaggttccacaggcaagttgtttgcaaatgaaggagttatagaccctgcctttattctgtctgttgactcatttagtcatgcccttgacaatatgaggccttctatatctgtgataatgctaagcagccccaacctcaacctgaacccaactccctgtttgtgcaaataattccatagactagttttttggtttgtcagatactcttgtgggtaggctgcatactcaacaaagtcaacatgtacctcaccagcatttctttgcttttaggttgttggcatggaggggaagatgaggcagcaccttctaagcagagcacgtgtatacatatatacaaagaccagggaggtcatagtggagaaaggccttatgagtgtggggaatataggaaattatttaagaacaagtcctgcctcactgaacccagaagagatcacaaacacaggaatgttcgcactggagaaaggccttatgagtgcagcaaatatgggaaattatttcaccaaaagcctacactccatattcatgagagatttcatactgggcaaaagacctatgagtgcagtgagtgtggaaaatcatttcaccaaagctcttcactcttgcagcgtcagacacttcacactagagaaaggccttatgagtgtattgaatgtgggaaagcctttgctgaaaagtccagtctcattaaccacaggaaagttcactctggagcaaagcgttatgaatgcaatgaatgtgggaagtcctttgcttatacatctagtctcattaaacacaggaggattcacactggagagaggccttatgagtgcagtgaatgtgggagatcctttgctgaaaactccagtcttattaaacacttgagagttcacacaggagaaaggccttatgaatgcgttgagtgtggaaaatcatttcgccgaagctcttcactcttgcagcatcagagagttcacactagagaaaggccttatgaatgtagtgaatgtgggaaatcctttagcttaaggtccaacctcattcaccatcagcgagttcatactggagaaaggcatgagtgcgggcagtgtgggaaatcctttagccgaaaatctagccttattatacatctgagagttcacactggagaaaggccttatgagtgcagtgactgtgggaaatcctttgctgaaaactccagccttattaaacacttgagagttcacactggagaaaggccatatgaatgcattgattgtggaaaatcatttcgccacagttcttcgttccgtcgccatcagagagttcatactggaatgaggccttataagtgaagcaaattttggaaattctcttgcccaggctttttgctccttcaaggccagagagttcacaccagatcaaggtgttatgagtgtgacaaatggggaatattctttagctagaatgctagcttctttacataaaagagtgctcccactgaagaagtgccttttgagtgcaatgaatgtgagaaagccttcagccctctctcattggttaccacaatatttacatgaggaaaataccacagatgtggaggtaatattattttttcttcaatataacactggaggaaaccccttatgaggatgccatctgcctaaattgaatgtcatacatcaaatagctgcatacattccaggtatgtgggaactgcatagtatttttcgacctgcccaggtctcttgctagacttctgtgacttacagttctcttctaaaaagcatttcacctttaccacttggcaggtgcccacagtacatcattcgcctaactcatcatgatccagaagtaactttgattttgtttcattcaacagagggattttttagtatcctcagcactcattctattctcatttctttctctccaatgagttaggccatgaacctgactcatttttggcacagaggactcttctgataacttgaaaaaatggactacctttttcagggatcttttggatctcacagagttcttaagatggaattttccagcctgccagtcatgaatctcagacagcctgccacctattgccctgatttgtgttataataaaggccttgttgcttaaga

SEQ ID NO: 326663 - DNA, 931 bp, Homo sapiens
cctgggagaaggaggatgggcaagggtagatatgttggggaagtggattgtgggtcttcagcacaggggccatttatggtttcatctatccccatcataacagagcagtgtgacctttgaagacgtggctgtaaacttttccctggaggaatggagtcttcttaatgaggctcagggatgcctgtaccatgatgtgatgctggagaccttgacacttatatcctccctggtaaggtactcatacttaactgtgacctgagttagtctctgcccctcccctttattcctcttggtaataacgtctttctcacatcaggactgtggcacagcttcattctccaattctctggatcagttctgtggttggtagtactgagatacatgtactgccctctcctttccttgagcagccccagtctgctttgttgcaggctcccagggaaagagttagggtcaggagtcttaaagtcaccctaatgcatcccaccttggttgtcttctgcctttctgggtgactgtgcagatctaagacttctttttttgagacggagtctcgctctgtcgcccaggctggagtgcagtggcgcagtctcggctcactgcaagctctgcctcccgggctcacgccattctcctgcctcagcctcccgagtagctgggattacaggcgcctgctaccacactgttctgtgtgggaaacatgcaaggggagaagaaaagacaaacatacacaatccctttaatggtaaacaacctttaacccacgtaaatggcaatgcagatataataagcaaataatataagcaaatggatataataagcaaattgcaatggggaggggataagggaaaagatacatatatatttatactcaccagactatggaggattcaccaccagactggcaagcaacagcctgggctccagagtc

SEQ ID NO: 326664 - DNA, 997 bp, Homo sapiens
gccattttggcctgtcaggtccatccggcgatgctgggtctggacgagctcgggaggagtggttgtggccattgcacacaggcggatctgaggttcggcgacgccgctggtcgcgacccgggacaggacaacgacaggaacaccgccgagcccgcgttccccccccgcccagagtcatggcggcagcagccgctctgagggcgcctgctcagagcagtgtgacctttgaagatgtggctgtaaacttttccctggaggaatggagtcttcttaatgaggctcagagatgcctgtaccgtgacgtgatgctggagaccttgacacttatatcctccctggagcagtgtgacctttgaagacgtggctgtaaacttttccctggaggaatggagtcttcttaatgaggctcagggatgcctgtaccatgatgtgatgctggagaccttgacacttatatcctccctgatgaccattgataactttgctttataatagattattttacattttctacatttttatacgtgatttgatgtcgtgaagtgtttaatctttatccctggatggtatcgtgcggtatatttattttgagatttgtcagtgatgatacttgagtagttcactcctttttatattgctgagatgacatgctatgaaatatcactgtatattcattcatctgtttatacatcattaatctatttctcatttttggcttccataaataaaactacagacactttagtacagttctttatgtaaatatgtttcttttttatgtgttactatctgggggttcaataactgaatcagaataggtaaatctatagctttttgtttgtttgtctgttttgagatggagtctcgctctgtcactcaggctggagtgcagtgatgcaatctcggctcactgcaacctccacctcccaggttaaagtgattcttgtgcctcagctacttcggagggtgagccaggaaaattgctgaccacgcaggg

SEQ ID NO: 326665 - DNA, 462 bp, Homo sapiens
gccattttggcctgtcaggtccatccggcgatgctgggtctggacgagctcgggaggagtggttgtggccattgcacacaggcggatctgaggttcggcgacgccgctggtcgcgacccgggacaggacaacgacaggaacaccgccgagcccgcgttccccccccgcccagagtcatggcggcagcagccgctctgagggcgcctgctcagagcagtgtgacctttgaagatgtggctgtaaacttttccctggaggaatggagtcttcttaatgaggctcagagatgcctgtaccgtgacgtgatgctggagaccttgacacttatatcctccctgggtaaggtactcatattcacctgtgacctgagttagtctgtgcccctcacctttatgccttatctctttctcacaccaggaccatggacacagcttcattctccagttctctggagaggttctg

SEQ ID NO: 326666 - DNA, 2168 bp, Homo sapiens
gccattttggcctgtcaggtccatccggcgatgctgggtctggacgagctcgggaggagtggttgtggccattgcacacaggcggatctgaggttcggcgacgccgctggtcgcgacccgggacaggacaacgacaggaacaccgccgagcccgcgttccccccccgcccagagtcatggcggcagcagccgctctgagggcgcctgctcagagcagtgtgacctttgaagatgtggctgtaaacttttccctggaggaatggagtcttcttaatgaggctcagagatgcctgtaccgtgacgtgatgctggagaccttgacacttatatcctccctgggttgttggcatggaggggaagatgaggcagcaccttctaagcagagcacgtgtatacatatatacaaagaccagggaggtcatagtggagaaaggccttatgagtgtggggaatataggaaattatttaagaacaagtcctgcctcactgaacccagaagagatcacaaacacaggaatgttcgcactggagaaaggccttatgagtgcagcaaatatgggaaattatttcaccaaaagcctacactccatattcatgagagatttcatactgggcaaaagacctatgagtgcagtgagtgtggaaaatcatttcaccaaagctcttcactcttgcagcgtcagacacttcacactagagaaaggccttatgagtgtattgaatgtgggaaagcctttgctgaaaagtccagtctcattaaccacaggaaagttcactctggagcaaagcgttatgaatgcaatgaatgtgggaagtcctttgcttatacatctagtctcattaaacacaggaggattcacactggagagaggccttatgagtgcagtgaatgtgggagatcctttgctgaaaactccagtcttattaaacacttgagagttcacacaggagaaaggccttatgaatgcgttgagtgtggaaaatcatttcgccgaagctcttcactcttgcagcatcagagagttcacactagagaaaggccttatgaatgtagtgaatgtgggaaatcctttagcttaaggtccaacctcattcaccatcagcgagttcatactggagaaaggcatgagtgcgggcagtgtgggaaatcctttagccgaaaatctagccttattatacatctgagagttcacactggagaaaggccttatgagtgcagtgactgtgggaaatcctttgctgaaaactccagccttattaaacacttgagagttcacactggagaaaggccatatgaatgcattgattgtggaaaatcatttcgccacagttcttcgttccgtcgccatcagagagttcatactggaatgaggccttataagtgaagcaaattttggaaattctcttgcccaggctttttgctccttcaaggccagagagttcacaccagatcaaggtgttatgagtgtgacaaatggggaatattctttagctagaatgctagcttctttacataaaagagtgctcccactgaagaagtgccttttgagtgcaatgaatgtgagaaagccttcagccctctctcattggttaccacaatatttacatgaggaaaataccacagatgtggaggtaatattattttttcttcaatataacactggaggaaaccccttatgaggatgccatctgcctaaattgaatgtcatacatcaaatagctgcatacattccaggtatgtgggaactgcatagtatttttcgacctgcccaggtctcttgctagacttctgtgacttacagttctcttctaaaaagcatttcacctttaccacttggcaggtgcccacagtacatcattcgcctaactcatcatgatccagaagtaactttgattttgtttcattcaacagagggattttttagtatcctcagcactcattctattctcatttctttctctccaatgagttaggccatgaacctgactcatttttggcacagaggactcttctgataacttgaaaaaatggactacctttttcagggatcttttggatctcacagagttcttaagatggaattttccagcctgccagtcatgaatctcagacagcctgccacctattgccctgatttgtgttataataaaggccttgttgcttaaga

SEQ ID NO: 326667 - DNA, 2214 bp, Homo sapiens
gccattttggcctgtcaggtccatccggcgatgctgggtctggacgagctcgggaggagtggttgtggccattgcacacaggcggatctgaggttcggcgacgccgctggtcgcgacccgggacaggacaacgacaggaacaccgccgagcccgcgttccccccccgcccagagtcatggcggcagcagccgctctgagggcgcctgctcagagcagtgtgacctttgaagatgtggctgtaaacttttccctggaggaatggagtcttcttaatgaggctcagagatgcctgtaccgtgacgtgatgctggagaccttgacacttatatcctccctgggttgttggcatggaggggaagatgaggcagcaccttctaagcagagcacgtgtatacatatatacaaagaccagggaggtcatagtggagaaaggccttatgagtgtggggaatataggaaattatttaagaacaagtcctgcctcactgaacccagaagagatcacaaacacaggaatgttcgcactggagaaaggccttatgagtgcagcaaatatgggaaattatttcaccaaaagcctacactccatattcatgagagatttcatactgggcaaaagacctatgagtgcagtgagtgtggaaaatcatttcaccaaagctcttcactcttgcagcgtcagacacttcacactagagaaaggccttatgagtgtattgaatgtgggaaagcctttgctgaaaagtccagtctcattaaccacaggaaagttcactctggagcaaagcgttatgaatgcaatgaatgtgggaagtcctttgcttatacatctagtctcattaaacacaggaggattcacactggagagaggccttatgagtgcagtgaatgtgggagatcctttgctgaaaactccagtcttattaaacacttgagagttcacacaggagaaaggccttatgaatgcgttgagtgtggaaaatcatttcgccgaagctcttcactcttgcagcatcagagagttcacactagagaaaggccttatgaatgtagtgaatgtgggaaatcctttagcttaaggtccaacctcattcaccatcagcgagttcatactggagaaaggcatgagtgcgggcagtgtgggaaatcctttagccgaaaatctagccttattatacatctgagagttcacactggagaaaggccttatgagtgcagtgactgtgggaaatcctttgctgaaaactccagccttattaaacacttgagagttcacactggagaaaggccatatgaatgcattgattgtggaaaatcatttcgccacagttcttcgttccgtcgccatcagagagttcatactggaatgaggccttataagtgaagcaaattttggaaattctcttgcccaggctttttgctccttcaaggccagagagttcacaccagatcaaggtgttatgagtgtgacaaatggggaatattctttagctagaatgctagcttctttacataaaagagtgctcccactgaagaagtgccttttgagtgcaatgaatgtgagaaagccttcagccctctctcattggttaccacaatatttacatgaggaaaataccacagatgtggaggtaatattattttttcttcaatataacactggaggaaaccccttatgaggatgccatctgcctaaattgaatgtcatacatcaaatagctgcatacattccaggtatgtgggaactgcatagtatttttcgacctgcccaggtctcttgctagacttctgtgacttacagttctcttctaaaaagcatttcacctttaccacttggcaggtgcccacagtacatcattcgcctaactcatcatgatccagaagtaactttgattttgtttcattcaacagagggattttttagtatcctcagcactcattctattctcatttctttctctccaatgagttaggccatgaacctgactcatttttggcacagaggactcttctgataacttgaaaaaatggactacctttttcagggatcttttggatctcacagagttcttaagatggaattttccagcctgccagtcatgaatctcagacagcctgccacctattgccctgatttgtgttataataaaggccttgttgcttaagacaccttcagtctttgcaggagggcatggaagctccaagtgcttttc

SEQ ID NO: 326668 - DNA, 1184 bp, Homo sapiens
gccattttggcctgtcaggtccatccggcgatgctgggtctggacgagctcgggaggagtggttgtggccattgcacacaggcggatctgaggttcggcgacgccgctggtcgcgacccgggacaggacaacgacaggaacaccgccgagcccgcgttccccccccgcccagagtcatggcggcagcagccgctctgagggcgcctgctcagagcagtgtgacctttgaagacgtggctgtaaacttttccctggaggaatggagtcttcttaatgaggctcagggatgcctgtaccatgatgtgatgctggagaccttgacacttatatcctccctgtagagatggggtttcactgtgttagccaggatggtctcgatctcctgacctcgtgatccacctgcctcagcctcccaaaatgctgggattataggcgtgagccaccgtgcccggccctcacagcattcttaagatagaattttccagcctgccagtcacaaatcagacagcctgcctgccgcctatttcccttgtttgtattataataaagtctctgctgcttaagacaccttcaatcttgagagctgtatttacagtgtggaattgtttgaacactggatttgcagatgggcatggtggctcatgcctgtgataccagcactttgggaggccgaggcagaagggtcagttgaggtcaggagttccagaccagcctggccaacatgctgaaaccccatctctactaaaaatacaaaattagccaggcatcgtggcattcgcctataatcccagctacttgggaggctgaggcacaagaatcactttaacctgggaggtggaggctgcagtgagctcaggtaatgccaccccataccaggatgagcaacaagagcgaaactatctcaaaaataccataattttggggttcataggtcaacctgaaagggtggcagttttcatcacaatctctggtgcttctgagagcaacatgaaattgttctctacttcacaagggatggtgcattatgtttcagtgctgttgagggtaccttcacaggttgtgaggttatagtggaaatgataagtttttcggaattactgcattttaaaagggcttctactatgatccagacatggctgtgaaggatgaatacaaacagaaattctcaggaccttcttaattga

SEQ ID NO: 326669 - DNA, 343 bp, Homo sapiens
atacatgtttgtagtggttgttaacttcaccctagacaagcagccaataagtctaggtagagcagagtaaggcggggaactatgccgtgaccgtgtgtgatacaatttttctagcctgtggtgctttttgcggcagggcttaggagtaaggttagtatgttatcatttgggaaaccaaattattattttgggtcttcagtcaattatgatgctgtgtatatttagtgtttatctacaatatatgcacattcattaatttggagctactcatcctataataaatagttgtgcatttactcccatttttttctgcatttctctccttatttataattatgtgtta

SEQ ID NO: 326670 - DNA, 299 bp, Homo sapiens
gccggaagtgggaacaaagatgggttagaggagacacgggcataaggatgagtctaaattcttcagggccagaggtgcaggagacctttcctacctccctggaatactcaactctccttacttgcctcctgtacctctggctattaattttctgtctctttcagaagcttcagttttcctcagttcattctttaaatcagcaatttaaaaaataagtttttgaatgcataatgcatgtatgtagcacaatattcaaaagctataagggcaaagtggaaaaaatcctattcccgatagct

SEQ ID NO: 326671 - DNA, 1776 bp, Homo sapiens
ggagagaagaatctcttagaattagtggagctggcagaccaagccttgcgtagcttttcctatcatcagcatttcccgctaataaaggaaatcatcagcatttgttcaaagatctggaaatctgctcaggccagtccattactacaaggagaaagtcagaaggtgcttctccatatgttgtctcacccattgccacgagtgaaagctgaaacttaccactgctgtctggaaatcacgaaggaatgtttaggtgtccataatgtcactaaacccgtgtcttcactttgcaatggaattcattttctacttcatccaaaagttctgtatgaaatctctgtatttggcattcaagagcccgaaagtgaggtgaacactgctgccaaggccattctgttatacctgcttcagggacgattgatgatgacagcattgacctggaacaagtttattgaatctctctgtcctgtcatcccaatactacagggctatgccgacacagaagatcctctgggtaactgcattctccttctaagcaaagcaagttctgacacagaagagatgcttccgtgtactacccgattaaagtccatgctgcgacttttgctagtgaaaaagccatcggtccgttcgctagcattaaagcttttagcattccatcttaccagtgaagaaggggctgatacaaagcgtcctctaatagacgccagagttctctccagagttactgatttattcattgggaagaaacctattgaactcagactggatgacagaagagagctggttattaagttggagactgttgaaaaggtatatgaaatcttcacctcagatgatgttgatctcgttttgagaaagtcagctgctgaacagttagctgtgattatgcaagatattaaaatgcatgctgtggtgaaaaagttatgcttaattgacaaaataattgagtatttaaatgaatgtgtgagtcaagatggcaaggttgtagaatgtttggtacaaccatgcctcacactcttgaggaaggttttatgtggtgatccagtcatgcgtgtttcgctctcgcaacagtcttctcttttgaccgtgttattcagagtttccttaatatttcatgaagattgtagtgtcgtgactgaagttggagcactattttgtcttctattatttgatgaagtatcgagaatggatatgtggtctgttaatccttccaataaaccttctttgccatcggtcttcagtttgcctgtttccgtttttagaaggtaccatctacctgttcatgtaattggacaccatgctgtgagtccttactccatagttttgcccttatctgctgattgtttggccttgaagccggtgtcagatatgctgagaatagcttggaacctgtcatggtatcatgggagtgataatctgttgaagcaaatgaactctgaaactaaaacgcaagaaattttagatgcattgaagttatctacagaggacatcctcactctgaagataacacacatggctagtgggctgcaggactgcctccattccattgttcaggctgcaacccacagggaagttagggctgctgtcaccaggatgagtttttatcttctgaatgacagattgtctttaaagggttgccctggtccatgtggggttaccttgaagtccttggcttggcacaccgcactaaacaggtttttacaggtgcttcctgcttgcactgaagatgagaaactgctaatagatatcatacattttttaaataaattaataaag

SEQ ID NO: 326672 - DNA, 1496 bp, Homo sapiens
ggagagaagaatctcttagaattagtggagctggcagaccaagccttgcgtagcttttcctatcatcagcatttcccgctaataaaggaaatcatcagcatttgttcaaagatctggaaatctgctcaggccagtccattactacaaggagaaagtcagaaggtgcttctccatatgttgtctcacccattgccacgagtgaaagctgaaacttaccactgctgtctggaaatcacgaaggaatgtttaggtgtccataatgtcactaaacccgtgtcttcactttgcaatggaattcattttctacttcatccaaaagttctgtatgaaatctctgtatttggcattcaagagcccgaaagtgaggtgaacactgctgccaaggccattctgttatacctgcttcagggacgattgatgatgacagcattgacctggaacaagtttattgaatctctctgtcctgtcatcccaatactacagggctatgccgacacagaagatcctctgggtaactgcattctccttctaagcaaagcaagttctgacacagaagagatgcttccgtgtactacccgattaaagtccatgctgcgacttttgctagtgaaaaagccatcggtccgttcgctagcattaaagcttttagcattccatcttaccagtgaagaaggggctgatacaaagcgtcctctaatagacgccagagttctctccagagttactgatttattcattgggaagaaacctattgaactcagactggatgacagaagagagctggttattaagttggagactgttgaaaaggtatatgaaatcttcacctcagatgatgttgatctcgttttgagaaagtcagctgctgaacagttagctgtgattatgcaagatattaaaatgcatgctgtggtgaaaaagttatgcttaattgacaaaataattgagtatttaaatgaatgtgtgagtcaagatggcaaggttgtagaatgtttggtacaaccatgcctcacactcttgaggaaggttttatgtggtgatccagtcatgcgtgtttcgctctcgcaacagtcttctcttttgaccgtgttattcagagtttccttaatatttcatgaagattgtagtgtcgtgactgaagttggagcactattttgtcttctattatttgatgaagtatcgagaatggatatgtggtctgttaatccttccaataaaccttctttgccatcggtcttcagtttgcctgtttccgtttttagaaggtttttacaggtgcttcctgcttgcactgaagatgagaaactgctaatagatatcatacattttttaaataaattaataaaggaacaaagaaaaaattcttcactagaacttctaaactggattctcgaattacttcttagacatagtgcaaacccactgttagacctcttggttctgacagagtcacaggcacgagaagaaacagatgatatccggactgctgtcaggca

SEQ ID NO: 326673 - DNA, 1925 bp, Homo sapiens
ggagagaagaatctcttagaattagtggagctggcagaccaagccttgcgtagcttttcctatcatcagcatttcccgctaataaaggaaatcatcagcatttgttcaaagatctggaaatctgctcaggccagtccattactacaaggagaaagtcagaaggtgcttctccatatgttgtctcacccattgccacgagtgaaagctgaaacttaccactgctgtctggaaatcacgaaggaatgtttaggtgtccataatgtcactaaacccgtgtcttcactttgcaatggaattcattttctacttcatccaaaagttctgtatgaaatctctgtatttggcattcaagagcccgaaagtgaggtgaacactgctgccaaggccattctgttatacctgcttcagggacgattgatgatgacagcattgacctggaacaagtttattgaatctctctgtcctgtcatcccaatactacagggctatgccgacacagaagatcctctgggtaactgcattctccttctaagcaaagcaagttctgacacagaagagatgcttccgtgtactacccgattaaagtccatgctgcgacttttgctagtgaaaaagccatcggtccgttcgctagcattaaagcttttagcattccatcttaccagtgaagaaggggctgatacaaagcgtcctctaatagacgccagagttctctccagagttactgatttattcattgggaagaaacctattgaactcagactggatgacagaagagagctggttattaagttggagactgttgaaaaggtatatgaaatcttcacctcagatgatgttgatctcgttttgagaaagtcagctgctgaacagttagctgtgattatgcaagatattaaaatgcatgctgtggtgaaaaagttatgcttaattgacaaaataattgagtatttaaatgaatgtgtgagtcaagatggcaaggttgtagaatgtttggtacaaccatgcctcacactcttgaggaaggttttatgtggtgatccagtcatgcgtgtttcgctctcgcaacagtcttctcttttgaccgtgttattcagagtttccttaatatttcatgaagattgtagtgtcgtgactgaagttggagcactattttgtcttctattatttgatgaagtatcgagaatggatatgtggtctgttaatccttccaataaaccttctttgccatcggtcttcagtttgcctgtttccgtttttagaaggtaccatctacctgttcatgtaattggacaccatgctgtgagtccttactccatagttttgcccttatctgctgattgtttggccttgaagccggtgtcagatatgctgagaatagcttggaacctgtcatggtatcatgggagtgataatctgttgaagcaaatgaactctgaaactaaaacgcaagaaattttagatgcattgaagttatctacagaggacatcctcactctgaagataacacacatggctagtgggctgcaggactgcctccattccattgttcaggctgcaacccacagggaagttagggctgctgtcaccaggatgagtttttatcttctgaatgacagattgtctttaaagggttgccctggtccatgtggggttaccttgaagtccttggcttggcacaccgcactaaacaggtttttacaggtgcttcctgcttgcactgaagatgagaaactgctaatagatatcatacattttttaaataaattaataaaggaacaaagaaaaaattcttcactagaacttctaaactggattctcgaattacttcttagacatagtgcaaacccactgttagacctcttggttctgacagagtcacaggcacgagaagaaacagatgatatccggactgctgtcaggca

SEQ ID NO: 326674 - DNA, 1233 bp, Homo sapiens
ggagagaagaatctcttagaattagtggagctggcagaccaagccttgcgtagcttttcctatcatcagcatttcccgctaataaaggaaatcatcagcatttgttcaaagatctggaaatctgctcaggccagtccattactacaaggagaaagtcagaaggtgcttctccatatgttgtctcacccattgccacgagtgaaagctgaaacttaccactgctgtctggaaatcacgaaggaatgtttaggtgtccataatgtcactaaacccgtgtcttcactttgcaatggaattcattttctacttcatccaaaagttctgtatgaaatctctgtatttggcattcaagagcccgaaagtgaggtgaacactgctgccaaggccattctgttatacctgcttcagggacgattgatgatgacagcattgacctggaacaagtttattgaatctctctgtcctgtcatcccaatactacagggctatgccgacacagaagatcctctgggtaactgcattctccttctaagcaaagcaagttctgacacagaagagatgcttccgtgtactacccgattaaagtccatgctgcgacttttgctagtgaaaaagccatcggtccgttcgctagcattaaagcttttagcattccatcttaccagtgaagaaggggctgatacaaagcgtcctctaatagacgccagagttctctccagagttactgatttattcattgggaagaaacctattgaactcagactggatgacagaagagagctggttattaagttggagactgttgaaaaggtatatgaaatcttcacctcagatgatgttgatctcgttttgagaaagtcagctgctgaacagttagctgtgattatgcaagatattaaaatgcatgctgtggtgaaaaagttatgcttaattgacaaaataattgagtatttaaatgaatgtgtgagtcaagatggcaaggttgtagaatgtttggtacaaccatgcctcacactcttgaggaaggttttatgtggtgatccagtcatgcgtgtttcgctctcgcaacagtcttctcttttgaccgtgttattcagagtttccttaatatttcatgaagattgtagtgtcgtgactgaagttggagcactattttgtcttctattatttgatgcactcatcgatctgtgtattgtggaaggagattcaccctatagaccttctttccttctt

SEQ ID NO: 326675 - DNA, 430 bp, Homo sapiens
ttctgacacagaagagatgcttccgtgtactacccgattaaagtccatgctgcgacttttgctagtgaaaaagccatcgtgagtacaacgtaatcttgtgaacgtcaaagattgatggaaacatgctaagaaagtatagtaactatatataatttgaaacaaaactaaagaatttttaaggagggtgttattccattactagaggaaaccaatgcgtgaaactaagcagatacaaggtcttgtatgtacttgctgacgtttcatccactttacagccaagttattccttgccagatcagcctgtgttacaggactgctactaagtgccgctcagtagtgccctaggcaagttggagagccatggagataaatagatggtaaaaattatagtgcattcccatcttctctttagaaattgttagccttccag

SEQ ID NO: 326676 - DNA, 2333 bp, Homo sapiens
ggagagaagaatctcttagaattagtggagctggcagaccaagccttgcgtagcttttcctatcatcagcatttcccgctaataaaggaaatcatcagcatttgttcaaagatctggaaatctgctcaggccagtccattactacaaggagaaagtcagaaggtgcttctccatatgttgtctcacccattgccacgagtgaaagctgaaacttaccactgctgtctggaaatcacgaaggaatgtttaggtgtccataatgtcactaaacccgtgtcttcactttgcaatggaattcattttctacttcatccaaaagttctgtatgaaatctctgtatttggcattcaagagcccgaaagtgaggtgaacactgctgccaaggccattctgttatacctgcttcagggacgattgatgatgacagcattgacctggaacaagtttattgaatctctctgtcctgtcatcccaatactacagggctatgccgacacagaagatcctctgggtaactgcattctccttctaagcaaagcaagttctgacacagaagagatgcttccgtgtactacccgattaaagtccatgctgcgacttttgctagtgaaaaagccatcggtccgttcgctagcattaaagcttttagcattccatcttaccagtgaagaaggggctgatacaaagcgtcctctaatagacgccagagttctctccagagttactgatttattcattgggaagaaacctattgaactcagactggatgacagaagagagctggttattaagttggagactgttgaaaaggtatatgaaatcttcacctcagatgatgttgatctcgttttgagaaagtcagctgctgaacagttagctgtgattatgcaagatattaaaatgcatgctgtggtgaaaaagttatgcttaattgacaaaataattgagtatttaaatgaatgtgtgagtcaagatggcaaggttgtagaatgtttggtacaaccatgcctcacactcttgaggaaggttttatgtggtgatccagtcatgcgtgtttcgctctcgcaacagtcttctcttttgaccgtgttattcagagtttccttaatatttcatgaagattgtagtgtcgtgactgaagttggagcactattttgtcttctattatttgatgaagtatcgagaatggatatgtggtctgttaatccttccaataaaccttctttgccatcggtcttcagtttgcctgtttccgtttttagaaggtaccatctacctgttcatgtaattggacaccatgctgtgagtccttactccatagttttgcccttatctgctgattgtttggccttgaagccggtgtcagatatgctgagaatagcttggaacctgtcatggtatcatgggagtgataatctgttgaagcaaatgaactctgaaactaaaacgcaagaaattttagatgcattgaagttatctacagaggacatcctcactctgaagataacacacatggctagtgggctgcaggactgcctccattccattgttcaggctgcaacccacagggaagttagggctgctgtcaccaggatgagtttttatcttctgaatgacagattgtctttaaagggttgccctggtccatgtggggttaccttgaagtccttggcttggcacaccgcactaaacagtaaacatggaaaggaacaagcggtaccagccactgcaaaaacatgccaacttgtaaagaccattgatgctaggaagaaactgtatcaactaacgagcaaaataaccagctaacatcatgatgacaggattgaattcacacataacaatattaaccttaaatgtaaatggtctaaatgctccaattaaaagatacagactgggaagttggataaagagtcaagacccatcagtgtgctatattcaggagactcatctcacgtgcagagacatacataggctcaaaataaagggatggaggaagatcaaccaagcaaatggaaaacaaaaaaaggcaggggttgcaatcctctctccgataaaacagactttaaaccaacaaagatctaaagagacaaggccattacataatggtaaagggatcagttcaagaagaagagctaactatcctaaatatatatgcacccagtacaggagcacccagattcataaagcaagtccttagagacctacaaagagacttggactccacacaataataatgggagactttaacaccccactgtcaacattagacagatcagtgagacagaaagttaacaaggatatccaggacttgaactcagctctgcaccaagtgg

SEQ ID NO: 326677 - DNA, 146 bp, Homo sapiens
catgtctgtgagtagccactgcactccagcctgggcaacacagcaagactccatctctttaaaaaaaagagaaagagaaagaaaagaggagagggaagaaagaaaagaaaaaagaaaggaaaagaaaagaggagagggaagaaaga

SEQ ID NO: 326678 - DNA, 353 bp, Homo sapiens
  misc_feature (285)..(285): n is a, c, g, or t
ttccaatttgagccgctgtgaaaaaggcctccaccagcctctcaccagaagagattgctcattggaacgcaatgccacctggtgggggacgaggacagtgcgagcaagcagatgttatttcctactgacctaatttagagaacattaaacagtggaagtttccagagaaaacagccatcaaagaaggttgagagtgagaattaagagacactggagaagatcaagagaatgtgccctgaagacaacaacaaaaatcaataaaagatttcaagaatgaaatcccgnaatgcgggccggaaaacatattattgctttttaaactgactagcgagagttttgttaataatagaaat

SEQ ID NO: 326679 - DNA, 2302 bp, Homo sapiens
  misc_feature (291)..(291): n is a, c, g, or t
  misc_feature (302)..(302): n is a, c, g, or t
  misc_feature (539)..(539): n is a, c, g, or t
  misc_feature (677)..(677): n is a, c, g, or t
  misc_feature (1108)..(1108): n is a, c, g, or t
  misc_feature (2110)..(2110): n is a, c, g, or t
ttccaatttgagccgctgtgaaaaaggcctccaccagcctctcaccagaagagattgctcattggaacgcaatgccacctggtgggggacgaggacagtgcgagcaagcagatgttatttcctactgacctaatttagagaacattaaacgtaagagagggaacatttggggttggaagcctgtgcccaaaaccttaaagagtgcaggcagctggccataaaagcagcttgagcaaacccctcattcagccgttgaaatgtgtgtgtgaacactttaaaggtttcctctgngcttttcctgngtgcatttggtcatcacagctgtgaagtggggtgggaatgtttcccctcgttttctaggagagaaattttgggttcagtgagacgaagtgctgcagacaggcccatggtgatgctcaggcctctgcttgaagttggtgctcacttcctggcaccacttcctgcccccaccagtgcttctggcagagcccagggcagtggctttatggaactgtgtaaggtgataggaacccacaggnggaatggccgtgtggcctctggactgaggagggctggaccaggttgtgggcacgcctggaacacacgccacatcctatcccatagcgaggcctcttccttgtggctctcgaaggatttgaggacgcgggagggtgaantgtttccagagaaatatccaggacttttagaactaggctttcaaaagcatttacctgtcagataaattcaagtggcatcaatgcagattttaaatgtgtacagatatctccactcgcacgctgagttgtgcttcacacaagttttgcgcacggagtattccattaaatctactgaagcagtggggcaaggagaaaggagaggtgactgctgatgtttttaaagctctgacagtcacatatagattgtcccaggtacccctgctgcccccaagacactccaaaggcaaagatggatggtgacaaagtaaccttcatgcagaaacaagaacagtcacccccaacaacaagccctgctgaaggtgaagaatgccaccaggctgcctggcagttactgagtgcttattcctgctagcctattggagtcacgtcanatttgttacatggtaacttaattgtgccttccacgccttcacaaaatcagttgtacaagagaaggcacccaccacagtccatgtgacctttctcggtctgatttacatagtggggatgatgacactcgcgttgtagagtagttgcacgattaaacctggcacacagacataaagcactcaatgtctgacacatagtggactctcaagaagtttgtcatgcaggggacacttgaatgcccagtatgggccagacagcatcagctcatttcagtcccacagccctgtgagggaggaactctgccctgttttacagttagggaaattgaggcacaaaggctaagaagtcgatatccaagggcacagaatgattgggtgacggtgagcccaggcagtgtgacaacaaggttgctgccccacgccacctctgtctttcgtgggtatgtcggtgtgaggtgtaggcagccctgcactggcattcagcaggcgggactcccgggcaggctcttctgcgaacactcatgggccaccagccctttctggaacttgccttttttttttttttttacctgaaagctacgtgaatcgttggaaaattggtgtaaaaatggaactgagtcatctcaaaagttcctttcagttctaaaattctgtgaattgaagcctactttttcactttaaatgatttattgggtttacagttctttacgctttctgattgaactgatttgaagttcttatttcgtgtgttggggaacacacccccaacccgtcacagcgtggccgtgggtgggagatggacgttaggctggccagtcactagggggcagcatcagcacgggtctggctgtccctggccttagggagcagtttctgcccctcctgccccgtcagaaagtctcggactcctctctgcttgcatgtgtaaagttttcattttcaggggccttttagtcaaaaaaaataaagctgtatgacttagtgctgaaggatatgaattaggcntagctcttgggttggcagcataaaccaaggggcatcaacccaccaccgacaagctaagaatggtttttacatctttaaatggttgaaaaaggaaaaagaatgtttagtgacacgtgaaaaatacatgaaattcaaacttcaatgtctacaaataaagtgcattagcacacggtcgtcttgcttctctaaaaa

SEQ ID NO: 326680 - DNA, 427 bp, Homo sapiens
  misc_feature (359)..(359): n is a, c, g, or t
tccagagacaggcaggggcaggcaggggctgcaggcacctgcttcaccgcgggagggagccaggagaagtgggtcccagaggaaaatcttcctgtacacgggctgcattagtggtacctgagggcatctggaagaccgtggttctccttgcaacagtcacctaatggccttcagtgaaaagacagactccttgactctctctttccccaaacacattcctacagagtggaagtttccagagaaaacagccatcaaagaaggttgagagtgagaattaagagacactggagaagatcaagagaatgtgccctgaagacaacaacaaaaatcaataaaagatttcaagaatgaaatcccgnaatgcgggccggaaaacatattattgctttttaaactgactagcgagagttttgttaataatagaaat

SEQ ID NO: 326681 - DNA, 252 bp, Homo sapiens
gcggccgactactactactactgctcgaattcaagcttctaacgatgtacggggacatggggttaattcaagtctgctgcgagcacgactccgcccttggcactggcctccagcaagccctgttctctttggggtacaggggaacgggatggtttagactttcctgctcagtgtgtaaaaaatgtagctaaagccactatttttgctctccttaagctgttcaataaaccggttcctcattttaaaaaaaaa

SEQ ID NO: 326682 - DNA, 2610 bp, Homo sapiens
cggcggcggcggcggcgacggcgacggcgacggcagcggggacggcagcagtagcgggagcagcagcgtggacgcggctggcgctggcgccatgaacccgctgtaaggcgcaggctgtgcagcacggggtgcgggggaggaggaggaggacgccgcggtgaagttctccgccatgaacctgaggggcctcttccaggacttcaacccgagtaaattcctcatctatgcctgtctgctgctgttctctgtgctgctggcccttcgtttggatggcatcatacagtggagttactgggctgtctttgctccaatatggctgtggaagttaatggtcattgttggagcctcagttggaactggagtctgggcacgaaatcctcaatatcgagcagaaggagaaacgtgtgtggagtttaaagccatgttgattgcagtgggcatccacttgctcttgttgatgtttgaagttctggtctgtgacagaatcgagagaggaagccatttctggctcctggtcttcatgccgctgttctttgtttccccggtgtctgttgcagcttgcgtttggggctttcgacatgacaggtcactagagttagaaatcctgtgttctgtcaacattctccagtttatattcattgccttaagactggacaagatcatccactggccctggcttgttgtgtgtgtcccgctgtggattctcatgtcctttctgtgcctggtggtcctctactacattgtgtggtccgtcttgttcttgcgctctatggatgtgattgcggagcagcgcaggacacacataaccatggccctgagctggatgaccatcgtcgtgccccttcttacatttgagattctgctggttcacaaactggatggccacaacgccttctcctgcatcccgatctttgtccccctttggctctcgttgatcacgctgatggcaaccacatttggacagaagggaggaaaccactggtggtttggtatccgcaaagatttctgtcagtttctgcttgaaatcttcccatttctacgagaatatggaaacatttcctatgatctccatcacgaagataatgaagaaaccgaagagaccccagttccggagccccctaaaatcgcacccatgtttcgaaagaaggccagggtggtcattacccagagccctgggaagtatgtgctcccacctcccaaattaaatatcgaaatgccagattagatgccacttccggggacagagcttaagtggactgggacgcactctctccgccttcctctgccccctcgttcaccccgcagaccagaaccagtactggagctgggtctccaggtacgtccatctcatgccttgtttgcatccagcgcctatcagccactcaccacgacgggacgcggaagtggcaggtgacgggggtgtgtgccagcagatgcggatgccaggaagagtgtgagaacaggggtgggattaccgtctgtctgggaggggctccaggtacccctcttccccgtcagacccactgggagatggctgcttgccaggcccccagaaggaacatctgtctatacggtgctgaaatcccaatcaaaagtattgtttagaaatgtatttctccacagggctgacctcctgcagctcgctgagcactcccaggtcctcagcactcccaggtcgtggctggggcagtcagtaggaactgtaactatgtctctgatgcaccacgtgtttagacacagcacagtccttttttctgttcctactgtggaagtagtttctctttgggcatgctgacagcagtttttcatagcctcacggatgagccctttctacgggagtgactccatgcttgtatacagagtatttatacaaatgttttagcatcttcatatgcggtgttaacccctagttctgtacagcatattctgttcaagtatttttttacaagcttgtgctgtaggcacatgccttctgccctggaactcgtgcaggtacgtagtagctgctactgccacaacggcaacaccaagcaagagatggtccatgcttttctgacgttctcagaatagtggctagcttcaaacctgacaagcgctgcttgaagccggaacactagagaatgttgctgagagcagaaacggccacgcgggtcacgactatgcgtgggaaagtctcaagcttccctcctgccagcaacaagaaggctttggagtaggcatgatgttttcacgtgtgcgtgccgtttctccaagcactgcaggttccaccgtgtgtcagaggctgcaagtttaacatcctcctgcctgaaaacaaataggtcctttgctgaaaagagggtaaaaaaagagctttgatcttctcagccaggagaagagggtggtgttttcacgcgggcaactgctcgccggcctacatggggttaattcaagtctgctgcgagcacgactccgcccttggcactggcctccagcaagccctgttctctttggggtacaggggaacgggatggtttagactttcctgctcagtgtgtaaaaaatgtagctaaagccactatttttgctctccttaagctgttcaataaaccggttcctcattttaaaaaaaaa

SEQ ID NO: 326683 - DNA, 2026 bp, Homo sapiens
gacagacacagcaaggtgctaaagatgccttccatcagaggccaggttggaagctctaaagagacttctcttgctgttctctcacccacccccaggttgtgtgtgtcccgctgtggattctcatgtcctttctgtgcctggtggtcctctactacattgtgtggtccgtcttgttcttgcgctctatggatgtgattgcggagcagcgcaggacacacataaccatggccctgagctggatgaccatcgtcgtgccccttcttacatttgagattctgctggttcacaaactggatggccacaacgccttctcctgcatcccgatctttgtccccctttggctctcgttgatcacgctgatggcaaccacatttggacagaagggaggaaaccactggtggtttggtatccgcaaagatttctgtcagtttctgcttgaaatcttcccatttctacgagaatatggaaacatttcctatgatctccatcacgaagataatgaagaaaccgaagagaccccagttccggagccccctaaaatcgcacccatgtttcgaaagaaggccagggtggtcattacccagagccctgggaagtatgtgctcccacctcccaaattaaatatcgaaatgccagattagatgccacttccggggacagagcttaagtggactgggacgcactctctccgccttcctctgccccctcgttcaccccgcagaccagaaccagtactggagctgggtctccaggtacgtccatctcatgccttgtttgcatccagcgcctatcagccactcaccacgacgggacgcggaagtggcaggtgacgggggtgtgtgccagcagatgcggatgccaggaagagtgtgagaacaggggtgggattaccgtctgtctgggaggggctccaggtacccctcttccccgtcagacccactgggagatggctgcttgccaggcccccagaaggaacatctgtctatacggtgctgaaatcccaatcaaaagtattgtttagaaatgtatttctccacagggctgacctcctgcagctcgctgagcactcccaggtcctcagcactcccaggtcgtggctggggcagtcagtaggaactgtaactatgtctctgatgcaccacgtgtttagacacagcacagtccttttttctgttcctactgtggaagtagtttctctttgggcatgctgacagcagtttttcatagcctcacggatgagccctttctacgggagtgactccatgcttgtatacagagtatttatacaaatgttttagcatcttcatatgcggtgttaacccctagttctgtacagcatattctgttcaagtatttttttacaagcttgtgctgtaggcacatgccttctgccctggaactcgtgcaggtacgtagtagctgctactgccacaacggcaacaccaagcaagagatggtccatgcttttctgacgttctcagaatagtggctagcttcaaacctgacaagcgctgcttgaagccggaacactagagaatgttgctgagagcagaaacggccacgcgggtcacgactatgcgtgggaaagtctcaagcttccctcctgccagcaacaagaaggctttggagtaggcatgatgttttcacgtgtgcgtgccgtttctccaagcactgcaggttccaccgtgtgtcagaggctgcaagtttaacatcctcctgcctgaaaacaaataggtcctttgctgaaaagagggtaaaaaaagagctttgatcttctcagccaggagaagagggtggtgttttcacgcgggcaactgctcgccggcctacatggggttaattcaagtctgctgcgagcacgactccgcccttggcactggcctccagcaagccctgttctctttggggtacaggggaacgggatggtttagactttcctgctcagtgtgtaaaaaatgtagctaaagccactatttttgctctccttaagctgttcaataaaccggttcctcattttaaaaaaaaa

SEQ ID NO: 326684 - DNA, 956 bp, Homo sapiens
cggcggcggcggcggcgacggcgacggcgacggcagcggggacggcagcagtagcgggagcagcagcgtggacgcggctggcgctggcgccatgaacccgctgtaaggcgcaggctgtgcagcacggggtgcgggggaggaggaggaggacgccgcggtgaagttctccgccatgaacctgaggggcctcttccaggacttcaacccgagtaaattcctcatctatgcctgtctgctgctgttctctgtgctgctggcccttcgtttggatggcatcatacagtggagttactgggctgtctttgctccaatatggctgtggaagttaatggtcattgttggagcctcagttggaactggagtctgggcacgaaatcctcaatatcgagcagaaggagaaacgtgtgtggagtttaaagccatgttgattgcagtgggcatccacttgctcttgttgatgtttgaagttctggtctgtgacagaatcgagagaggaagccatttctggctcctggtcttcatgccgctgttctttgtttccccggtgtctgttgcagcttgcgtttggggctttcgacatgacaggtcactagagttagaaatcctgtgttctgtcaacattctccagtttatattcattgccttaagactggacaagatcatccactggccctggcttgtatgtaacttttaaaatccttaaataaacttcttttttattataaaagtaattcatattcactgtacaaagcttggaaaagacggacaagcagaagtaatagcctaatagtcacccataatcccaccatggggagataacatggttagtgtttttatgtctgtgttttatacaaacagtttggatataactgtgtgcaccattttgtatcctgatttttttgttttaatgttgtatcataaacattttatcatgttaataaaaggtctttataaac

SEQ ID NO: 326685 - DNA, 2690 bp, Homo sapiens
cggcggcggcggcggcgacggcgacggcgacggcagcggggacggcagcagtagcgggagcagcagcgtggacgcggctggcgctggcgccatgaacccgctgtaaggcgcaggctgtgcagcacggggtgcgggggaggaggaggaggacgccgcggtgaagttctccgccatgaacctgaggggcctcttccaggacttcaacccgagtaaattcctcatctatgcctgtctgctgctgttctctgtgctgctggcccttcgtttggatggcatcatacagtggagttactgggctgtctttgctccaatatggctgtggaagttaatggtcattgttggagcctcagttggaactggagtctgggcacgaaatcctcaatatcgagcagaaggagaaacgtgtgtggagtttaaagccatgttgattgcagtgggcatccacttgctcttgttgatgtttgaagttctggtctgtgacagaatcgagagaggaagccatttctggctcctggtcttcatgccgctgttctttgtttccccggtgtctgttgcagcttgcgtttggggctttcgacatgacaggtcactagagttagaaatcctgtgttctgtcaacattctccagtttatattcattgccttaagactggacaagatcatccactggccctggcttgttgtgtgtgtcccgctgtggattctcatgtcctttctgtgcctggtggtcctctactacattgtgtggtccgtcttgttcttgcgctctatggatgtgattgcggagcagcgcaggacacacataaccatggccctgagctggatgaccatcgtcgtgccccttcttacatttgagattctgctggttcacaaactggatggccacaacgccttctcctgcatcccgatctttgtccccctttggctctcgttgatcacgctgatggcaaccacatttggacagaagggaggaaaccactggtggtttggtatccgcaaagatttctgtcagtttctgcttgaaatcttcccatttctacgagaatatggaaacatttcctatgatctccatcacgaagataatgaagaaaccgaagagaccccagttccggagccccctaaaatcgcacccatgtttcgaaagaaggccagggtggtcattacccagagccctgggaagtatgtgctcccacctcccaaattaaatatcgaaatgccagattagatgccacttccggggacagagcttaagtggactgggacgcactctctccgccttcctctgccccctcgttcaccccgcagaccagaaccagtactggagctgggtctccaggtacgtccatctcatgccttgtttgcatccagcgcctatcagccactcaccacgacgggacgcggaagtggcaggtgacgggggtgtgtgccagcagatgcggatgccaggaagagtgtgagaacaggggtgggattaccgtctgtctgggaggggctccaggtacccctcttccccgtcagacccactgggagatggctgcttgccaggcccccagaaggaacatctgtctatacggtgctgaaatcccaatcaaaagtattgtttagaaatgtatttctccacagggctgacctcctgcagctcgctgagcactcccaggtcctcagcactcccaggtcgtggctggggcagtcagtaggaactgtaactatgtctctgatgcaccacgtgtttagacacagcacagtccttttttctgttcctactgtggaagtagtttctctttgggcatgctgacagcagtttttcatagcctcacggatgagccctttctacgggagtgactccatgcttgtatacagagtatttatacaaatgttttagcatcttcatatgcggtgttaacccctagttctgtacagcatattctgttcaagtatttttttacaagcttgtgctgtaggcacatgccttctgctgcagaagtggacgcccgtggcacactccccccccccccccgtggggtgccacgccttcatgggacattgccacttctgccctggaactcgtgcaggtacgtagtagctgctactgccacaacggcaacaccaagcaagagatggtccatgcttttctgacgttctcagaatagtggctagcttcaaacctgacaagcgctgcttgaagccggaacactagagaatgttgctgagagcagaaacggccacgcgggtcacgactatgcgtgggaaagtctcaagcttccctcctgccagcaacaagaaggctttggagtaggcatgatgttttcacgtgtgcgtgccgtttctccaagcactgcaggttccaccgtgtgtcagaggctgcaagtttaacatcctcctgcctgaaaacaaataggtcctttgctgaaaagagggtaaaaaaagagctttgatcttctcagccaggagaagagggtggtgttttcacgcgggcaactgctcgccggcctacatggggttaattcaagtctgctgcgagcacgactccgcccttggcactggcctccagcaagccctgttctctttggggtacaggggaacgggatggtttagactttcctgctcagtgtgtaaaaaatgtagctaaagccactatttttgctctccttaagctgttcaataaaccggttcctcattttaaaaaaaaa

SEQ ID NO: 326686 - DNA, 3090 bp, Homo sapiens
gcaaggggcagggcagagcctctgagcttaagttagttttgtttccctgtcccggatacaagagttggtaagctcgctgcagtgggtggagagaggcctctagacttcagtttcagtttcctggctctgggcagcagcaagaattcctctgcctcccatcctaccattcactgtcttgccggcagccagctgagagcaatgggaaatggggagtcccagctgtcctcggtgcctgctcagaagctgggttggtttatccaggaatacctgaagccctacgaagaatgtcagacactgatcgacgagatggtgaacaccatctgtgacgtcctgcaggaacccgaacagttccccctggtgcagggagtggccataggtggctcctatggacggaaaacagtcttaagaggcaactccgatggtacccttgtcctcttcttcagtgacttaaaacaattccaggatcagaagagaagccaacgtgacatcctcgataaaactggggataagctgaagttctgtctgttcacgaagtggttgaaaaacaatttcgagatccagaagtcccttgatgggttcaccatccaggtgttcacaaaaaatcagagaatctctttcgaggtgctggccgccttcaacgctctgagcttaaatgataatcccagcccctggatctatcgagagctcaaaagatccttggataagacaaatgccagtcctggtgagtttgcagtctgcttcactgaactccagcagaagttttttgacaaccgtcctggaaaactaaaggatttgatcctcttgataaagcactggcatcaacagtgccagaaaaaaatcaaggatttaccctcgctgtctccgtatgccctggagctgcttacggtgtatgcctgggaacaggggtgcagaaaagacaactttgacattgctgaaggcgtcagaacggttctggagctgatcaaatgccaggagaagctgtgtatctattggatggtcaactacaactttgaagatgagaccatcaggaacatcctgctgcaccagctccaatcagcgaggccagtaatcttggatccagttgacccaaccaataatgtgagtggagataaaatatgctggcaatggctgaaaaaagaagctcaaacctggttgacttctcccaacctggataatgagttacctgcaccatcttggaatgtcctgcctgcaccactcttcacgaccccaggccaccttctggataagttcatcaaggagtttctccagcccaacaaatgcttcctagagcagattgacagtgctgttaacatcatccgtacattccttaaagaaaactgcttccgacaatcaacagccaagatccagattgtccggggaggatcaaccgccaaaggcacagctctgaagactggctctgatgccgatctcgtcgtgttccataactcacttaaaagctacacctcccaaaaaaacgagcggcacaaaatcgtcaaggaaatccatgaacagctgaaagccttttggagggagaaggaggaggagcttgaagtcagctttgagcctcccaagtggaaggctcccagggtgctgagcttctctctgaaatccaaagtcctcaacgaaagtgtcagctttgatgtgcttcctgcctttaatgcactgggtcagctgagttctggctccacacccagccccgaggtttatgcagggctcattgatctgtataaatcctcggacctcccgggaggagagttttctacctgtttcacagtcctgcagcgaaacttcattcgctcccggcccaccaaactaaaggatttaattcgcctggtgaagcactggtacaaagagtgtgaaaggaaactgaagccaaaggggtctttgcccccaaagtatgccttggagctgctcaccatctatgcctgggagcaggggagtggagtgccggattttgacactgcagaaggtttccggacagtcctggagctggtcacacaatatcagcagctctgcatcttctggaaggtcaattacaactttgaagatgagaccgtgaggaagtttctactgagccagttgcagaaaaccaggcctgtgatcttggacccagccgaacccacaggtgacgtgggtggaggggaccgttggtgttggcatcttctggcaaaagaagcaaaggaatggttatcctctccctgcttcaaggatgggactggaaacccaataccaccttggaaagtgccgacaatgcagacaccaggaagttgtggagctaggatccatcctattgtcaatgagatgttctcatccagaagccatagaatcctgaataataattctaaaagaaacttctggagatcatctggcaatcgcttttaaagactcggctcaccgtgagaaagagtcactcacatccattcttcccttgatggtccctattcctccttcccttgcttcttggacttcttgaaatcaatcaagactgcaaaccctttcataaagtcttgccttgctgaactccctctctgcaggcagcctgcctttaaaaatagttgctgtcatccactttatgtgcatcttatttctgtcaacttgtattttttttcttgtatttttccaattagctcctcctttttccttccagtctaaaaaaggaatcctctgtgtcttcaaagcaaagctctttactttccccttggttctcataactctgtgatcttgctctcggtgcttccaactcatccacgtcctgtctgtttcctctgtatacaaaaccctttctgcccctgctgacacagacatcctctatgccagcagccagccaaccctttcattagaacttcaagctctccaaaggctcagattataactgttgtcatatttatatgaggctgttgtcttttccttctgagcctgcctttctccccccacccaggagtatcctcttgccaaatcaaaagactttttccttgggctttagccttaaagatacttgaaggtctaggtgctttaacctcacataccctcacttaaacttttatcactgttgcatataccagttgtgatacaataaagaatgtatctgga

SEQ ID NO: 326687 - DNA, 4737 bp, Homo sapiens
gcaaggggcagggcagagcctctgagcttaagttagttttgtttccctgtcccggatacaagagttggtaagctcgctgcagtgggtggagagaggcctctagacttcagtttcagtttcctggctctgggcagcagcaagaattcctctgcctcccatcctaccattcactgtcttgccggcagccagctgagagcaatgggaaatggggagtcccagctgtcctcggtgcctgctcagaagctgggttggtttatccaggaatacctgaagccctacgaagaatgtcagacactgatcgacgagatggtgaacaccatctgtgacgtcctgcaggaacccgaacagttccccctggtgcagggagtggccataggtggctcctatggacggaaaacagtcttaagaggcaactccgatggtacccttgtcctcttcttcagtgacttaaaacaattccaggatcagaagagaagccaacgtgacatcctcgataaaactggggataagctgaagttctgtctgttcacgaagtggttgaaaaacaatttcgagatccagaagtcccttgatgggttcaccatccaggtgttcacaaaaaatcagagaatctctttcgaggtgctggccgccttcaacgctctgagcttaaatgataatcccagcccctggatctatcgagagctcaaaagatccttggataagacaaatgccagtcctggtgagtttgcagtctgcttcactgaactccagcagaagttttttgacaaccgtcctggaaaactaaaggatttgatcctcttgataaagcactggcatcaacagtgccagaaaaaaatcaaggatttaccctcgctgtctccgtatgccctggagctgcttacggtgtatgcctgggaacaggggtgcagaaaagacaactttgacattgctgaaggcgtcagaacggttctggagctgatcaaatgccaggagaagctgtgtatctattggatggtcaactacaactttgaagatgagaccatcaggaacatcctgctgcaccagctccaatcagcgaggccagtaatcttggatccagttgacccaaccaataatgtgagtggagataaaatatgctggcaatggctgaaaaaagaagctcaaacctggttgacttctcccaacctggataatgagttacctgcaccatcttggaatgtcctgcctgcaccactcttcacgaccccaggccaccttctggataagttcatcaaggagtttctccagcccaacaaatgcttcctagagcagattgacagtgctgttaacatcatccgtacattccttaaagaaaactgcttccgacaatcaacagccaagatccagattgtccggggaggatcaaccgccaaaggcacagctctgaagactggctctgatgccgatctcgtcgtgttccataactcacttaaaagctacacctcccaaaaaaacgagcggcacaaaatcgtcaaggaaatccatgaacagctgaaagccttttggagggagaaggaggaggagcttgaagtcagctttgagcctcccaagtggaaggctcccagggtgctgagcttctctctgaaatccaaagtcctcaacgaaagtgtcagctttgatgtgcttcctgcctttaatgcactgggtcagctgagttctggctccacacccagccccgaggtttatgcagggctcattgatctgtataaatcctcggacctcccgggaggagagttttctacctgtttcacagtcctgcagcgaaacttcattcgctcccggcccaccaaactaaaggatttaattcgcctggtgaagcactggtacaaagagtgtgaaaggaaactgaagccaaaggggtctttgcccccaaagtatgccttggagctgctcaccatctatgcctgggagcaggggagtggagtgccggattttgacactgcagaaggtttccggacagtcctggagctggtcacacaatatcagcagctctgcatcttctggaaggtcaattacaactttgaagatgagaccgtgaggaagtttctactgagccagttgcagaaaaccaggcctgtgatcttggacccagccgaacccacaggtgacgtgggtggaggggaccgttggtgttggcatcttctggcaaaagaagcaaaggaatggttatcctctccctgcttcaaggatgggactggaaacccaataccaccttggaaagtgccggtaaaagtcatctaaaggaggcgttgtctggaaatagccctgtaacaggcttgaatcaaagaacttctcctactgtagcaacctgaaattaactcagacacaaataaaggaaacccagctcacaggagcttaaacagctggtcagcccccctaagcccccactacaagtgatcctcaggcaggtaaccccagattcatgcactgtagggtgctgcgcagcatccctagtctctacccagtagatgccactagccctcctctcccagtgacaaccaaaagtcttcagacattgtcaaacgttcccctgggttcacagatctttctgcctttggcttttggctccaccctctttagctgttaatttgagtacttatggccctgaaagcggccacggtgcctccagatggcaggtttgcaatccaagcaggaagaaggaaaagatacccaaaggtcaagaacacagtgattttattagaagtttcatccgcaaattttcttccatttcattgctcagaaatgtcatgtggttacctgtaacttgaaggtggctacaaagatgactgtggacgtgggttgcactggccacccaaggatgtctgccacacctctccaaagccctccctacctaccaagatatacctgatatattccaccaggatatcctccctccagatatacttggttctctccaccaggttctttctttaaagcaggatttctcaactttgatacttactcacatttggggctagacagttctttgtttggaggctctcttgtgcattgtaggatgttgagcagcatctctggcctgtacccagtagatgccacccagttgtgacaattaaaagtgtcttgagactttatcatgtgtcttctgccctaggtgagaacccttgcactagaggaaccctacaccccaaccctggggggaatgtagggaagaggtggccaagccaaccgtggggttagctctaattattaagatatgcattataaataaataccaaaaaattgtctctggcaatagttaccttcccagatacaggtccccccttttttcccctaactcttttaagcaatgattgtaactattaggagacattgctctcccacgtatgtttttctttttagacaatgcagacaccaggaagttgtggagctaggatccatcctattgtcaatgagatgttctcatccagaagccatagaatcctgaataataattctaaaagaaacttctggagatcatctggcaatcgcttttaaagactcggctcaccgtgagaaagagtcactcacatccattcttcccttgatggtccctattcctccttcccttgcttcttggacttcttgaaatcaatcaagactgcaaaccctttcataaagtcttgccttgctgaactccctctctgcaggcagcctgcctttaaaaatagttgctgtcatccactttatgtgcatcttatttctgtcaacttgtattttttttcttgtatttttccaattagctcctcctttttccttccagtctaaaaaaggaatcctctgtgtcttcaaagcaaagctctttactttccccttggttctcataactctgtgatcttgctctcggtgcttccaactcatccacgtcctgtctgtttcctctgtatacaaaaccctttctgcccctgctgacacagacatcctctatgccagcagccagccaaccctttcattagaacttcaagctctccaaaggctcagattataactgttgtcatatttatatgaggctgttgtcttttccttctgagcctgcctttctccccccacccaggagtatcctcttgccaaatcaaaagactttttccttgggctttagccttaaagatacttgaaggtctaggtgctttaacctcacataccctcacttaaacttttatcactgttgcatataccagttgtgatacaataaagaatgtatctggattttgtgcctagttcctagcacacagcttcaaaaattctagagtttcctgataggagtgtcttttgtattcataacaagcccttttcacccatccctgggtttatgctaacaaggttacccatggtgggcccttagtttcaaggaaggagttggccaagccagaaagaccaagcatgtggttaaagcattggaattttcagccccatcccacccccaatctccaaggaggtgatggggctggaaattgagttcaattttaacatggccagtgatttaagcaatgctgcctatgtaaagaaaccccaataaaaactctggacagtgaggcttggggagcttcctgattggcagacattccaatgtactaggaaggtagcgcatcttgattccacagggacaaaggctcctgagctctgggcccttccagtgcttgccaccctacatactctttgtctggctcttcatttgtattctttataataaaatggtgattgtaagtagaaaaaaaaaaa

SEQ ID NO: 326688 - DNA, 4532 bp, Homo sapiens
gcaaggggcagggcagagcctctgagcttaagttagttttgtttccctgtcccggatacaagagttggtaagctcgctgcagtgggtggagagaggcctctagacttcagtttcagtttcctggctctgggcagcagcaagaattcctctgcctcccatcctaccattcactgtcttgccggcagccagctgagagcaatgggaaatggggagtcccagctgtcctcggtgcctgctcagaagctgggttggtttatccaggaatacctgaagccctacgaagaatgtcagacactgatcgacgagatggtgaacaccatctgtgacgtcctgcaggaacccgaacagttccccctggtgcagggagtggccataggtggctcctatggacggaaaacagtcttaagaggcaactccgatggtacccttgtcctcttcttcagtgacttaaaacaattccaggatcagaagagaagccaacgtgacatcctcgataaaactggggataagctgaagttctgtctgttcacgaagtggttgaaaaacaatttcgagatccagaagtcccttgatgggttcaccatccaggtgttcacaaaaaatcagagaatctctttcgaggtgctggccgccttcaacgctctgagcttaaatgataatcccagcccctggatctatcgagagctcaaaagatccttggataagacaaatgccagtcctggtgagtttgcagtctgcttcactgaactccagcagaagttttttgacaaccgtcctggaaaactaaaggatttgatcctcttgataaagcactggcatcaacagtgccagaaaaaaatcaaggatttaccctcgctgtctccgtatgccctggagctgcttacggtgtatgcctgggaacaggggtgcagaaaagacaactttgacattgctgaaggcgtcagaacggttctggagctgatcaaatgccaggagaagctgtgtatctattggatggtcaactacaactttgaagatgagaccatcaggaacatcctgctgcaccagctccaatcagcgaggccagtaatcttggatccagttgacccaaccaataatgtgagtggagataaaatatgctggcaatggctgaaaaaagaagctcaaacctggttgacttctcccaacctggataatgagttacctgcaccatcttggaatgtcctgcctgcaccactcttcacgaccccaggccaccttctggataagttcatcaaggagtttctccagcccaacaaatgcttcctagagcagattgacagtgctgttaacatcatccgtacattccttaaagaaaactgcttccgacaatcaacagccaagatccagattgtccggggaggatcaaccgccaaaggcacagctctgaagactggctctgatgccgatctcgtcgtgttccataactcacttaaaagctacacctcccaaaaaaacgagcggcacaaaatcgtcaaggaaatccatgaacagctgaaagccttttggagggagaaggaggaggagcttgaagtcagctttgagcctcccaagtggaaggctcccagggtgctgagcttctctctgaaatccaaagtcctcaacgaaagtgtcagctttgatgtgcttcctgcctttaatgcactgggtcagctgagttctggctccacacccagccccgaggtttatgcagggctcattgatctgtataaatcctcggacctcccgggaggagagttttctacctgtttcacagtcctgcagcgaaacttcattcgctcccggcccaccaaactaaaggatttaattcgcctggtgaagcactggtacaaagagtgtgaaaggaaactgaagccaaaggggtctttgcccccaaagtatgccttggagctgctcaccatctatgcctgggagcaggggagtggagtgccggattttgacactgcagaaggtttccggacagtcctggagctggtcacacaatatcagcagctctgcatcttctggaaggtcaattacaactttgaagatgagaccgtgaggaagtttctactgagccagttgcagaaaaccaggcctgtgatcttggacccagccgaacccacaggtgacgtgggtggaggggaccgttggtgttggcatcttctggcaaaagaagcaaaggaatggttatcctctccctgcttcaaggatgggactggaaacccaataccaccttggaaagtgccggtaaaagtcatctaaaggaggcgttgtctggaaatagccctgtaacaggcttgaatcaaagaacttctcctactgtagcaacctgaaattaactcagacacaaataaaggaaacccagctcacaggagcttaaacagctggtcagcccccctaagcccccactacaagtgatcctcaggcaggtaaccccagattcatgcactgtagggtgctgcgcagcatccctagtctctacccagtagatgccactagccctcctctcccagtgacaaccaaaagtcttcagacattgtcaaacgttcccctgggttcacagatctttctgcctgtaacttgaaggtggctacaaagatgactgtggacgtgggttgcactggccacccaaggatgtctgccacacctctccaaagccctccctacctaccaagatatacctgatatattccaccaggatatcctccctccagatatacttggttctctccaccaggttctttctttaaagcaggatttctcaactttgatacttactcacatttggggctagacagttctttgtttggaggctctcttgtgcattgtaggatgttgagcagcatctctggcctgtacccagtagatgccacccagttgtgacaattaaaagtgtcttgagactttatcatgtgtcttctgccctaggtgagaacccttgcactagaggaaccctacaccccaaccctggggggaatgtagggaagaggtggccaagccaaccgtggggttagctctaattattaagatatgcattataaataaataccaaaaaattgtctctggcaatagttaccttcccagatacaggtccccccttttttcccctaactcttttaagcaatgattgtaactattaggagacattgctctcccacgtatgtttttctttttagacaatgcagacaccaggaagttgtggagctaggatccatcctattgtcaatgagatgttctcatccagaagccatagaatcctgaataataattctaaaagaaacttctggagatcatctggcaatcgcttttaaagactcggctcaccgtgagaaagagtcactcacatccattcttcccttgatggtccctattcctccttcccttgcttcttggacttcttgaaatcaatcaagactgcaaaccctttcataaagtcttgccttgctgaactccctctctgcaggcagcctgcctttaaaaatagttgctgtcatccactttatgtgcatcttatttctgtcaacttgtattttttttcttgtatttttccaattagctcctcctttttccttccagtctaaaaaaggaatcctctgtgtcttcaaagcaaagctctttactttccccttggttctcataactctgtgatcttgctctcggtgcttccaactcatccacgtcctgtctgtttcctctgtatacaaaaccctttctgcccctgctgacacagacatcctctatgccagcagccagccaaccctttcattagaacttcaagctctccaaaggctcagattataactgttgtcatatttatatgaggctgttgtcttttccttctgagcctgcctttctccccccacccaggagtatcctcttgccaaatcaaaagactttttccttgggctttagccttaaagatacttgaaggtctaggtgctttaacctcacataccctcacttaaacttttatcactgttgcatataccagttgtgatacaataaagaatgtatctggattttgtgcctagttcctagcacacagcttcaaaaattctagagtttcctgataggagtgtcttttgtattcataacaagcccttttcacccatccctgggtttatgctaacaaggttacccatggtgggcccttagtttcaaggaaggagttggccaagccagaaagaccaagcatgtggttaaagcattggaattttcagccccatcccacccccaatctccaaggaggtgatggggctggaaattgagttcaattttaacatggccagtgatttaagcaatgctgcctatgtaaagaaaccccaataaaaactctggacagtgaggcttggggagcttcctgattggcagacattccaatgtactaggaaggtagcgcatcttgattccacagggacaaaggctcctgagctctgggcccttccagtgcttgccaccctacatactctttgtctggctcttcatttgtattctttataataaaatggtgattgtaagtagaaaaaaaaaaa

SEQ ID NO: 326689 - DNA, 2232 bp, Homo sapiens
gcaaggggcagggcagagcctctgagcttaagttagttttgtttccctgtcccggatacaagagttggtaagctcgctgcagtgggtggagagaggcctctagacttcagtttcagtttcctggctctgggcagcagcaagaattcctctgcctcccatcctaccattcactgtcttgccggcagccagctgagagcaatgggaaatggggagtcccagctgtcctcggtgcctgctcagaagctgggttggtttatccaggaatacctgaagccctacgaagaatgtcagacactgatcgacgagatggtgaacaccatctgtgacgtcctgcaggaacccgaacagttccccctggtgcagggagtggccataggtggctcctatggacggaaaacagtcttaagaggcaactccgatggtacccttgtcctcttcttcagtgacttaaaacaattccaggatcagaagagaagccaacgtgacatcctcgataaaactggggataagctgaagttctgtctgttcacgaagtggttgaaaaacaatttcgagatccagaagtcccttgatgggttcaccatccaggtgttcacaaaaaatcagagaatctctttcgaggtgctggccgccttcaacgctctgagtaagcattgctgggtgtcaggagagaaaagccaaagaagggggtgccagacagctctgtgcaacctctaggccatgagtgggatagataccactgctgctttaaaaaatgggagaccatagaccctcaggagagaagaatcccttctaccctggactcgctctcttctctggaactaacttctcccccataccctgattgtctttggagaaaatgttctggattctagaatctaaggcagagccttttaagccatactgtacacataaatcacctggaaccttgttaaaatgcagatcctgactcaggaggtctgagttagagcccaggatttcatatttctagccagctccatgatgagctgctggtccgcagatcacgcttgcaggttttgaccagagtcagtgttggttagagtaagaggatgaggcagacatctgggaaaagtccagctggggcaagcatttgaagtctgccttcctaccaggtcaaaatcaaggcaacgaccttccatagataactatcaaagcttgagggggtgccttgaacccaactcctaaatccccaagacctgcccacctcttgtgtctcctgtctcagcaaacattcccacactcttgcatattgttaaagtaacctctgcttaccaggcttctggtttaataaaagatggctagagtgactccatcttaaagcaagtagctaggcactcaaaaggaacctacaggcttaatacttgggtctgaaaatagccacagtctaagctgaccaccaattataattgcagaatatttaaggccatacaaaacatctcccactaagcctacaaaatgtccaggtgtcctaaaagttcagcccacttaaaggcacattaatgagcaggtttaggttgaaggattaatggtcatcaataccactgttaagaagaaaattcttggccaaattgaatttaatggagtttaactgagcagacaattcacaaatctagaagcctcctgagccagagtaggttcagagagtcttgaacacagccacgtggtggaagaagatttatggacaggaaaaggaaaatgatgtactgaaaatgaaagtgaggtacagaaacagccagactggttatagctcagcattggccttatttgaacgagatttgaacagttggccacctttgattggccgaaactcagtgattggcacaagagtaggttgcagtctgtttacacatccttttaggttatagttcaccatgtacagagaaattttaggccaaacttaaaatatgtaaggaggcagctttaggctaaacttgatttaacagcaccaataccccctacctttagtgagcacatctgcacattccaattttaatgacagctccttagaatttcttatcaacgaagacactaacaaagaatggcgcattcctccttctcctttctgaggatgccctaccctgtaacaaagtcgtttctaataaatttgcttctttcaccatactctgtacctgccttgaattctttcctgcatgagatccaagaaccctctcttgggatctgaatcaggaccctcttttccagcaacgctat

SEQ ID NO: 326690 - DNA, 310 bp, Homo sapiens
cccatcagttgttcatgtataaaaggcaggagaataattgccttgggaactgtattgtttaataactgcattatctattagtttgtaaaagaaaaccctttgctttggactcagccctcactgaaccctaacgcagaacttggccttggaaacagtgtcagttagcccaactggtgccagcccacgggggcacgggactcctcggttaaggaaattctggatctcaaccttcctttcttccttagggaggatcaaccgccaaaggcacagctctgaagactggctctgatgccgatctcgtcgtgttcca

SEQ ID NO: 326691 - DNA, 2139 bp, Homo sapiens
gcaaggggcagggcagagcctctgagcttaagttagttttgtttccctgtcccggatacaagagttggtaagctcgctgcagtgggtggagagaggcctctagacttcagtttcagtttcctggctctgggcagcagcaagaattcctctgcctcccatcctaccattcactgtcttgccggcagccagctgagagcaatgggaaatggggagtcccagctgtcctcggtgcctgctcagaagctgggttggtttatccaggaatacctgaagccctacgaagaatgtcagacactgatcgacgagatggtgaacaccatctgtgacgtcctgcaggaacccgaacagttccccctggtgcagggagtggccataggtggctcctatggacggaaaacagtcttaagaggcaactccgatggtacccttgtcctcttcttcagtgacttaaaacaattccaggatcagaagagaagccaacgtgacatcctcgataaaactggggataagctgaagttctgtctgttcacgaagtggttgaaaaacaatttcgagatccagaagtcccttgatgggttcaccatccaggtgttcacaaaaaatcagagaatctctttcgaggtgctggccgccttcaacgctctgagtaagcattgctgggtgtcaggagagaaaagccaaagaagggggtgccagacagctctgtgcaacctctaggccatgagtgggatagataccactgctgctttaaaaaatgggagaccatagaccctcaggagagaagaatcccttctaccctggactcgctctcttctctggaactaacttctcccccataccctgattgtctttggagaaaatgttctggattctagaatctaaggcagagccttttaagccatactgtacacataaatcacctggaaccttgttaaaatgcagatcctgactcaggaggtctgagttagagcccaggatttcatatttctagccagctccatgatgagctgctggtccgcagatcacgcttgcaggttttgaccagagtcagtgttggttagagtaagaggatgaggcagacatctgggaaaagtccagctggggcaagcatttgaagtctgccttcctaccaggtcaaaatcaaggcaacgaccttccatagataactatcaaagcttgagggggtgccttgaacccaactcctaaatccccaagacctgcccacctcttgtgtctcctgtctcagcaaacattcccacactcttgcatattgttaaagtaacctctgcttaccaggcttctggtttaataaaagatggctagagtgactccatcttaaagcaagtagctaggcactcaaaaggaacctacaggcttaatacttgggtctgaaaatagccacagtctaagctgaccaccaattataattgcagaatatttaaggccatacaaaacatctcccactaagcctacaaaatgtccaggtgtcctaaaagttcagcccacttaaaggcacattaatgagcaggtttaggttgaaggattaatggtcatcaataccactgttaagaagaaaattcttggccaaattgaatttaatggagtttaactgagcagacaattcacaaatctagaagcctcctgagccagagtaggttcagagagtcttgaacacagccacgtggtggaagaagatttatggacaggaaaaggaaaatgatgtactgaaaatgaaagtgaggtacagaaacagccagactggttatagctcagcattggccttatttgaacgagatttgaacagttggccacctttgattggccgaaactcagtgattggcacaagagtaggttgcagtctgtttacacatccttttaggttatagttcaccatgtacagagaaattttaggccaaacttaaaatatgtaaggaggcagctttaggctaaacttgatttaacagcaccaataccccctacctttagtgagcacatctgcacattccaattttaatgacagctccttagaatttcttatcaacgaagacactaacaaagaatggcgcattcctccttctcctttctgaggatgccctaccctgtaacaaagtcgtttctaataaatttgcttctttcacc

SEQ ID NO: 326692 - DNA, 4224 bp, Homo sapiens
gcaaggggcagggcagagcctctgagcttaagttagttttgtttccctgtcccggatacaagagttggtaagctcgctgcagtgggtggagagaggcctctagacttcagtttcagtttcctggctctgggcagcagcaagaattcctctgcctcccatcctaccattcactgtcttgccggcagccagctgagagcaatgggaaatggggagtcccagctgtcctcggtgcctgctcagaagctgggttggtttatccaggaatacctgaagccctacgaagaatgtcagacactgatcgacgagatggtgaacaccatctgtgacgtcctgcaggaacccgaacagttccccctggtgcagggagtggccataggtggctcctatggacggaaaacagtcttaagaggcaactccgatggtacccttgtcctcttcttcagtgacttaaaacaattccaggatcagaagagaagccaacgtgacatcctcgataaaactggggataagctgaagttctgtctgttcacgaagtggttgaaaaacaatttcgagatccagaagtcccttgatgggttcaccatccaggtgttcacaaaaaatcagagaatctctttcgaggtgctggccgccttcaacgctctgagcttaaatgataatcccagcccctggatctatcgagagctcaaaagatccttggataagacaaatgccagtcctggtgagtttgcagtctgcttcactgaactccagcagaagttttttgacaaccgtcctggaaaactaaaggatttgatcctcttgataaagcactggcatcaacagtgccagaaaaaaatcaaggatttaccctcgctgtctccgtatgccctggagctgcttacggtgtatgcctgggaacaggggtgcagaaaagacaactttgacattgctgaaggcgtcagaacggttctggagctgatcaaatgccaggagaagctgtgtatctattggatggtcaactacaactttgaagatgagaccatcaggaacatcctgctgcaccagctccaatcagcgaggccagtaatcttggatccagttgacccaaccaataatgtgagtggagataaaatatgctggcaatggctgaaaaaagaagctcaaacctggttgacttctcccaacctggataatgagttacctgcaccatcttggaatgtcctgcctgcaccactcttcacgaccccaggccaccttctggataagttcatcaaggagtttctccagcccaacaaatgcttcctagagcagattgacagtgctgttaacatcatccgtacattccttaaagaaaactgcttccgacaatcaacagccaagatccagattgtccggggaggatcaaccgccaaaggcacagctctgaagactggctctgatgccgatctcgtcgtgttccataactcacttaaaagctacacctcccaaaaaaacgagcggcacaaaatcgtcaaggaaatccatgaacagctgaaagccttttggagggagaaggaggaggagcttgaagtcagctttgagcctcccaagtggaaggctcccagggtgctgagcttctctctgaaatccaaagtcctcaacgaaagtgtcagctttgatgtgcttcctgcctttaatgcactgggtcagctgagttctggctccacacccagccccgaggtttatgcagggctcattgatctgtataaatcctcggacctcccgggaggagagttttctacctgtttcacagtcctgcagcgaaacttcattcgctcccggcccaccaaactaaaggatttaattcgcctggtgaagcactggtacaaagagtgtgaaaggaaactgaagccaaaggggtctttgcccccaaagtatgccttggagctgctcaccatctatgcctgggagcaggggagtggagtgccggattttgacactgcagaaggtttccggacagtcctggagctggtcacacaatatcagcagctctgcatcttctggaaggtcaattacaactttgaagatgagaccgtgaggaagtttctactgagccagttgcagaaaaccaggcctgtgatcttggacccagccgaacccacaggtgacgtgggtggaggggaccgttggtgttggcatcttctggcaaaagaagcaaaggaatggttatcctctccctgcttcaaggatgggactggaaacccaataccaccttggaaagtgccggtaaaagtcatctaaaggaggcgttgtctggaaatagccctgtaacaggcttgaatcaaagaacttctcctactgtagcaacctgaaattaactcagacacaaataaaggaaacccagctcacaggagcttaaacagctggtcagcccccctaagcccccactacaagtgatcctcaggcaggtaaccccagattcatgcactgtagggtgctgcgcagcatccctagtctctacccagtagatgccactagccctcctctcccagtgacaaccaaaagtcttcagacattgtcaaacgttcccctgggttcacagatctttctgcctttggcttttggctccaccctctttagctgttaatttgagtacttatggccctgaaagcggccacggtgcctccagatggcaggtttgcaatccaagcaggaagaaggaaaagatacccaaaggtcaagaacacagtgattttattagaagtttcatccgcaaattttcttccatttcattgctcagaaatgtcatgtggttacctgtaacttgaaggtggctacaaagatgactgtggacgtgggttgcactggccacccaaggatgtctgccacacctctccaaagccctccctacctaccaagatatacctgatatattccaccaggatatcctccctccagatatacttggttctctccaccaggttctttctttaaagcaggatttctcaactttgatacttactcacatttggggctagacagttctttgtttggaggctctcttgtgcattgtaggatgttgagcagcatctctggcctgtacccagtagatgccacccagttgtgacaattaaaagtgtcttgagactttatcatgtgtcttctgccctaggtgagaacccttgcactagaggaaccctacaccccaaccctggggggaatgtagggaagaggtggccaagccaaccgtggggttagctctaattattaagatatgcattataaataaataccaaaaaattgtctctggcaatagttaccttcccagatacaggtccccccttttttcccctaactcttttaagcaatgattgtaactattaggagacattgctctcccacgtatgtttttctttttagacaatgcagacaccaggaagttgtggagctaggatccatcctattgtcaatgagatgttctcatccagaagccatagaatcctgaataataattctaaaagaaacttctggagatcatctggcaatcgcttttaaagactcggctcaccgtgagaaagagtcactcacatccattcttcccttgatggtccctattcctccttcccttgcttcttggacttcttgaaatcaatcaagactgcaaaccctttcataaagtcttgccttgctgaactccctctctgcaggcagcctgcctttaaaaatagttgctgtcatccactttatgtgcatcttatttctgtcaacttgtattttttttcttgtatttttccaattagctcctcctttttccttccagtctaaaaaaggaatcctctgtgtcttcaaagcaaagctctttactttccccttggttctcataactctgtgatcttgctctcggtgcttccaactcatccacgtcctgtctgtttcctctgtatacaaaaccctttctgcccctgctgacacagacatcctctatgccagcagccagccaaccctttcattagaacttcaagctctccaaaggctcagattataactgttgtcatatttatatgaggctgttgtcttttccttctgagcctgcctttctccccccacccaggagtatcctcttgccaaatcaaaagactttttccttgggctttagccttaaagatacttgaaggtctaggtgctttaacctcacataccctcacttaaacttttatcactgttgcatataccagttgtgatacaataaagaatgtatctgga

SEQ ID NO: 326693 - DNA, 2145 bp, Homo sapiens
gcaaggggcagggcagagcctctgagcttaagttagttttgtttccctgtcccggatacaagagttggtaagctcgctgcagtgggtggagagaggcctctagacttcagtttcagtttcctggctctgggcagcagcaagaattcctctgcctcccatcctaccattcactgtcttgccggcagccagctgagagcaatgggaaatggggagtcccagctgtcctcggtgcctgctcagaagctgggttggtttatccaggaatacctgaagccctacgaagaatgtcagacactgatcgacgagatggtgaacaccatctgtgacgtcctgcaggaacccgaacagttccccctggtgcagggagtggccataggtggctcctatggacggaaaacagtcttaagaggcaactccgatggtacccttgtcctcttcttcagtgacttaaaacaattccaggatcagaagagaagccaacgtgacatcctcgataaaactggggataagctgaagttctgtctgttcacgaagtggttgaaaaacaatttcgagatccagaagtcccttgatgggttcaccatccaggtgttcacaaaaaatcagagaatctctttcgaggtgctggccgccttcaacgctctgagcttaaatgataatcccagcccctggatctatcgagagctcaaaagatccttggataagacaaatgccagtcctggtgagtttgcagtctgcttcactgaactccagcagaagttttttgacaaccgtcctggaaaactaaaggatttgatcctcttgataaagcactggcatcaacagtgccagaaaaaaatcaaggatttaccctcgctgtctccgtatgccctggagctgcttacggtgtatgcctgggaacaggggtgcagaaaagacaactttgacattgctgaaggcgtcagaacggttctggagctgatcaaatgccaggagaagctgtgtatctattggatggtcaactacaactttgaagatgagaccatcaggaacatcctgctgcaccagctccaatcagcgaggccagtaatcttggatccagttgacccaaccaataatgtgagtggagataaaatatgctggcaatggctgaaaaaagaagctcaaacctggttgacttctcccaacctggataatgagttacctgcaccatcttggaatgtcctgcctgcaccactcttcacgaccccaggccaccttctggataagttcatcaaggagtttctccagcccaacaaatgcttcctagagcagattgacagtgctgttaacatcatccgtacattccttaaagaaaactgcttccgacaatcaacagccaagatccagattgtccggggaggatcaaccgccaaaggcacagctctgaagactggctctgatgccgatctcgtcgtgttccataactcacttaaaagctacacctcccaaaaaaacgagcggcacaaaatcgtcaaggaaatccatgaacagctgaaagccttttggagggagaaggaggaggagcttgaagtcagctttgagcctcccaagtggaaggctcccagggtgctgagcttctctctgaaatccaaagtcctcaacgaaagtgtcagctttgatgtgcttcctgcctttaatgcactgggtcagctgagttctggctccacacccagccccgaggtttatgcagggctcattgatctgtataaatcctcggacctcccgggaggagagttttctacctgtttcacagtcctgcagcgaaacttcattcgctcccggcccaccaaactaaagcattggaattttcagccccatcccacccccaatctccaaggaggtgatggggctggaaattgagttcaattttaacatggccagtgatttaagcaatgctgcctatgtaaagaaaccccaataaaaactctggacagtgaggcttggggagcttcctgattggcagacattccaatgtactaggaaggtagcgcatcttgattccacagggacaaaggctcctgagctctgggcccttccagtgcttgccaccctacatactctttgtctggctcttcatttgtattctttataataaaatggtgattgtaagtagaaaaaaaaaaa

SEQ ID NO: 326694 - DNA, 320 bp, Homo sapiens
ttcacacaaggaaacaagctaatgacccaattgattaccgaattagaggcctcggtaccccccaacaagataaagtctcaaaaacaaccaccacaacgtcaagctcttcattgttcctatctgccaaatcattatacttcctacaagcagtgcagagagctgagtcttcagcaggtccaagaaatttgaacacactgaaggaagtcagccttcccacctgaagatcaacatgcctggcactctagcacttgaggatagctgaatgaatgtgtatttcttgtctctttctttcttgttggagcttggggtcctctaagtca

SEQ ID NO: 326695 - DNA, 7606 bp, Homo sapiens
ttcacacaaggaaacaagctaatgacccaattgattaccgaattagaggcctcggtaccccccaacaagataaagtctcaaaaacaaccaccacaacgtcaagctcttcattgttcctatctgccaaatcattatacttcctacaagcagtgcagagagctgagtcttcagcaggtccaagaaatttgaacacactgaaggaagtcagccttcccacctgaagatcaacatgcctggcactctagcacttgaggatagctgaatgaatgtgtatttctttgtctctttctttcttgtctttgctctttgttctctatctaaagtgtgtcttacccatttccatgtttctcttgctaatttctttcgtgtgtgcctttgcctcattttctctttttgttcacaagagtggtctgtgtcttgtcttagacatatctctcatttttcattttgttgctatttctctttgctctcctagatgtggctcttctttcacgctttatttcatgtctcctttttgggtcacatgctgtgtgctttttgtccttttcttgttctgtctacctctcctttctctgcctacctctcttttctctttgtgaactgtgattatttgttaccccttccccttctcgttcgttttaaatttcaccttttttctgagtctggcctcctttctgctgtttctactttttatctcacatttctcatttctgcatttcctttctgcctctcttgggctattctctctctcctcccctgcgtgcctcagcatctcttgctgtttgtgattttctatttcagtattaatctctgttggcttgtatttgttctctgcttcttccctttctactcacctttgagtatttcagcctcttcatgaatctatctccctctctttgatttcatgtaatctctccttaaatatttctttgcatatgtgggcaagtgtacgtgtgtgtgtgtcatgtgtggcagaggggcttcctaacccctgcctgataggtgcagaacgtcggctatcagagcaagcattgtggagcggttccttatgccaggctgccatgtgagatgatccaagaccaaaacaaggccctagactgcagtaaaacccagaactcaagtagggcagaaggtggaaggctcatatggatagaaggcccaaagtataagacagatggtttgagacttgagacccgaggactaagatggaaagcccatgttccaagatagatagaagcctcaggcctgaaaccaacaaaagcctcaagagccaagaaaacagagggtggcctgaattggaccgaaggcctgagttggatggaagtctcaaggcttgagttagaagtcttaagacctgggacaggacacatggaaggcctaagaactgagacttgtgacacaaggccaacgacctaagattagcccagggttgtagctggaagacctacaacccaaggatggaaggcccctgtcacaaagcctacctagatggatagaggacccaagcgaaaaaggtatctcaagactaacggccggaatctggaggcccatgacccagaacccaggaaggatagaagcttgaagacctggggaaatcccaagatgagaaccctaaaccctacctcttttctattgtttacacttcttactcttagatatttccagttctcctgtttatctttaagcctgattcttttgagatgtactttttgatgttgccggttacctttagattgacagtattatgcctgggccagtcttgagccagctttaaatcacagcttttacctatttgttaggctatagtgttttgtaaacttctgtttctattcacatcttctccacttgagagagacaccaaaatccagtcagtatctaatctggcttttgttaacttccctcaggagcagacattcatataggtgatactgtatttcagtcctttcttttgaccccagaagccctagactgagaagataaaatggtcaggttgttggggaaaaaaaagtgccaggctctctagagaaaaatgtgaagagatgctccaggccaatgagaagaattagacaagaaatacacagatgtgccagacttctgagaagcacctgccagcaacagcttccttctttgagcttaggtgagcaggattctggggtttgggatttctagtgatggttatggaaagggtgactgtgcctgggacaaagcgaggtcccaaggggacagcctgaactccctgctcatagtagtggccaaataatttggtggactgtgccaacgctactcctgggtttaatacccatctctaggcttaaagatgagagaacctgggactgttgagcatgtttaatactttccttgatttttttcttcctgtttatgtgggaagttgatttaaatgactgataatgtgtatgaaagcactgtaaaacataagagaaaaaccaattagtgtattggcaatcatgcagttaacatttgaaagtgcagtgtaaattgtgaagcattatgtaaatcaggggtccacagtttttctgtaaggggtcaaatcataaatactttagactgtgggccatatggtttctgttacatatttgttttttaaacaacgtttttataaggtcaaaatcattcttagtttttgagccaattggatttggcctgctgttcatagcttaccaccccctgatgtattatttgttattcagagaaaatttctgaatactactagtttccttttctgtgcctgtccctgtgctaggcactaaaaatgcaatgattattgatatctaggtgacctgaaaaaaaatagtgaatgtgctttgtaaactgtaaagcacttgtattctactgtgataagcgttgtggatacaaagaaaggagcaagcataaaaaagtgctctttcaaaaggatatagtactatgcagacacaaggaattgtttgataaatgaataaattatatgtatatttgaggccaatttgtgtttgctgctctggtaattttgagtaaaaatgcagtattccaggtatcagaaacgaaaacacatggaaactgcttttaaactttaaaatatactgaaaacataagggactaagcttgttgtggtcacctataatgtgccagataccatgctgggtgctagagctaccaaagggggaaaagtattctcatagaacaaaaaatttcagaaaggtgcatattaaagtgctttgtaaactaaagcatgatacaaatgtcaatgggctacatatttatgaatgaatgaatggatgaatgaatattaagtgcctcttacataccagctattttgggtactgtaaaatacaagattaattctcctatgtaataagaggaaagtttatcctctatactattcagatgtaaggaatgatatattgcttaattttaaacaatcaagactttactggtgaggttaagttaaattattactgatacatttttccaggtaaccaggaaagagctagtatgaggaaatgaagtaatagatgtgagatccagaccgaaagtcacttaattcagcttgcgaatgtgctttctaaattataaagcacttgtaaatgaaaaatttgatgctttctgtatgaataaaactttctgtaagctaggtattgtctctacaaaattctcattgtatagttaaaccacagtgagaagggttctataagtagttatacaaaccaagggtttaaatacctgttaaatagatcaattttgattgcctactatgtgaactcactgttaaaggcactgaaaatttatcatatttcatttagccacagccaaaaataaggcaatacctatgttagcattttgtgaactctaaggcaccatataaatgtaactgttgattttctcacttggtgctgggtactaggtttataaaattgtatgatagttattatattgtgcaaataaagtaggaaaatttgaataacaatgattatcttttgaatacgcatacgcaagggattggttgtctgaagaatgccactatagtagttatctattgtgtgccaatctcattgctaggcattggggatgcaaagataaaccatctttattgtgtcttgggtagcagaagaaaatatgtgtaaaatcaatttataatttgtaaactgccacccatatataagctatatctgctgaatgatcattgattactcttatccttagagataacaactgggggcacaaacatttattatcattattgaacctacaacagagatctatgtgtagatttacaaagcctacagttctatacagataggaatgaactattggcttactgaatggtgattactttctgtggggctcggaactacatgccctaggatataaaaatgatgttatcattatagagtgctcacagaaggaaatgaagtaatataggtgtgagatccagaccaaaagtcatttaacaagtttattcagtgatgaaaacatgggacaaatggactaatataaggcagtgtactaagctgagtagagagataaagtcctgtccagaagatacatgcttcctggcctgattgaggagatggaaaatttttgcaaaaaacaaggtgttgtggtcttccatccagtttcttaagtgctgatgataaaagtgaattagacccaccttgacctggcctacagaagtaaaggagtaaaaataaatgcctcaggcgtgctttttgattcatttgataaacaaagcatcttttatgtggaatataccattctgggtcctgaggataagagagatgagggcattagatcactgacagctgaagatagaagaacatctttggtttgattgtttaaataatatttcaatgcctattctctgcaaggtactatgtttcgtaaattaaataggtctggcccagaagacccactcaattgcctttgagattaaaaaaaaaaaaaaaaagaaagaaaaatgcaagtttctttcaaaataaagagacatttttcctagtttcaggaatcccccaaatcacttcctcattggcttagtttaaagccaggagactgataaaagggctcagggtttgttctttaattcattaactaaacattctgcttttattacagttaaatggttcaagatgtaacaactagttttaaaggtatttgctcattggtctggcttagagacaggaagacatatgagcaataaaaaaaagattcttttgcatttaccaatttagtaaaaatttattaaaactgaataaagtgctgttcttaagtgcttgaaagacgtaaaccaaagtgcactttatctcatttatcttatggtggaaacacaggaacaaattctctaagagactgtgtttctttagttgagaagaaacttcattgagtagctgtgatatgttcgatactaaggaaaaactaaacagatcacctttgacatgcgttgtagagtgggaataagagagggctttttattttttcgttcatacgagtattgatgaagatgatactaaatgctaaatgaaatatatctgctccaaaaggcatttattctgacttggagatgcaacaaaaacacaaaaatggaatgaagtgatactcttcatcaaacagaagtgactgttatctcaaccattttgttaaatcctaaacagaaaacaaaaaaaatcatgacgaaaagacacttgcttattaattggcttggaaagtagaatataggagaaaggttactgtttattttttttcatgtattcattcattctacaaatatattcgggtgccaataggtacttggtataaggtttttggccccagagacatgggaaaaaaatgcatgccttcccagagaatgcctaatactttccttttggcttgttttcttgttaggggcatggcttagtccctaaataacattgtgtggtttaattcctactccgtatctcttctaccactctggccactacgataagcaggtagctgggttttgtagtgagcttgctccttaagttacaggaactctccttataatagacacttcattttcctagtccatccctcatgaaaaatgactgaccactgctgggcagcaggagggatgatgaccaactaattcccaaaccccagtctcattggtaccagccttggggaaccacctacacttgagccacaattggttttgaagtgcatttacaaggtttgtctattttcagttctttactttttacatgctgacacatacatacactgcctaaatagatctctttcagaaacaatcctcagataacgcatagcaaaatggagatggagacatgatttctcatgcaacagcttctctaattataccttagaaatgttctcctttttatcatcaaatctgctcaagaagggctttttatagtagaataatatcagtggatgaaaacagcttaacattttaccatgcttaagttttaagaataaaataaaaattggaaataattggccaaaattgaaaggaaaaatttttttaaaatttctctaaatgtaggcctggctgggctttgaccttttccgtttttaaatcactcacagagggtgggacaggaggaagagtgaaggaaaaggtcaaacctgttttaagggcaacctgcctttgttctgaattggtcttaagaacattaccagctccaggtttaaattgttcagtttcatgcagttccaatagctgatcattgttgagatgaggacaaaatcctttgtcctcactagtttgctttacatttttgaaaagtattatttttgtccaagtgcttatcaactaaaccttgtgttaggtaagaatggaatttattaagtgaatcagtgtgacccttcttgtcataagattatcttaaagctgaagccaaaatatgcttcaaaagaagaggactttattgttcattgtagttcatacattcaaagcatctgaactgtagtttctatagcaagccaattacatccataagtggagaaggaaatagataaatgtcaaagtatgattggtggagggagcaaggttgaagataatctggggttgaaattttctagttttcattctgtacatttttagttagacatcagatttgaaatattaatgtttacctttcaatgtgtggtatcagctggactcagtaacacccctttcttcagctggggatggggaatggattattggaaaatggaaagaagaaagtaactaaaagccttcctttcacagtttctggcatcactaccactactgattaaacaagaataagagaacattttatcatcatctgctttattcacataaatgaagttgtgatgaataaatctgcttttatgcagacacaaggaattaagtggcttcgtcattgtccttctacctcaaagataatttattccaaaagctaagataaatggaagactcttgaacttgtgaactgatgtgaaatgcagaatctcttttgagtctttgctgtttggaagattgaaaaatattgttcagcatgggtgaccaccagaaagtaatcttaagccatctagatgtcacaattgaaacaaactggggagttggttgctattgtaaaataaaatatactgttttgaaaaaaaagaattt

SEQ ID NO: 326696 - DNA, 7552 bp, Homo sapiens
ttcacacaaggaaacaagctaatgacccaattgattaccgaattagaggcctcggtaccccccaacaagataaagtctcaaaaacaaccaccacaacgtcaagctcttcattgttcctatctgccaaatcattatacttcctacaagcagtgcagagagctgagtcttcagcaggtccaagaaatttgaacacactgaaggaagtcagccttcccacctgaagatcaacatgcctggcactctagcacttgaggatagctgaatgaatgtgtatttctttgtctctttctttcttgtctttgctctttgttctctatctaaagtgtgtcttacccatttccatgtttctcttgctaatttctttcgtgtgtgcctttgcctcattttctctttttgttcacaagagtggtctgtgtcttgtcttagacatatctctcatttttcattttgttgctatttctctttgctctcctagatgtggctcttctttcacgctttatttcatgtctcctttttgggtcacatgctgtgtgctttttgtccttttcttgttctgtctacctctcctttctctgcctacctctcttttctctttgtgaactgtgattatttgttaccccttccccttctcgttcgttttaaatttcaccttttttctgagtctggcctcctttctgctgtttctactttttatctcacatttctcatttctgcatttcctttctgcctctcttgggctattctctctctcctcccctgcgtgcctcagcatctcttgctgtttgtgattttctatttcagtattaatctctgttggcttgtatttgttctctgcttcttccctttctactcacctttgagtatttcagcctcttcatgaatctatctccctctctttgatttcatgtaatctctccttaaatatttctttgcatatgtgggcaagtgtacgtgtgtgtgtgtcatgtgtggcagaggggcttcctaacccctgcctgataggtgcagaacgtcggctatcagagcaagcattgtggagcggttccttatgccaggctgccatgtgagatgatccaagaccaaaacaaggccctagactgcagtaaaacccagaactcaagtagggcagaaggtggaaggctcatatggatagaaggcccaaagtataagacagatggtttgagacttgagacccgaggactaagatggaaagcccatgttccaagatagatagaagcctcaggcctgaaaccaacaaaagcctcaagagccaagaaaacagagggtggcctgaattggaccgaaggcctgagttggatggaagtctcaaggcttgagttagaagtcttaagacctgggacaggacacatggaaggcctaagaactgagacttgtgacacaaggccaacgacctaagattagcccagggttgtagctggaagacctacaacccaaggatggaaggcccctgtcacaaagcctacctagatggatagaggacccaagcgaaaaaggtatctcaagactaacggccggaatctggaggcccatgacccagaacccaggaaggatagaagcttgaagacctggggaaatcccaagatgagaaccctaaaccctacctcttttctattgtttacacttcttactcttagatatttccagttctcctgtttatctttaagcctgattcttttgagatgtactttttgatgttgccggttacctttagattgacagtattatgcctgggccagtcttgagccagctttaaatcacagcttttacctatttgttaggctatagtgttttgtaaacttctgtttctattcacatcttctccacttgagagagacaccaaaatccagtcagtatctaatctggcttttgttaacttccctcaggagcagacattcatataggtgatactgtatttcagtcctttcttttgaccccagaagccctagactgagaagataaaatggtcaggttgttggggaaaaaaaagtgccaggctctctagagaaaaatgtgaagagatgctccaggccaatgagaagaattagacaagaaatacacagatgtgccagacttctgagaagcacctgccagcaacagcttccttctttgagcttaggtgagcaggattctggggtttgggatttctagtgatggttatggaaagggtgactgtgcctgggacaaagcgaggtcccaaggggacagcctgaactccctgctcatagtagtggccaaataatttggtggactgtgccaacgctactcctgggtttaatacccatctctaggcttaaagatgagagaacctgggactgttgagcatgtttaatactttccttgatttttttcttcctgtttatgtgggaagttgatttaaatgactgataatgtgtatgaaagcactgtaaaacataagagaaaaaccaattagtgtattggcaatcatgcagttaacatttgaaagtgcagtgtaaattgtgaagcattatgtaaatcaggggtccacagtttttctgtaaggggtcaaatcataaatactttagactgtgggccatatggtttctgttacatatttgttttttaaacaacgtttttataaggtcaaaatcattcttagtttttgagccaattggatttggcctgctgttcatagcttaccaccccctgatgtattatttgttattcagagaaaatttctgaatactactagtttccttttctgtgcctgtccctgtgctaggcactaaaaatgcaatgattattgatatctaggtgacctgaaaaaaaatagtgaatgtgctttgtaaactgtaaagcacttgtattctactgtgataagcgttgtggatacaaagaaaggagcaagcataaaaaagtgctctttcaaaaggatatagtactatgcagacacaaggaattgtttgataaatgaataaattatatgtatatttgaggccaatttgtgtttgctgctctggtaattttgagtaaaaatgcagtattccaggtatcagaaacgaaaacacatggaaactgcttttaaactttaaaatatactgaaaacataagggactaagcttgttgtggtcacctataatgtgccagataccatgctgggtgctagagctaccaaagggggaaaagtattctcatagaacaaaaaatttcagaaaggtgcatattaaagtgctttgtaaactaaagcatgatacaaatgtcaatgggctacatatttatgaatgaatgaatggatgaatgaatattaagtgcctcttacataccagctattttgggtactgtaaaatacaagattaattctcctatgtaataagaggaaagtttatcctctatactattcagatgtaaggaatgatatattgcttaattttaaacaatcaagactttactggtgaggttaagttaaattattactgatacatttttccaggtaaccaggaaagagctagtatgaggaaatgaagtaatagatgtgagatccagaccgaaagtcacttaattcagcttgcgaatgtgctttctaaattataaagcacttgtaaatgaaaaatttgatgctttctgtatgaataaaactttctgtaagctaggtattgtctctacaaaattctcattgtatagttaaaccacagtgagaagggttctataagtagttatacaaaccaagggtttaaatacctgttaaatagatcaattttgattgcctactatgtgaactcactgttaaaggcactgaaaatttatcatatttcatttagccacagccaaaaataaggcaatacctatgttagcattttgtgaactctaaggcaccatataaatgtaactgttgattttctcacttggtgctgggtactaggtttataaaattgtatgatagttattatattgtgcaaataaagtaggaaaatttgaataacaatgattatcttttgaatacgcatacgcaagggattggttgtctgaagaatgccactatagtagttatctattgtgtgccaatctcattgctaggcattggggatgcaaagataaaccatctttattgtgtcttgggtagcagaagaaaatatgtgtaaaatcaatttataatttgtaaactgccacccatatataagctatatctgctgaatgatcattgattactcttatccttagagataacaactgggggcacaaacatttattatcattattgaacctacaacagagatctatgtgtagatttacaaagcctacagttctatacagataggaatgaactattggcttactgaatggtgattactttctgtggggctcggaactacatgccctaggatataaaaatgatgttatcattatagagtgctcacagaaggaaatgaagtaatataggtgtgagatccagaccaaaagtcatttaacaagtttattcagtgatgaaaacatgggacaaatggactaatataaggcagtgtactaagctgagtagagagataaagtcctgtccagaagatacatgcttcctggcctgattgaggagatggaaaatttttgcaaaaaacaaggtgttgtggtcttccatccagtttcttaagtgctgatgataaaagtgaattagacccaccttgacctggcctacagaagtaaaggagtaaaaataaatgcctcaggcgtgctttttgattcatttgataaacaaagcatcttttatgtggaatataccattctgggtcctgaggataagagagatgagggcattagatcactgacagctgaagatagaagaacatctttggtttgattgtttaaataatatttcaatgcctattctctgcaaggtactatgtttcgtaaattaaataggtctggcccagaagacccactcaattgcctttgagattaaaaaaaaaaaaaaaaagaaagaaaaatgcaagtttctttcaaaataaagagacatttttcctagtttcaggaatcccccaaatcacttcctcattggcttagtttaaagccaggagactgataaaagggctcagggtttgttctttaattcattaactaaacattctgcttttattacagttaaatggttcaagatgtaacaactagttttaaaggtatttgctcattggtctggcttagagacaggaagacatatgagcaataaaaaaaagattcttttgcatttaccaatttagtaaaaatttattatttatctcatttatcttatggtggaaacacaggaacaaattctctaagagactgtgtttctttagttgagaagaaacttcattgagtagctgtgatatgttcgatactaaggaaaaactaaacagatcacctttgacatgcgttgtagagtgggaataagagagggctttttattttttcgttcatacgagtattgatgaagatgatactaaatgctaaatgaaatatatctgctccaaaaggcatttattctgacttggagatgcaacaaaaacacaaaaatggaatgaagtgatactcttcatcaaacagaagtgactgttatctcaaccattttgttaaatcctaaacagaaaacaaaaaaaatcatgacgaaaagacacttgcttattaattggcttggaaagtagaatataggagaaaggttactgtttattttttttcatgtattcattcattctacaaatatattcgggtgccaataggtacttggtataaggtttttggccccagagacatgggaaaaaaatgcatgccttcccagagaatgcctaatactttccttttggcttgttttcttgttaggggcatggcttagtccctaaataacattgtgtggtttaattcctactccgtatctcttctaccactctggccactacgataagcaggtagctgggttttgtagtgagcttgctccttaagttacaggaactctccttataatagacacttcattttcctagtccatccctcatgaaaaatgactgaccactgctgggcagcaggagggatgatgaccaactaattcccaaaccccagtctcattggtaccagccttggggaaccacctacacttgagccacaattggttttgaagtgcatttacaaggtttgtctattttcagttctttactttttacatgctgacacatacatacactgcctaaatagatctctttcagaaacaatcctcagataacgcatagcaaaatggagatggagacatgatttctcatgcaacagcttctctaattataccttagaaatgttctcctttttatcatcaaatctgctcaagaagggctttttatagtagaataatatcagtggatgaaaacagcttaacattttaccatgcttaagttttaagaataaaataaaaattggaaataattggccaaaattgaaaggaaaaatttttttaaaatttctctaaatgtaggcctggctgggctttgaccttttccgtttttaaatcactcacagagggtgggacaggaggaagagtgaaggaaaaggtcaaacctgttttaagggcaacctgcctttgttctgaattggtcttaagaacattaccagctccaggtttaaattgttcagtttcatgcagttccaatagctgatcattgttgagatgaggacaaaatcctttgtcctcactagtttgctttacatttttgaaaagtattatttttgtccaagtgcttatcaactaaaccttgtgttaggtaagaatggaatttattaagtgaatcagtgtgacccttcttgtcataagattatcttaaagctgaagccaaaatatgcttcaaaagaagaggactttattgttcattgtagttcatacattcaaagcatctgaactgtagtttctatagcaagccaattacatccataagtggagaaggaaatagataaatgtcaaagtatgattggtggagggagcaaggttgaagataatctggggttgaaattttctagttttcattctgtacatttttagttagacatcagatttgaaatattaatgtttacctttcaatgtgtggtatcagctggactcagtaacacccctttcttcagctggggatggggaatggattattggaaaatggaaagaagaaagtaactaaaagccttcctttcacagtttctggcatcactaccactactgattaaacaagaataagagaacattttatcatcatctgctttattcacataaatgaagttgtgatgaataaatctgcttttatgcagacacaaggaattaagtggcttcgtcattgtccttctacctcaaagataatttattccaaaagctaagataaatggaagactcttgaacttgtgaactgatgtgaaatgcagaatctcttttgagtctttgctgtttggaagattgaaaaatattgttcagcatgggtgaccaccagaaagtaatcttaagccatctagatgtcacaattgaaacaaactggggagttggttgctattgtaaaataaaatatactgttttgaaaaaaaagaattt

SEQ ID NO: 326697 - DNA, 7416 bp, Homo sapiens
  misc_feature (26)..(26): n is a, c, g, or t
tgatctagaggatcccgacgtagcgnaatgaaggataaacatgctggactctagcagcttgaggatagctgaatgaatgtgtatttctttgtctctttctttcttgtctttgctctttgttctctatctaaagtgtgtcttacccatttccatgtttctcttgctaatttctttcgtgtgtgcctttgcctcattttctctttttgttcacaagagtggtctgtgtcttgtcttagacatatctctcatttttcattttgttgctatttctctttgctctcctagatgtggctcttctttcacgctttatttcatgtctcctttttgggtcacatgctgtgtgctttttgtccttttcttgttctgtctacctctcctttctctgcctacctctcttttctctttgtgaactgtgattatttgttaccccttccccttctcgttcgttttaaatttcaccttttttctgagtctggcctcctttctgctgtttctactttttatctcacatttctcatttctgcatttcctttctgcctctcttgggctattctctctctcctcccctgcgtgcctcagcatctcttgctgtttgtgattttctatttcagtattaatctctgttggcttgtatttgttctctgcttcttccctttctactcacctttgagtatttcagcctcttcatgaatctatctccctctctttgatttcatgtaatctctccttaaatatttctttgcatatgtgggcaagtgtacgtgtgtgtgtgtcatgtgtggcagaggggcttcctaacccctgcctgataggtgcagaacgtcggctatcagagcaagcattgtggagcggttccttatgccaggctgccatgtgagatgatccaagaccaaaacaaggccctagactgcagtaaaacccagaactcaagtagggcagaaggtggaaggctcatatggatagaaggcccaaagtataagacagatggtttgagacttgagacccgaggactaagatggaaagcccatgttccaagatagatagaagcctcaggcctgaaaccaacaaaagcctcaagagccaagaaaacagagggtggcctgaattggaccgaaggcctgagttggatggaagtctcaaggcttgagttagaagtcttaagacctgggacaggacacatggaaggcctaagaactgagacttgtgacacaaggccaacgacctaagattagcccagggttgtagctggaagacctacaacccaaggatggaaggcccctgtcacaaagcctacctagatggatagaggacccaagcgaaaaaggtatctcaagactaacggccggaatctggaggcccatgacccagaacccaggaaggatagaagcttgaagacctggggaaatcccaagatgagaaccctaaaccctacctcttttctattgtttacacttcttactcttagatatttccagttctcctgtttatctttaagcctgattcttttgagatgtactttttgatgttgccggttacctttagattgacagtattatgcctgggccagtcttgagccagctttaaatcacagcttttacctatttgttaggctatagtgttttgtaaacttctgtttctattcacatcttctccacttgagagagacaccaaaatccagtcagtatctaatctggcttttgttaacttccctcaggagcagacattcatataggtgatactgtatttcagtcctttcttttgaccccagaagccctagactgagaagataaaatggtcaggttgttggggaaaaaaaagtgccaggctctctagagaaaaatgtgaagagatgctccaggccaatgagaagaattagacaagaaatacacagatgtgccagacttctgagaagcacctgccagcaacagcttccttctttgagcttaggtgagcaggattctggggtttgggatttctagtgatggttatggaaagggtgactgtgcctgggacaaagcgaggtcccaaggggacagcctgaactccctgctcatagtagtggccaaataatttggtggactgtgccaacgctactcctgggtttaatacccatctctaggcttaaagatgagagaacctgggactgttgagcatgtttaatactttccttgatttttttcttcctgtttatgtgggaagttgatttaaatgactgataatgtgtatgaaagcactgtaaaacataagagaaaaaccaattagtgtattggcaatcatgcagttaacatttgaaagtgcagtgtaaattgtgaagcattatgtaaatcaggggtccacagtttttctgtaaggggtcaaatcataaatactttagactgtgggccatatggtttctgttacatatttgttttttaaacaacgtttttataaggtcaaaatcattcttagtttttgagccaattggatttggcctgctgttcatagcttaccaccccctgatgtattatttgttattcagagaaaatttctgaatactactagtttccttttctgtgcctgtccctgtgctaggcactaaaaatgcaatgattattgatatctaggtgacctgaaaaaaaatagtgaatgtgctttgtaaactgtaaagcacttgtattctactgtgataagcgttgtggatacaaagaaaggagcaagcataaaaaagtgctctttcaaaaggatatagtactatgcagacacaaggaattgtttgataaatgaataaattatatgtatatttgaggccaatttgtgtttgctgctctggtaattttgagtaaaaatgcagtattccaggtatcagaaacgaaaacacatggaaactgcttttaaactttaaaatatactgaaaacataagggactaagcttgttgtggtcacctataatgtgccagataccatgctgggtgctagagctaccaaagggggaaaagtattctcatagaacaaaaaatttcagaaaggtgcatattaaagtgctttgtaaactaaagcatgatacaaatgtcaatgggctacatatttatgaatgaatgaatggatgaatgaatattaagtgcctcttacataccagctattttgggtactgtaaaatacaagattaattctcctatgtaataagaggaaagtttatcctctatactattcagatgtaaggaatgatatattgcttaattttaaacaatcaagactttactggtgaggttaagttaaattattactgatacatttttccaggtaaccaggaaagagctagtatgaggaaatgaagtaatagatgtgagatccagaccgaaagtcacttaattcagcttgcgaatgtgctttctaaattataaagcacttgtaaatgaaaaatttgatgctttctgtatgaataaaactttctgtaagctaggtattgtctctacaaaattctcattgtatagttaaaccacagtgagaagggttctataagtagttatacaaaccaagggtttaaatacctgttaaatagatcaattttgattgcctactatgtgaactcactgttaaaggcactgaaaatttatcatatttcatttagccacagccaaaaataaggcaatacctatgttagcattttgtgaactctaaggcaccatataaatgtaactgttgattttctcacttggtgctgggtactaggtttataaaattgtatgatagttattatattgtgcaaataaagtaggaaaatttgaataacaatgattatcttttgaatacgcatacgcaagggattggttgtctgaagaatgccactatagtagttatctattgtgtgccaatctcattgctaggcattggggatgcaaagataaaccatctttattgtgtcttgggtagcagaagaaaatatgtgtaaaatcaatttataatttgtaaactgccacccatatataagctatatctgctgaatgatcattgattactcttatccttagagataacaactgggggcacaaacatttattatcattattgaacctacaacagagatctatgtgtagatttacaaagcctacagttctatacagataggaatgaactattggcttactgaatggtgattactttctgtggggctcggaactacatgccctaggatataaaaatgatgttatcattatagagtgctcacagaaggaaatgaagtaatataggtgtgagatccagaccaaaagtcatttaacaagtttattcagtgatgaaaacatgggacaaatggactaatataaggcagtgtactaagctgagtagagagataaagtcctgtccagaagatacatgcttcctggcctgattgaggagatggaaaatttttgcaaaaaacaaggtgttgtggtcttccatccagtttcttaagtgctgatgataaaagtgaattagacccaccttgacctggcctacagaagtaaaggagtaaaaataaatgcctcaggcgtgctttttgattcatttgataaacaaagcatcttttatgtggaatataccattctgggtcctgaggataagagagatgagggcattagatcactgacagctgaagatagaagaacatctttggtttgattgtttaaataatatttcaatgcctattctctgcaaggtactatgtttcgtaaattaaataggtctggcccagaagacccactcaattgcctttgagattaaaaaaaaaaaaaaaaagaaagaaaaatgcaagtttctttcaaaataaagagacatttttcctagtttcaggaatcccccaaatcacttcctcattggcttagtttaaagccaggagactgataaaagggctcagggtttgttctttaattcattaactaaacattctgcttttattacagttaaatggttcaagatgtaacaactagttttaaaggtatttgctcattggtctggcttagagacaggaagacatatgagcaataaaaaaaagattcttttgcatttaccaatttagtaaaaatttattaaaactgaataaagtgctgttcttaagtgcttgaaagacgtaaaccaaagtgcactttatctcatttatcttatggtggaaacacaggaacaaattctctaagagactgtgtttctttagttgagaagaaacttcattgagtagctgtgatatgttcgatactaaggaaaaactaaacagatcacctttgacatgcgttgtagagtgggaataagagagggctttttattttttcgttcatacgagtattgatgaagatgatactaaatgctaaatgaaatatatctgctccaaaaggcatttattctgacttggagatgcaacaaaaacacaaaaatggaatgaagtgatactcttcatcaaacagaagtgactgttatctcaaccattttgttaaatcctaaacagaaaacaaaaaaaatcatgacgaaaagacacttgcttattaattggcttggaaagtagaatataggagaaaggttactgtttattttttttcatgtattcattcattctacaaatatattcgggtgccaataggtacttggtataaggtttttggccccagagacatgggaaaaaaatgcatgccttcccagagaatgcctaatactttccttttggcttgttttcttgttaggggcatggcttagtccctaaataacattgtgtggtttaattcctactccgtatctcttctaccactctggccactacgataagcaggtagctgggttttgtagtgagcttgctccttaagttacaggaactctccttataatagacacttcattttcctagtccatccctcatgaaaaatgactgaccactgctgggcagcaggagggatgatgaccaactaattcccaaaccccagtctcattggtaccagccttggggaaccacctacacttgagccacaattggttttgaagtgcatttacaaggtttgtctattttcagttctttactttttacatgctgacacatacatacactgcctaaatagatctctttcagaaacaatcctcagataacgcatagcaaaatggagatggagacatgatttctcatgcaacagcttctctaattataccttagaaatgttctcctttttatcatcaaatctgctcaagaagggctttttatagtagaataatatcagtggatgaaaacagcttaacattttaccatgcttaagttttaagaataaaataaaaattggaaataattggccaaaattgaaaggaaaaatttttttaaaatttctctaaatgtaggcctggctgggctttgaccttttccgtttttaaatcactcacagagggtgggacaggaggaagagtgaaggaaaaggtcaaacctgttttaagggcaacctgcctttgttctgaattggtcttaagaacattaccagctccaggtttaaattgttcagtttcatgcagttccaatagctgatcattgttgagatgaggacaaaatcctttgtcctcactagtttgctttacatttttgaaaagtattatttttgtccaagtgcttatcaactaaaccttgtgttaggtaagaatggaatttattaagtgaatcagtgtgacccttcttgtcataagattatcttaaagctgaagccaaaatatgcttcaaaagaagaggactttattgttcattgtagttcatacattcaaagcatctgaactgtagtttctatagcaagccaattacatccataagtggagaaggaaatagataaatgtcaaagtatgattggtggagggagcaaggttgaagataatctggggttgaaattttctagttttcattctgtacatttttagttagacatcagatttgaaatattaatgtttacctttcaatgtgtggtatcagctggactcagtaacacccctttcttcagctggggatggggaatggattattggaaaatggaaagaagaaagtaactaaaagccttcctttcacagtttctggcatcactaccactactgattaaacaagaataagagaacattttatcatcatctgctttattcacataaatgaagttgtgatgaataaatctgcttttatgcagacacaaggaattaagtggcttcgtcattgtccttctacctcaaagataatttattccaaaagctaagataaatggaagactcttgaacttgtgaactgatgtgaaatgcagaatctcttttgagtctttgctgtttggaagattgaaaaatattgttcagcatgggtgaccaccagaaagtaatcttaagccatctagatgtcacaattgaaacaaactggggagttggttgctattgtaaaataaaatatactgttttgaaaaaaaagaattt

SEQ ID NO: 326698 - DNA, 7552 bp, Homo sapiens
ttcacacaaggaaacaagctaatgacccaattgattaccgaattagaggcctcggtaccccccaacaagataaagtctcaaaaacaaccaccacaacgtcaagctcttcattgttcctatctgccaaatcattatacttcctacaagcagtgcagagagctgagtcttcagcaggtccaagaaatttgaacacactgaaggaagtcagccttcccacctgaagatcaacatgcctggcactctagcacttgaggatagctgaatgaatgtgtatttctttgtctctttctttcttgtctttgctctttgttctctatctaaagtgtgtcttacccatttccatgtttctcttgctaatttctttcgtgtgtgcctttgcctcattttctctttttgttcacaagagtggtctgtgtcttgtcttagacatatctctcatttttcattttgttgctatttctctttgctctcctagatgtggctcttctttcacgctttatttcatgtctcctttttgggtcacatgctgtgtgctttttgtccttttcttgttctgtctacctctcctttctctgcctacctctcttttctctttgtgaactgtgattatttgttaccccttccccttctcgttcgttttaaatttcaccttttttctgagtctggcctcctttctgctgtttctactttttatctcacatttctcatttctgcatttcctttctgcctctcttgggctattctctctctcctcccctgcgtgcctcagcatctcttgctgtttgtgattttctatttcagtattaatctctgttggcttgtatttgttctctgcttcttccctttctactcacctttgagtatttcagcctcttcatgaatctatctccctctctttgatttcatgtaatctctccttaaatatttctttgcatatgtgggcaagtgtacgtgtgtgtgtgtcatgtgtggcagaggggcttcctaacccctgcctgataggtgcagaacgtcggctatcagagcaagcattgtggagcggttccttatgccaggctgccatgtgagatgatccaagaccaaaacaaggccctagactgcagtaaaacccagaactcaagtagggcagaaggtggaaggctcatatggatagaaggcccaaagtataagacagatggtttgagacttgagacccgaggactaagatggaaagcccatgttccaagatagatagaagcctcaggcctgaaaccaacaaaagcctcaagagccaagaaaacagagggtggcctgaattggaccgaaggcctgagttggatggaagtctcaaggcttgagttagaagtcttaagacctgggacaggacacatggaaggcctaagaactgagacttgtgacacaaggccaacgacctaagattagcccagggttgtagctggaagacctacaacccaaggatggaaggcccctgtcacaaagcctacctagatggatagaggacccaagcgaaaaaggtatctcaagactaacggccggaatctggaggcccatgacccagaacccaggaaggatagaagcttgaagacctggggaaatcccaagatgagaaccctaaaccctacctcttttctattgtttacacttcttactcttagatatttccagttctcctgtttatctttaagcctgattcttttgagatgtactttttgatgttgccggttacctttagattgacagtattatgcctgggccagtcttgagccagctttaaatcacagcttttacctatttgttaggctatagtgttttgtaaacttctgtttctattcacatcttctccacttgagagagacaccaaaatccagtcagtatctaatctggcttttgttaacttccctcaggagcagacattcatataggtgatactgtatttcagtcctttcttttgaccccagaagccctagactgagaagataaaatggtcaggttgttggggaaaaaaaagtgccaggctctctagagaaaaatgtgaagagatgctccaggccaatgagaagaattagacaagaaatacacagatgtgccagacttctgagaagcacctgccagcaacagcttccttctttgagcttaggtgagcaggattctggggtttgggatttctagtgatggttatggaaagggtgactgtgcctgggacaaagcgaggtcccaaggggacagcctgaactccctgctcatagtagtggccaaataatttggtggactgtgccaacgctactcctgggtttaatacccatctctaggcttaaagatgagagaacctgggactgttgagcatgtttaatactttccttgatttttttcttcctgtttatgtgggaagttgatttaaatgactgataatgtgtatgaaagcactgtaaaacataagagaaaaaccaattagtgtattggcaatcatgcagttaacatttgaaagtgcagtgtaaattgtgaagcattatgtaaatcaggggtccacagtttttctgtaaggggtcaaatcataaatactttagactgtgggccatatggtttctgttacatatttgttttttaaacaacgtttttataaggtcaaaatcattcttagtttttgagccaattggatttggcctgctgttcatagcttaccaccccctgatgtattatttgttattcagagaaaatttctgaatactactagtttccttttctgtgcctgtccctgtgctaggcactaaaaatgcaatgattattgatatctaggtgacctgaaaaaaaatagtgaatgtgctttgtaaactgtaaagcacttgtattctactgtgataagcgttgtggatacaaagaaaggagcaagcataaaaaagtgctctttcaaaaggatatagtactatgcagacacaaggaattgtttgataaatgaataaattatatgtatatttgaggccaatttgtgtttgctgctctggtaattttgagtaaaaatgcagtattccaggtatcagaaacgaaaacacatggaaactgcttttaaactttaaaatatactgaaaacataagggactaagcttgttgtggtcacctataatgtgccagataccatgctgggtgctagagctaccaaagggggaaaagtattctcatagaacaaaaaatttcagaaaggtgcatattaaagtgctttgtaaactaaagcatgatacaaatgtcaatgggctacatatttatgaatgaatgaatggatgaatgaatattaagtgcctcttacataccagctattttgggtactgtaaaatacaagattaattctcctatgtaataagaggaaagtttatcctctatactattcagatgtaaggaatgatatattgcttaattttaaacaatcaagactttactggtgaggttaagttaaattattactgatacatttttccaggtaaccaggaaagagctagtatgaggaaatgaagtaatagatgtgagatccagaccgaaagtcacttaattcagcttgcgaatgtgctttctaaattataaagcacttgtaaatgaaaaatttgatgctttctgtatgaataaaactttctgtaagctaggtattgtctctacaaaattctcattgtatagttaaaccacagtgagaagggttctataagtagttatacaaaccaagggtttaaatacctgttaaatagatcaattttgattgcctactatgtgaactcactgttaaaggcactgaaaatttatcatatttcatttagccacagccaaaaataaggcaatacctatgttagcattttgtgaactctaaggcaccatataaatgtaactgttgattttctcacttggtgctgggtactaggtttataaaattgtatgatagttattatattgtgcaaataaagtaggaaaatttgaataacaatgattatcttttgaatacgcatacgcaagggattggttgtctgaagaatgccactatagtagttatctattgtgtgccaatctcattgctaggcattggggatgcaaagataaaccatctttattgtgtcttgggtagcagaagaaaatatgtgtaaaatcaatttataatttgtaaactgccacccatatataagctatatctgctgaatgatcattgattactcttatccttagagataacaactgggggcacaaacatttattatcattattgaacctacaacagagatctatgtgtagatttacaaagcctacagttctatacagataggaatgaactattggcttactgaatggtgattactttctgtggggctcggaactacatgccctaggatataaaaatgatgttatcattatagagtgctcacagaaggaaatgaagtaatataggtgtgagatccagaccaaaagtcatttaacaagtttattcagtgatgaaaacatgggacaaatggactaatataaggcagtgtactaagctgagtagagagataaagtcctgtccagaagatacatgcttcctggcctgattgaggagatggaaaatttttgcaaaaaacaaggtgttgtggtcttccatccagtttcttaagtgctgatgataaaagtgaattagacccaccttgacctggcctacagaagtaaaggagtaaaaataaatgcctcaggcgtgctttttgattcatttgataaacaaagcatcttttatgtggaatataccattctgggtcctgaggataagagagatgagggcattagatcactgacagctgaagatagaagaacatctttggtttgattgtttaaataatatttcaatgcctattctctgcaaggtactatgtttcgtaaattaaataggtctggcccagaagacccactcaattgcctttgagattaaaaaaaaaaaaaaaaagaaagaaaaatgcaagtttctttcaaaataaagagacatttttcctagtttcaggaatcccccaaatcacttcctcattggcttagtttaaagccaggagactgataaaagggctcagggtttgttctttaattcattaactaaacattctgcttttattacagttaaatggttcaagatgtaacaactagttttaaaggtatttgctcattggtctggcttagagacaggaagacatatgagcaataaaaaaaagattcttttgcatttaccaatttagtaaaaatttattaaaactgaataaagtgctgttcttaagtgcttgaaagacgtaaaccaaagtgcactttatctcatttatcttatggtggaaacacaggaacaaattctctaagagactgtgtttctttagttgagaagaaacttcattgagtagctgtgatatgttcgatactaaggaaaaactaaacagatcacctttgacatgcgttgtagagtgggaataagagagggctttttattttttcgttcatacgagtattgatgaagatgatactaaatgctaaatgaaatatatctgctccaaaaggcatttattctgacttggagatgcaacaaaaacacaaaaatggaatgaagtgatactcttcatcaaacagaagtgactgttatctcaaccattttgttaaatcctaaacagaaaacaaaaaaaatcatgacgaaaagacacttgcttattaattggcttggaaagtagaatataggagaaaggttactgtttattttttttcatgtattcattcattctacaaatatattcgggtgccaataggtacttggtataaggtttttggccccagagacatgggaaaaaaatgcatgccttcccagagaatgcctaatactttccttttggcttgttttcttgttaggggcatggcttagtccctaaataacattgtgtggtttaattcctactccgtatctcttctaccactctggccactacgataagcaggtagctgggttttgtagtgagcttgctccttaagttacaggaactctccttataatagacacttcattttcctagtccatccctcatgaaaaatgactgaccactgctgggcagcaggagggatgatgaccaactaattcccaaaccccagtctcattggtaccagccttggggaaccacctacacttgagccacaattggttttgaagtgcatttacaaggtttgtctattttcagttctttactttttacatgctgacacatacatacactgcctaaatagatctctttcagaaacaatcctcagataacgcatagcaaaatggagatggagacatgatttctcatgcaacagcttctctaattataccttagaaatgttctcctttttatcatcaaatctgctcaagaagggctttttatagtagaataatatcagtggatgaaaacagcttaacattttaccatgcttaagttttaagaataaaataaaaattggaaataattggccaaaattgaaaggaaaaatttttttaaaatttctctaaatgtaggcctggctgggctttgaccttttccgtttttaaatcactcacagagggtgggacaggaggaagagtgaaggaaaaggtcaaacctgttttaagggcaacctgcctttgttctgaattggtcttaagaacattaccagctccaggtttaaattgttcagtttcatgcagttccaatagctgatcattgttgagatgaggacaaaatcctttgtcctcactagtttgctttacatttttgaaaagtattatttttgtccaagtgcttatcaactaaaccttgtgttaggtaagaatggaatttattaagtgaatcagtgtgacccttcttgtcataagattatcttaaagctgaagccaaaatatgcttctgtagtttctatagcaagccaattacatccataagtggagaaggaaatagataaatgtcaaagtatgattggtggagggagcaaggttgaagataatctggggttgaaattttctagttttcattctgtacatttttagttagacatcagatttgaaatattaatgtttacctttcaatgtgtggtatcagctggactcagtaacacccctttcttcagctggggatggggaatggattattggaaaatggaaagaagaaagtaactaaaagccttcctttcacagtttctggcatcactaccactactgattaaacaagaataagagaacattttatcatcatctgctttattcacataaatgaagttgtgatgaataaatctgcttttatgcagacacaaggaattaagtggcttcgtcattgtccttctacctcaaagataatttattccaaaagctaagataaatggaagactcttgaacttgtgaactgatgtgaaatgcagaatctcttttgagtctttgctgtttggaagattgaaaaatattgttcagcatgggtgaccaccagaaagtaatcttaagccatctagatgtcacaattgaaacaaactggggagttggttgctattgtaaaataaaatatactgttttgaaaaaaaagaattt

SEQ ID NO: 326699 - DNA, 7552 bp, Homo sapiens
ttcacacaaggaaacaagctaatgacccaattgattaccgaattagaggcctcggtaccccccaacaagataaagtctcaaaaacaaccaccacaacgtcaagctcttcattgttcctatctgccaaatcattatacttcctacaagcagtgcagagagctgagtcttcagcaggtccaagaaatttgaacacactgaaggaagtcagccttcccacctgaagatcaacatgcctggcactctagcacttgaggatagctgaatgaatgtgtatttctttgtctctttctttcttgtctttgctctttgttctctatctaaagtgtgtcttacccatttccatgtttctcttgctaatttctttcgtgtgtgcctttgcctcattttctctttttgttcacaagagtggtctgtgtcttgtcttagacatatctctcatttttcattttgttgctatttctctttgctctcctagatgtggctcttctttcacgctttatttcatgtctcctttttgggtcacatgctgtgtgctttttgtccttttcttgttctgtctacctctcctttctctgcctacctctcttttctctttgtgaactgtgattatttgttaccccttccccttctcgttcgttttaaatttcaccttttttctgagtctggcctcctttctgctgtttctactttttatctcacatttctcatttctgcatttcctttctgcctctcttgggctattctctctctcctcccctgcgtgcctcagcatctcttgctgtttgtgattttctatttcagtattaatctctgttggcttgtatttgttctctgcttcttccctttctactcacctttgagtatttcagcctcttcatgaatctatctccctctctttgatttcatgtaatctctccttaaatatttctttgcatatgtgggcaagtgtacgtgtgtgtgtgtcatgtgtggcagaggggcttcctaacccctgcctgataggtgcagaacgtcggctatcagagcaagcattgtggagcggttccttatgccaggctgccatgtgagatgatccaagaccaaaacaaggccctagactgcagtaaaacccagaactcaagtagggcagaaggtggaaggctcatatggatagaaggcccaaagtataagacagatggtttgagacttgagacccgaggactaagatggaaagcccatgttccaagatagatagaagcctcaggcctgaaaccaacaaaagcctcaagagccaagaaaacagagggtggcctgaattggaccgaaggcctgagttggatggaagtctcaaggcttgagttagaagtcttaagacctgggacaggacacatggaaggcctaagaactgagacttgtgacacaaggccaacgacctaagattagcccagggttgtagctggaagacctacaacccaaggatggaaggcccctgtcacaaagcctacctagatggatagaggacccaagcgaaaaaggtatctcaagactaacggccggaatctggaggcccatgacccagaacccaggaaggatagaagcttgaagacctggggaaatcccaagatgagaaccctaaaccctacctcttttctattgtttacacttcttactcttagatatttccagttctcctgtttatctttaagcctgattcttttgagatgtactttttgatgttgccggttacctttagattgacagtattatgcctgggccagtcttgagccagctttaaatcacagcttttacctatttgttaggctatagtgttttgtaaacttctgtttctattcacatcttctccacttgagagagacaccaaaatccagtcagtatctaatctggcttttgttaacttccctcaggagcagacattcatataggtgatactgtatttcagtcctttcttttgaccccagaagccctagactgagaagataaaatggtcaggttgttggggaaaaaaaagtgccaggctctctagagaaaaatgtgaagagatgctccaggccaatgagaagaattagacaagaaatacacagatgtgccagacttctgagaagcacctgccagcaacagcttccttctttgagcttaggtgagcaggattctggggtttgggatttctagtgatggttatggaaagggtgactgtgcctgggacaaagcgaggtcccaaggggacagcctgaactccctgctcatagtagtggccaaataatttggtggactgtgccaacgctactcctgggtttaatacccatctctaggcttaaagatgagagaacctgggactgttgagcatgtttaatactttccttgatttttttcttcctgtttatgtgggaagttgatttaaatgactgataatgtgtatgaaagcactgtaaaacataagagaaaaaccaattagtgtattggcaatcatgcagttaacatttgaaagtgcagtgtaaattgtgaagcattatgtaaatcaggggtccacagtttttctgtaaggggtcaaatcataaatactttagactgtgggccatatggtttctgttacatatttgttttttaaacaacgtttttataaggtcaaaatcattcttagtttttgagccaattggatttggcctgctgttcatagcttaccaccccctgatgtattatttgttattcagagaaaatttctgaatactactagtttccttttctgtgcctgtccctgtgctaggcactaaaaatgcaatgattattgatatctaggtgacctgaaaaaaaatagtgaatgtgctttgtaaactgtaaagcacttgtattctactgtgataagcgttgtggatacaaagaaaggagcaagcataaaaaagtgctctttcaaaaggatatagtactatgcagacacaaggaattgtttgataaatgaataaattatatgtatatttgaggccaatttgtgtttgctgctctggtaattttgagtaaaaatgcagtattccaggtatcagaaacgaaaacacatggaaactgcttttaaactttaaaatatactgaaaacataagggactaagcttgttgtggtcacctataatgtgccagataccatgctgggtgctagagctaccaaagggggaaaagtattctcatagaacaaaaaatttcagaaaggtgcatattaaagtgctttgtaaactaaagcatgatacaaatgtcaatgggctacatatttatgaatgaatgaatggatgaatgaatattaagtgcctcttacataccagctattttgggtactgtaaaatacaagattaattctcctatgtaataagaggaaagtttatcctctatactattcagatgtaaggaatgatatattgcttaattttaaacaatcaagactttactggtgaggttaagttaaattattactgatacatttttccaggtaaccaggaaagagctagtatgaggaaatgaagtaatagatgtgagatccagaccgaaagtcacttaattcagcttgcgaatgtgctttctaaattataaagcacttgtaaatgaaaaatttgatgctttctgtatgaataaaactttctgtaagctaggtattgtctctacaaaattctcattgtatagttaaaccacagtgagaagggttctataagtagttatacaaaccaagggtttaaatacctgttaaatagatcaattttgattgcctactatgtgaactcactgttaaaggcactgaaaatttatcatatttcatttagccacagccaaaaataaggcaatacctatgttagcattttgtgaactctaaggcaccatataaatgtaactgttgattttctcacttggtgctgggtactaggtttataaaattgtatgatagttattatattgtgcaaataaagtaggaaaatttgaataacaatgattatcttttgaatacgcatacgcaagggattggttgtctgaagaatgccactatagtagttatctattgtgtgccaatctcattgctaggcattggggatgcaaagataaaccatctttattgtgtcttgggtagcagaagaaaatatgtgtaaaatcaatttataatttgtaaactgccacccatatataagctatatctgctgaatgatcattgattactcttatccttagagataacaactgggggcacaaacatttattatcattattgaacctacaacagagatctatgtgtagatttacaaagcctacagttctatacagataggaatgaactattggcttactgaatggtgattactttctgtggggctcggaactacatgccctaggatataaaaatgatgttatcattatagagtgctcacagaaggaaatgaagtaatataggtgtgagatccagaccaaaagtcatttaacaagtttattcagtgatgaaaacatgggacaaatggactaatataaggcagtgtactaagctgagtagagagataaagtcctgtccagaagatacatgcttcctggcctgattgaggagatggaaaatttttgcaaaaaacaaggtgttgtggtcttccatccagtttcttaagtgctgatgataaaagtgaattagacccaccttgacctggcctacagaagtaaaggagtaaaaataaatgcctcaggcgtgctttttgattcatttgataaacaaagcatcttttatgtggaatataccattctgggtcctgaggataagagagatgagggcattagatcactgacagctgaagatagaagaacatctttggtttgattgtttaaataatatttcaatgcctattctctgcaaggtactatgtttcgtaaattaaataggtctggcccagaagacccactcaattgcctttgagattaaaaaaaaaaaaaaaaagaaagaaaaatgcaagtttctttcaaaataaagagacatttttcctagtttcaggaatcccccaaatcacttcctcattggcttagtttaaagccaggagactgataaaagggctcagggtttgttctttaattcattaactaaacattctgcttttattacagttaaatggttcaagatgtaacaactagttttaaaggtatttgctcattggtctggcttagagacaggaagacatatgagcaataaaaaaaagattcttttgcatttaccaatttagtaaaaatttattaaaactgaataaagtgctgttcttaagtgcttgaaagacgtaaaccaaagtgcactttatctcatttatcttatggtggaaacacaggaacaaattctctaagagactgtgtttctttagttgagaagaaacttcattgagtagctgtgatatgttcgatactaaggaaaaactaaacagatcacctttgacatgcgttgtagagtgggaataagagagggctttttattttttcgttcatacgagtattgatgaagatgatactaaatgctaaatgaaatatatctgctccaaaaggcatttattctgacttggagatgcaacaaaaacacaaaaatggaatgaagtgatactcttcatcaaacagaagtgactgttatctcaaccattttgttaaatcctaaacagaaaacaaaaaaaatcatgacgaaaagacacttgcttattaattggcttggaaagtagaatataggagaaaggttactgtttattttttttcatgtattcattcattctacaaatatattcgggtgccaataggtacttggtataaggtttttggccccagagacatgggaaaaaaatgcatgccttcccagagaatgcctaatactttccttttggcttgttttcttgttaggggcatggcttagtccctaaataacattgtgtggtttaattcctactccgtatctcttctaccactctggccactacgataagcaggtagctgggttttgtagtgagcttgctccttaagttacaggaactctccttataatagacacttcattttcctagtccatccctcatgaaaaatgactgaccactgctgggcagcaggagggatgatgaccaactaattcccaaaccccagtctcattggtaccagccttggggaaccacctacacttgagccacaattggttttgaagtgcatttacaaggtttgtctattttcagttctttactttttacatgctgacacatacatacactgcctaaatagatctctttcagaaacaatcctcagataacgcatagcaaaatggagatggagacatgatttctcatgcaacagcttctctaattataccttagaaatgttctcctttttatcatcaaatctgctcaagaagggctttttatagtagaataatatcagtggatgaaaacagcttaacattttaccatgcttaagttttaagaataaaataaaaattggaaataattggccaaaattgaaaggaaaaatttttttaaaatttctctaaatgtaggcctggctgggctttgaccttttccgtttttaaatcactcacagagggtgggacaggaggaagagtgaaggaaaaggtcaaacctgttttaagggcaacctgcctttgttctgaattggtcttaagaacattaccagctccaggtttaaattgttcagtttcatgcagttccaatagctgatcattgttgagatgaggacaaaatcctttgtcctcactagtttgctttacatttttgatggaatttattaagtgaatcagtgtgacccttcttgtcataagattatcttaaagctgaagccaaaatatgcttcaaaagaagaggactttattgttcattgtagttcatacattcaaagcatctgaactgtagtttctatagcaagccaattacatccataagtggagaaggaaatagataaatgtcaaagtatgattggtggagggagcaaggttgaagataatctggggttgaaattttctagttttcattctgtacatttttagttagacatcagatttgaaatattaatgtttacctttcaatgtgtggtatcagctggactcagtaacacccctttcttcagctggggatggggaatggattattggaaaatggaaagaagaaagtaactaaaagccttcctttcacagtttctggcatcactaccactactgattaaacaagaataagagaacattttatcatcatctgctttattcacataaatgaagttgtgatgaataaatctgcttttatgcagacacaaggaattaagtggcttcgtcattgtccttctacctcaaagataatttattccaaaagctaagataaatggaagactcttgaacttgtgaactgatgtgaaatgcagaatctcttttgagtctttgctgtttggaagattgaaaaatattgttcagcatgggtgaccaccagaaagtaatcttaagccatctagatgtcacaattgaaacaaactggggagttggttgctattgtaaaataaaatatactgttttgaaaaaaaagaattt

SEQ ID NO: 326700 - DNA, 7552 bp, Homo sapiens
ttcacacaaggaaacaagctaatgacccaattgattaccgaattagaggcctcggtaccccccaacaagataaagtctcaaaaacaaccaccacaacgtcaagctcttcattgttcctatctgccaaatcattatacttcctacaagcagtgcagagagctgagtcttcagcaggtccaagaaatttgaacacactgaaggaagtcagccttcccacctgaagatcaacatgcctggcactctagcacttgaggatagctgaatgaatgtgtatttctttgtctctttctttcttgtctttgctctttgttctctatctaaagtgtgtcttacccatttccatgtttctcttgctaatttctttcgtgtgtgcctttgcctcattttctctttttgttcacaagagtggtctgtgtcttgtcttagacatatctctcatttttcattttgttgctatttctctttgctctcctagatgtggctcttctttcacgctttatttcatgtctcctttttgggtcacatgctgtgtgctttttgtccttttcttgttctgtctacctctcctttctctgcctacctctcttttctctttgtgaactgtgattatttgttaccccttccccttctcgttcgttttaaatttcaccttttttctgagtctggcctcctttctgctgtttctactttttatctcacatttctcatttctgcatttcctttctgcctctcttgggctattctctctctcctcccctgcgtgcctcagcatctcttgctgtttgtgattttctatttcagtattaatctctgttggcttgtatttgttctctgcttcttccctttctactcacctttgagtatttcagcctcttcatgaatctatctccctctctttgatttcatgtaatctctccttaaatatttctttgcatatgtgggcaagtgtacgtgtgtgtgtgtcatgtgtggcagaggggcttcctaacccctgcctgataggtgcagaacgtcggctatcagagcaagcattgtggagcggttccttatgccaggctgccatgtgagatgatccaagaccaaaacaaggccctagactgcagtaaaacccagaactcaagtagggcagaaggtggaaggctcatatggatagaaggcccaaagtataagacagatggtttgagacttgagacccgaggactaagatggaaagcccatgttccaagatagatagaagcctcaggcctgaaaccaacaaaagcctcaagagccaagaaaacagagggtggcctgaattggaccgaaggcctgagttggatggaagtctcaaggcttgagttagaagtcttaagacctgggacaggacacatggaaggcctaagaactgagacttgtgacacaaggccaacgacctaagattagcccagggttgtagctggaagacctacaacccaaggatggaaggcccctgtcacaaagcctacctagatggatagaggacccaagcgaaaaaggtatctcaagactaacggccggaatctggaggcccatgacccagaacccaggaaggatagaagcttgaagacctggggaaatcccaagatgagaaccctaaaccctacctcttttctattgtttacacttcttactcttagatatttccagttctcctgtttatctttaagcctgattcttttgagatgtactttttgatgttgccggttacctttagattgacagtattatgcctgggccagtcttgagccagctttaaatcacagcttttacctatttgttaggctatagtgttttgtaaacttctgtttctattcacatcttctccacttgagagagacaccaaaatccagtcagtatctaatctggcttttgttaacttccctcaggagcagacattcatataggtgatactgtatttcagtcctttcttttgaccccagaagccctagactgagaagataaaatggtcaggttgttggggaaaaaaaagtgccaggctctctagagaaaaatgtgaagagatgctccaggccaatgagaagaattagacaagaaatacacagatgtgccagacttctgagaagcacctgccagcaacagcttccttctttgagcttaggtgagcaggattctggggtttgggatttctagtgatggttatggaaagggtgactgtgcctgggacaaagcgaggtcccaaggggacagcctgaactccctgctcatagtagtggccaaataatttggtggactgtgccaacgctactcctgggtttaatacccatctctaggcttaaagatgagagaacctgggactgttgagcatgtttaatactttccttgatttttttcttcctgtttatgtgggaagttgatttaaatgactgataatgtgtatgaaagcactgtaaaacataagagaaaaaccaattagtgtattggcaatcatgcagttaacatttgaaagtgcagtgtaaattgtgaagcattatgtaaatcaggggtccacagtttttctgtaaggggtcaaatcataaatactttagactgtgggccatatggtttctgttacatatttgttttttaaacaacgtttttataaggtcaaaatcattcttagtttttgagccaattggatttggcctgctgttcatagcttaccaccccctgatgtattatttgttattcagagaaaatttctgaatactactagtttccttttctgtgcctgtccctgtgctaggcactaaaaatgcaatgattattgatatctaggtgacctgaaaaaaaatagtgaatgtgctttgtaaactgtaaagcacttgtattctactgtgataagcgttgtggatacaaagaaaggagcaagcataaaaaagtgctctttcaaaaggatatagtactatgcagacacaaggaattgtttgataaatgaataaattatatgtatatttgaggccaatttgtgtttgctgctctggtaattttgagtaaaaatgcagtattccaggtatcagaaacgaaaacacatggaaactgcttttaaactttaaaatatactgaaaacataagggactaagcttgttgtggtcacctataatgtgccagataccatgctgggtgctagagctaccaaagggggaaaagtattctcatagaacaaaaaatttcagaaaggtgcatattaaagtgctttgtaaactaaagcatgatacaaatgtcaatgggctacatatttatgaatgaatgaatggatgaatgaatattaagtgcctcttacataccagctattttgggtactgtaaaatacaagattaattctcctatgtaataagaggaaagtttatcctctatactattcagatgtaaggaatgatatattgcttaattttaaacaatcaagactttactggtgaggttaagttaaattattactgatacatttttccaggtaaccaggaaagagctagtatgaggaaatgaagtaatagatgtgagatccagaccgaaagtcacttaattcagcttgcgaatgtgctttctaaattataaagcacttgtaaatgaaaaatttgatgctttctgtatgaataaaactttctgtaagctaggtattgtctctacaaaattctcattgtatagttaaaccacagtgagaagggttctataagtagttatacaaaccaagggtttaaatacctgttaaatagatcaattttgattgcctactatgtgaactcactgttaaaggcactgaaaatttatcatatttcatttagccacagccaaaaataaggcaatacctatgttagcattttgtgaactctaaggcaccatataaatgtaactgttgattttctcacttggtgctgggtactaggtttataaaattgtatgatagttattatattgtgcaaataaagtaggaaaatttgaataacaatgattatcttttgaatacgcatacgcaagggattggttgtctgaagaatgccactatagtagttatctattgtgtgccaatctcattgctaggcattggggatgcaaagataaaccatctttattgtgtcttgggtagcagaagaaaatatgtgtaaaatcaatttataatttgtaaactgccacccatatataagctatatctgctgaatgatcattgattactcttatccttagagataacaactgggggcacaaacatttattatcattattgaacctacaacagagatctatgtgtagatttacaaagcctacagttctatacagataggaatgaactattggcttactgaatggtgattactttctgtggggctcggaactacatgccctaggatataaaaatgatgttatcattatagagtgctcacagaaggaaatgaagtaatataggtgtgagatccagaccaaaagtcatttaacaagtttattcagtgatgaaaacatgggacaaatggactaatataaggcagtgtactaagctgagtagagagataaagtcctgtccagaagatacatgcttcctggcctgattgaggagatggaaaatttttgcaaaaaacaaggtgttgtggtcttccatccagtttcttaagtgctgatgataaaagtgaattagacccaccttgacctggcctacagaagtaaaggagtaaaaataaatgcctcaggcgtgctttttgattcatttgataaacaaagcatcttttatgtggaatataccattctgggtcctgaggataagagagatgagggcattagatcactgacagctgaagatagaagaacatctttggtttgattgtttaaataatatttcaatgcctattctctgcaaggtactatgtttcgtaaattaaataggtctggcccagaagacccactcaattgcctttgagattaaaaaaaaaaaaaaaaagaaagaaaaatgcaagtttctttcaaaataaagagacatttttcctagtttcaggaatcccccaaatcacttcctcattggcttagtttaaagccaggagactgataaaagggctcagggtttgttctttaattcattaactaaacattctgcttttattacagttaaatggttcaagatgtaacaactagttttaaaggtatttgctcattggtctggcttagagacaggaagacatatgagcaataaaaaaaagattcttttgcatttaccaatttagtaaaaatttattaaaactgaataaagtgctgttcttaagtgcttgaaagacgtaaaccaaagtgcactttatctcatttatcttatggtggaaacacaggaacaaattctctaagagactgtgtttctttagttgagaagaaacttcattgagtagctgtgatatgttcgatactaaggaaaaactaaacagatcacctttgacatgcgttgtagagtgggaataagagagggctttttattttttcgttcatacgagtattgatgaagatgatactaaatgctaaatgaaatatatctgctccaaaaggcatttattctgacttggagatgcaacaaaaacacaaaaatggaatgaagtgatactcttcatcaaacagaagtgactgttatctcaaccattttgttaaatcctaaacagaaaacaaaaaaaatcatgacgatgtttattttttttcatgtattcattcattctacaaatatattcgggtgccaataggtacttggtataaggtttttggccccagagacatgggaaaaaaatgcatgccttcccagagaatgcctaatactttccttttggcttgttttcttgttaggggcatggcttagtccctaaataacattgtgtggtttaattcctactccgtatctcttctaccactctggccactacgataagcaggtagctgggttttgtagtgagcttgctccttaagttacaggaactctccttataatagacacttcattttcctagtccatccctcatgaaaaatgactgaccactgctgggcagcaggagggatgatgaccaactaattcccaaaccccagtctcattggtaccagccttggggaaccacctacacttgagccacaattggttttgaagtgcatttacaaggtttgtctattttcagttctttactttttacatgctgacacatacatacactgcctaaatagatctctttcagaaacaatcctcagataacgcatagcaaaatggagatggagacatgatttctcatgcaacagcttctctaattataccttagaaatgttctcctttttatcatcaaatctgctcaagaagggctttttatagtagaataatatcagtggatgaaaacagcttaacattttaccatgcttaagttttaagaataaaataaaaattggaaataattggccaaaattgaaaggaaaaatttttttaaaatttctctaaatgtaggcctggctgggctttgaccttttccgtttttaaatcactcacagagggtgggacaggaggaagagtgaaggaaaaggtcaaacctgttttaagggcaacctgcctttgttctgaattggtcttaagaacattaccagctccaggtttaaattgttcagtttcatgcagttccaatagctgatcattgttgagatgaggacaaaatcctttgtcctcactagtttgctttacatttttgaaaagtattatttttgtccaagtgcttatcaactaaaccttgtgttaggtaagaatggaatttattaagtgaatcagtgtgacccttcttgtcataagattatcttaaagctgaagccaaaatatgcttcaaaagaagaggactttattgttcattgtagttcatacattcaaagcatctgaactgtagtttctatagcaagccaattacatccataagtggagaaggaaatagataaatgtcaaagtatgattggtggagggagcaaggttgaagataatctggggttgaaattttctagttttcattctgtacatttttagttagacatcagatttgaaatattaatgtttacctttcaatgtgtggtatcagctggactcagtaacacccctttcttcagctggggatggggaatggattattggaaaatggaaagaagaaagtaactaaaagccttcctttcacagtttctggcatcactaccactactgattaaacaagaataagagaacattttatcatcatctgctttattcacataaatgaagttgtgatgaataaatctgcttttatgcagacacaaggaattaagtggcttcgtcattgtccttctacctcaaagataatttattccaaaagctaagataaatggaagactcttgaacttgtgaactgatgtgaaatgcagaatctcttttgagtctttgctgtttggaagattgaaaaatattgttcagcatgggtgaccaccagaaagtaatcttaagccatctagatgtcacaattgaaacaaactggggagttggttgctattgtaaaataaaatatactgttttgaaaaaaaagaattt

SEQ ID NO: 326701 - DNA, 7555 bp, Homo sapiens
ttcacacaaggaaacaagctaatgacccaattgattaccgaattagaggcctcggtaccccccaacaagataaagtctcaaaaacaaccaccacaacgtcaagctcttcattgttcctatctgccaaatcattatacttcctacaagcagtgcagagagctgagtcttcagcaggtccaagaaatttgaacacactgaaggaagtcagccttcccacctgaagatcaacatgcctggcactctagcacttgaggatagctgaatgaatgtgtatttctttgtctctttctttcttgtctttgctctttgttctctatctaaagtgtgtcttacccatttccatgtttctcttgctaatttctttcgtgtgtgcctttgcctcattttctctttttgttcacaagagtggtctgtgtcttgtcttagacatatctctcatttttcattttgttgctatttctctttgctctcctagatgtggctcttctttcacgctttatttcatgtctcctttttgggtcacatgctgtgtgctttttgtccttttcttgttctgtctacctctcctttctctgcctacctctcttttctctttgtgaactgtgattatttgttaccccttccccttctcgttcgttttaaatttcaccttttttctgagtctggcctcctttctgctgtttctactttttatctcacatttctcatttctgcatttcctttctgcctctcttgggctattctctctctcctcccctgcgtgcctcagcatctcttgctgtttgtgattttctatttcagtattaatctctgttggcttgtatttgttctctgcttcttccctttctactcacctttgagtatttcagcctcttcatgaatctatctccctctctttgatttcatgtaatctctccttaaatatttctttgcatatgtgggcaagtgtacgtgtgtgtgtgtcatgtgtggcagaggggcttcctaacccctgcctgataggtgcagaacgtcggctatcagagcaagcattgtggagcggttccttatgccaggctgccatgtgagatgatccaagaccaaaacaaggccctagactgcagtaaaacccagaactcaagtagggcagaaggtggaaggctcatatggatagaaggcccaaagtataagacagatggtttgagacttgagacccgaggactaagatggaaagcccatgttccaagatagatagaagcctcaggcctgaaaccaacaaaagcctcaagagccaagaaaacagagggtggcctgaattggaccgaaggcctgagttggatggaagtctcaaggcttgagttagaagtcttaagacctgggacaggacacatggaaggcctaagaactgagacttgtgacacaaggccaacgacctaagattagcccagggttgtagctggaagacctacaacccaaggatggaaggcccctgtcacaaagcctacctagatggatagaggacccaagcgaaaaaggtatctcaagactaacggccggaatctggaggcccatgacccagaacccaggaaggatagaagcttgaagacctggggaaatcccaagatgagaaccctaaaccctacctcttttctattgtttacacttcttactcttagatatttccagttctcctgtttatctttaagcctgattcttttgagatgtactttttgatgttgccggttacctttagattgacagtattatgcctgggccagtcttgagccagctttaaatcacagcttttacctatttgttaggctatagtgttttgtaaacttctgtttctattcacatcttctccacttgagagagacaccaaaatccagtcagtatctaatctggcttttgttaacttccctcaggagcagacattcatataggtgatactgtatttcagtcctttcttttgaccccagaagccctagactgagaagataaaatggtcaggttgttggggaaaaaaaagtgccaggctctctagagaaaaatgtgaagagatgctccaggccaatgagaagaattagacaagaaatacacagatgtgccagacttctgagaagcacctgccagcaacagcttccttctttgagcttaggtgagcaggattctggggtttgggatttctagtgatggttatggaaagggtgactgtgcctgggacaaagcgaggtcccaaggggacagcctgaactccctgctcatagtagtggccaaataatttggtggactgtgccaacgctactcctgggtttaatacccatctctaggcttaaagatgagagaacctgggactgttgagcatgtttaatactttccttgatttttttcttcctgtttatgtgggaagttgatttaaatgactgataatgtgtatgaaagcactgtaaaacataagagaaaaaccaattagtgtattggcaatcatgcagttaacatttgaaagtgcagtgtaaattgtgaagcattatgtaaatcaggggtccacagtttttctgtaaggggtcaaatcataaatactttagactgtgggccatatggtttctgttacatatttgttttttaaacaacgtttttataaggtcaaaatcattcttagtttttgagccaattggatttggcctgctgttcatagcttaccaccccctgatgtattatttgttattcagagaaaatttctgaatactactagtttccttttctgtgcctgtccctgtgctaggcactaaaaatgcaatgattattgatatctaggtgacctgaaaaaaaatagtgaatgtgctttgtaaactgtaaagcacttgtattctactgtgataagcgttgtggatacaaagaaaggagcaagcataaaaaagtgctctttcaaaaggatatagtactatgcagacacaaggaattgtttgataaatgaataaattatatgtatatttgaggccaatttgtgtttgctgctctggtaattttgagtaaaaatgcagtattccaggtatcagaaacgaaaacacatggaaactgcttttaaactttaaaatatactgaaaacataagggactaagcttgttgtggtcacctataatgtgccagataccatgctgggtgctagagctaccaaagggggaaaagtattctcatagaacaaaaaatttcagaaaggtgcatattaaagtgctttgtaaactaaagcatgatacaaatgtcaatgggctacatatttatgaatgaatgaatggatgaatgaatattaagtgcctcttacataccagctattttgggtactgtaaaatacaagattaattctcctatgtaataagaggaaagtttatcctctatactattcagatgtaaggaatgatatattgcttaattttaaacaatcaagactttactggtgaggttaagttaaattattactgatacatttttccaggtaaccaggaaagagctagtatgaggaaatgaagtaatagatgtgagatccagaccgaaagtcacttaattcagcttgcgaatgtgctttctaaattataaagcacttgtaaatgaaaaatttgatgctttctgtatgaataaaactttctgtaagctaggtattgtctctacaaaattctcattgtatagttaaaccacagtgagaagggttctataagtagttatacaaaccaagggtttaaatacctgttaaatagatcaattttgattgcctactatgtgaactcactgttaaaggcactgaaaatttatcatatttcatttagccacagccaaaaataaggcaatacctatgttagcattttgtgaactctaaggcaccatataaatgtaactgttgattttctcacttggtgctgggtactaggtttataaaattgtatgatagttattatattgtgcaaataaagtaggaaaatttgaataacaatgattatcttttgaatacgcatacgcaagggattggttgtctgaagaatgccactatagtagttatctattgtgtgccaatctcattgctaggcattggggatgcaaagataaaccatctttattgtgtcttgggtagcagaagaaaatatgtgtaaaatcaatttataatttgtaaactgccacccatatataagctatatctgctgaatgatcattgattactcttatccttagagataacaactgggggcacaaacatttattatcattattgaacctacaacagagatctatgtgtagatttacaaagcctacagttctatacagataggaatgaactattggcttactgaatggtgattactttctgtggggctcggaactacatgccctaggatataaaaatgatgttatcattatagagtgctcacagaaggaaatgaagtaatataggtgtgagatccagaccaaaagtcatttaacaagtttattcagtgatgaaaacatgggacaaatggactaatataaggcagtgtactaagctgagtagagagataaagtcctgtccagaagatacatgcttcctggcctgattgaggagatggaaaatttttgcaaaaaacaaggtgttgtggtcttccatccagtttcttaagtgctgatgataaaagtgaattagacccaccttgacctggcctacagaagtaaaggagtaaaaataaatgcctcaggcgtgctttttgattcatttgataaacaaagcatcttttatgtggaatataccattctgggtcctgaggataagagagatgagggcattagatcactgacagctgaagatagaagaacatctttggtttgattgtttaaataatatttcaatgcctattctctgcaaggtactatgtttcgtaaattaaataggtctggcccagaagacccactcaattgcctttgagattaaaaaaaaaaaaaaaaagaaagaaaaatgcaagtttctttcaaaataaagagacatttttcctagtttcaggaatcccccaaatcacttcctcattggcttagtttaaagccaggagactgataaaagggctcagggtttgttctttaattcattaactaaacattctgcttttattacagttaaatggttcaagatgtaacaactagttttaaaggtatttgctcattggtctggcttagagacaggaagacatatgagcaataaaaaaaagattcttttgcatttaccaatttagtaaaaatttattaaaactgaataaagtgctgttcttaagtgcttgaaagacgtaaaccaaagtgcactttatctcatttatcttatggtggaaacacaggaacaaattctctaagagactgtgtttctttagttgagaagaaacttcattgagtagctgtgatatgttcgatactaaggaggctttttattttttcgttcatacgagtattgatgaagatgatactaaatgctaaatgaaatatatctgctccaaaaggcatttattctgacttggagatgcaacaaaaacacaaaaatggaatgaagtgatactcttcatcaaacagaagtgactgttatctcaaccattttgttaaatcctaaacagaaaacaaaaaaaatcatgacgaaaagacacttgcttattaattggcttggaaagtagaatataggagaaaggttactgtttattttttttcatgtattcattcattctacaaatatattcgggtgccaataggtacttggtataaggtttttggccccagagacatgggaaaaaaatgcatgccttcccagagaatgcctaatactttccttttggcttgttttcttgttaggggcatggcttagtccctaaataacattgtgtggtttaattcctactccgtatctcttctaccactctggccactacgataagcaggtagctgggttttgtagtgagcttgctccttaagttacaggaactctccttataatagacacttcattttcctagtccatccctcatgaaaaatgactgaccactgctgggcagcaggagggatgatgaccaactaattcccaaaccccagtctcattggtaccagccttggggaaccacctacacttgagccacaattggttttgaagtgcatttacaaggtttgtctattttcagttctttactttttacatgctgacacatacatacactgcctaaatagatctctttcagaaacaatcctcagataacgcatagcaaaatggagatggagacatgatttctcatgcaacagcttctctaattataccttagaaatgttctcctttttatcatcaaatctgctcaagaagggctttttatagtagaataatatcagtggatgaaaacagcttaacattttaccatgcttaagttttaagaataaaataaaaattggaaataattggccaaaattgaaaggaaaaatttttttaaaatttctctaaatgtaggcctggctgggctttgaccttttccgtttttaaatcactcacagagggtgggacaggaggaagagtgaaggaaaaggtcaaacctgttttaagggcaacctgcctttgttctgaattggtcttaagaacattaccagctccaggtttaaattgttcagtttcatgcagttccaatagctgatcattgttgagatgaggacaaaatcctttgtcctcactagtttgctttacatttttgaaaagtattatttttgtccaagtgcttatcaactaaaccttgtgttaggtaagaatggaatttattaagtgaatcagtgtgacccttcttgtcataagattatcttaaagctgaagccaaaatatgcttcaaaagaagaggactttattgttcattgtagttcatacattcaaagcatctgaactgtagtttctatagcaagccaattacatccataagtggagaaggaaatagataaatgtcaaagtatgattggtggagggagcaaggttgaagataatctggggttgaaattttctagttttcattctgtacatttttagttagacatcagatttgaaatattaatgtttacctttcaatgtgtggtatcagctggactcagtaacacccctttcttcagctggggatggggaatggattattggaaaatggaaagaagaaagtaactaaaagccttcctttcacagtttctggcatcactaccactactgattaaacaagaataagagaacattttatcatcatctgctttattcacataaatgaagttgtgatgaataaatctgcttttatgcagacacaaggaattaagtggcttcgtcattgtccttctacctcaaagataatttattccaaaagctaagataaatggaagactcttgaacttgtgaactgatgtgaaatgcagaatctcttttgagtctttgctgtttggaagattgaaaaatattgttcagcatgggtgaccaccagaaagtaatcttaagccatctagatgtcacaattgaaacaaactggggagttggttgctattgtaaaataaaatatactgttttgaaaaaaaagaattt

SEQ ID NO: 326702 - DNA, 7552 bp, Homo sapiens
ttcacacaaggaaacaagctaatgacccaattgattaccgaattagaggcctcggtaccccccaacaagataaagtctcaaaaacaaccaccacaacgtcaagctcttcattgttcctatctgccaaatcattatacttcctacaagcagtgcagagagctgagtcttcagcaggtccaagaaatttgaacacactgaaggaagtcagccttcccacctgaagatcaacatgcctggcactctagcacttgaggatagctgaatgaatgtgtatttctttgtctctttctttcttgtctttgctctttgttctctatctaaagtgtgtcttacccatttccatgtttctcttgctaatttctttcgtgtgtgcctttgcctcattttctctttttgttcacaagagtggtctgtgtcttgtcttagacatatctctcatttttcattttgttgctatttctctttgctctcctagatgtggctcttctttcacgctttatttcatgtctcctttttgggtcacatgctgtgtgctttttgtccttttcttgttctgtctacctctcctttctctgcctacctctcttttctctttgtgaactgtgattatttgttaccccttccccttctcgttcgttttaaatttcaccttttttctgagtctggcctcctttctgctgtttctactttttatctcacatttctcatttctgcatttcctttctgcctctcttgggctattctctctctcctcccctgcgtgcctcagcatctcttgctgtttgtgattttctatttcagtattaatctctgttggcttgtatttgttctctgcttcttccctttctactcacctttgagtatttcagcctcttcatgaatctatctccctctctttgatttcatgtaatctctccttaaatatttctttgcatatgtgggcaagtgtacgtgtgtgtgtgtcatgtgtggcagaggggcttcctaacccctgcctgataggtgcagaacgtcggctatcagagcaagcattgtggagcggttccttatgccaggctgccatgtgagatgatccaagaccaaaacaaggccctagactgcagtaaaacccagaactcaagtagggcagaaggtggaaggctcatatggatagaaggcccaaagtataagacagatggtttgagacttgagacccgaggactaagatggaaagcccatgttccaagatagatagaagcctcaggcctgaaaccaacaaaagcctcaagagccaagaaaacagagggtggcctgaattggaccgaaggcctgagttggatggaagtctcaaggcttgagttagaagtcttaagacctgggacaggacacatggaaggcctaagaactgagacttgtgacacaaggccaacgacctaagattagcccagggttgtagctggaagacctacaacccaaggatggaaggcccctgtcacaaagcctacctagatggatagaggacccaagcgaaaaaggtatctcaagactaacggccggaatctggaggcccatgacccagaacccaggaaggatagaagcttgaagacctggggaaatcccaagatgagaaccctaaaccctacctcttttctattgtttacacttcttactcttagatatttccagttctcctgtttatctttaagcctgattcttttgagatgtactttttgatgttgccggttacctttagattgacagtattatgcctgggccagtcttgagccagctttaaatcacagcttttacctatttgttaggctatagtgttttgtaaacttctgtttctattcacatcttctccacttgagagagacaccaaaatccagtcagtatctaatctggcttttgttaacttccctcaggagcagacattcatataggtgatactgtatttcagtcctttcttttgaccccagaagccctagactgagaagataaaatggtcaggttgttggggaaaaaaaagtgccaggctctctagagagatgtgccagacttctgagaagcacctgccagcaacagcttccttctttgagcttaggtgagcaggattctggggtttgggatttctagtgatggttatggaaagggtgactgtgcctgggacaaagcgaggtcccaaggggacagcctgaactccctgctcatagtagtggccaaataatttggtggactgtgccaacgctactcctgggtttaatacccatctctaggcttaaagatgagagaacctgggactgttgagcatgtttaatactttccttgatttttttcttcctgtttatgtgggaagttgatttaaatgactgataatgtgtatgaaagcactgtaaaacataagagaaaaaccaattagtgtattggcaatcatgcagttaacatttgaaagtgcagtgtaaattgtgaagcattatgtaaatcaggggtccacagtttttctgtaaggggtcaaatcataaatactttagactgtgggccatatggtttctgttacatatttgttttttaaacaacgtttttataaggtcaaaatcattcttagtttttgagccaattggatttggcctgctgttcatagcttaccaccccctgatgtattatttgttattcagagaaaatttctgaatactactagtttccttttctgtgcctgtccctgtgctaggcactaaaaatgcaatgattattgatatctaggtgacctgaaaaaaaatagtgaatgtgctttgtaaactgtaaagcacttgtattctactgtgataagcgttgtggatacaaagaaaggagcaagcataaaaaagtgctctttcaaaaggatatagtactatgcagacacaaggaattgtttgataaatgaataaattatatgtatatttgaggccaatttgtgtttgctgctctggtaattttgagtaaaaatgcagtattccaggtatcagaaacgaaaacacatggaaactgcttttaaactttaaaatatactgaaaacataagggactaagcttgttgtggtcacctataatgtgccagataccatgctgggtgctagagctaccaaagggggaaaagtattctcatagaacaaaaaatttcagaaaggtgcatattaaagtgctttgtaaactaaagcatgatacaaatgtcaatgggctacatatttatgaatgaatgaatggatgaatgaatattaagtgcctcttacataccagctattttgggtactgtaaaatacaagattaattctcctatgtaataagaggaaagtttatcctctatactattcagatgtaaggaatgatatattgcttaattttaaacaatcaagactttactggtgaggttaagttaaattattactgatacatttttccaggtaaccaggaaagagctagtatgaggaaatgaagtaatagatgtgagatccagaccgaaagtcacttaattcagcttgcgaatgtgctttctaaattataaagcacttgtaaatgaaaaatttgatgctttctgtatgaataaaactttctgtaagctaggtattgtctctacaaaattctcattgtatagttaaaccacagtgagaagggttctataagtagttatacaaaccaagggtttaaatacctgttaaatagatcaattttgattgcctactatgtgaactcactgttaaaggcactgaaaatttatcatatttcatttagccacagccaaaaataaggcaatacctatgttagcattttgtgaactctaaggcaccatataaatgtaactgttgattttctcacttggtgctgggtactaggtttataaaattgtatgatagttattatattgtgcaaataaagtaggaaaatttgaataacaatgattatcttttgaatacgcatacgcaagggattggttgtctgaagaatgccactatagtagttatctattgtgtgccaatctcattgctaggcattggggatgcaaagataaaccatctttattgtgtcttgggtagcagaagaaaatatgtgtaaaatcaatttataatttgtaaactgccacccatatataagctatatctgctgaatgatcattgattactcttatccttagagataacaactgggggcacaaacatttattatcattattgaacctacaacagagatctatgtgtagatttacaaagcctacagttctatacagataggaatgaactattggcttactgaatggtgattactttctgtggggctcggaactacatgccctaggatataaaaatgatgttatcattatagagtgctcacagaaggaaatgaagtaatataggtgtgagatccagaccaaaagtcatttaacaagtttattcagtgatgaaaacatgggacaaatggactaatataaggcagtgtactaagctgagtagagagataaagtcctgtccagaagatacatgcttcctggcctgattgaggagatggaaaatttttgcaaaaaacaaggtgttgtggtcttccatccagtttcttaagtgctgatgataaaagtgaattagacccaccttgacctggcctacagaagtaaaggagtaaaaataaatgcctcaggcgtgctttttgattcatttgataaacaaagcatcttttatgtggaatataccattctgggtcctgaggataagagagatgagggcattagatcactgacagctgaagatagaagaacatctttggtttgattgtttaaataatatttcaatgcctattctctgcaaggtactatgtttcgtaaattaaataggtctggcccagaagacccactcaattgcctttgagattaaaaaaaaaaaaaaaaagaaagaaaaatgcaagtttctttcaaaataaagagacatttttcctagtttcaggaatcccccaaatcacttcctcattggcttagtttaaagccaggagactgataaaagggctcagggtttgttctttaattcattaactaaacattctgcttttattacagttaaatggttcaagatgtaacaactagttttaaaggtatttgctcattggtctggcttagagacaggaagacatatgagcaataaaaaaaagattcttttgcatttaccaatttagtaaaaatttattaaaactgaataaagtgctgttcttaagtgcttgaaagacgtaaaccaaagtgcactttatctcatttatcttatggtggaaacacaggaacaaattctctaagagactgtgtttctttagttgagaagaaacttcattgagtagctgtgatatgttcgatactaaggaaaaactaaacagatcacctttgacatgcgttgtagagtgggaataagagagggctttttattttttcgttcatacgagtattgatgaagatgatactaaatgctaaatgaaatatatctgctccaaaaggcatttattctgacttggagatgcaacaaaaacacaaaaatggaatgaagtgatactcttcatcaaacagaagtgactgttatctcaaccattttgttaaatcctaaacagaaaacaaaaaaaatcatgacgaaaagacacttgcttattaattggcttggaaagtagaatataggagaaaggttactgtttattttttttcatgtattcattcattctacaaatatattcgggtgccaataggtacttggtataaggtttttggccccagagacatgggaaaaaaatgcatgccttcccagagaatgcctaatactttccttttggcttgttttcttgttaggggcatggcttagtccctaaataacattgtgtggtttaattcctactccgtatctcttctaccactctggccactacgataagcaggtagctgggttttgtagtgagcttgctccttaagttacaggaactctccttataatagacacttcattttcctagtccatccctcatgaaaaatgactgaccactgctgggcagcaggagggatgatgaccaactaattcccaaaccccagtctcattggtaccagccttggggaaccacctacacttgagccacaattggttttgaagtgcatttacaaggtttgtctattttcagttctttactttttacatgctgacacatacatacactgcctaaatagatctctttcagaaacaatcctcagataacgcatagcaaaatggagatggagacatgatttctcatgcaacagcttctctaattataccttagaaatgttctcctttttatcatcaaatctgctcaagaagggctttttatagtagaataatatcagtggatgaaaacagcttaacattttaccatgcttaagttttaagaataaaataaaaattggaaataattggccaaaattgaaaggaaaaatttttttaaaatttctctaaatgtaggcctggctgggctttgaccttttccgtttttaaatcactcacagagggtgggacaggaggaagagtgaaggaaaaggtcaaacctgttttaagggcaacctgcctttgttctgaattggtcttaagaacattaccagctccaggtttaaattgttcagtttcatgcagttccaatagctgatcattgttgagatgaggacaaaatcctttgtcctcactagtttgctttacatttttgaaaagtattatttttgtccaagtgcttatcaactaaaccttgtgttaggtaagaatggaatttattaagtgaatcagtgtgacccttcttgtcataagattatcttaaagctgaagccaaaatatgcttcaaaagaagaggactttattgttcattgtagttcatacattcaaagcatctgaactgtagtttctatagcaagccaattacatccataagtggagaaggaaatagataaatgtcaaagtatgattggtggagggagcaaggttgaagataatctggggttgaaattttctagttttcattctgtacatttttagttagacatcagatttgaaatattaatgtttacctttcaatgtgtggtatcagctggactcagtaacacccctttcttcagctggggatggggaatggattattggaaaatggaaagaagaaagtaactaaaagccttcctttcacagtttctggcatcactaccactactgattaaacaagaataagagaacattttatcatcatctgctttattcacataaatgaagttgtgatgaataaatctgcttttatgcagacacaaggaattaagtggcttcgtcattgtccttctacctcaaagataatttattccaaaagctaagataaatggaagactcttgaacttgtgaactgatgtgaaatgcagaatctcttttgagtctttgctgtttggaagattgaaaaatattgttcagcatgggtgaccaccagaaagtaatcttaagccatctagatgtcacaattgaaacaaactggggagttggttgctattgtaaaataaaatatactgttttgaaaaaaaagaattt

SEQ ID NO: 326703 - DNA, 7549 bp, Homo sapiens
ttcacacaaggaaacaagctaatgacccaattgattaccgaattagaggcctcggtaccccccaacaagataaagtctcaaaaacaaccaccacaacgtcaagctcttcattgttcctatctgccaaatcattatacttcctacaagcagtgcagagagctgagtcttcagcaggtccaagaaatttgaacacactgaaggaagtcagccttcccacctgaagatcaacatgcctggcactctagcacttgaggatagctgaatgaatgtgtatttctttgtctctttctttcttgtctttgctctttgttctctatctaaagtgtgtcttacccatttccatgtttctcttgctaatttctttcgtgtgtgcctttgcctcattttctctttttgttcacaagagtggtctgtgtcttgtcttagacatatctctcatttttcattttgttgctatttctctttgctctcctagatgtggctcttctttcacgctttatttcatgtctcctttttgggtcacatgctgtgtgctttttgtccttttcttgttctgtctacctctcctttctctgcctacctctcttttctctttgtgaactgtgattatttgttaccccttccccttctcgttcgttttaaatttcaccttttttctgagtctggcctcctttctgctgtttctactttttatctcacatttctcatttctgcatttcctttctgcctctcttgggctattctctctctcctcccctgcgtgcctcagcatctcttgctgtttgtgattttctatttcagtattaatctctgttggcttgtatttgttctctgcttcttccctttctactcacctttgagtatttcagcctcttcatgaatctatctccctctctttgatttcatgtaatctctccttaaatatttctttgcatatgtgggcaagtgtacgtgtgtgtgtgtcatgtgtggcagaggggcttcctaacccctgcctgataggtgcagaacgtcggctatcagagcaagcattgtggagcggttccttatgccaggctgccatgtgagatgatccaagaccaaaacaaggccctagactgcagtaaaacccagaactcaagtagggcagaaggtggaaggctcatatggatagaaggcccaaagtataagacagatggtttgagacttgagacccgaggactaagatggaaagcccatgttccaagatagatagaagcctcaggcctgaaaccaacaaaagcctcaagagccaagaaaacagagggtggcctgaattggaccgaaggcctgagttggatggaagtctcaaggcttgagttagaagtcttaagacctgggacaggacacatggaaggcctaagaactgagacttgtgacacaaggccaacgacctaagattagcccagggttgtagctggaagacctacaacccaaggatggaaggcccctgtcacaaagcctacctagatggatagaggacccaagcgaaaaaggtatctcaagactaacggccggaatctggaggcccatgacccagaacccaggaaggatagaagcttgaagacctggggaaatcccaagatgagaaccctaaaccctacctcttttctattgtttacacttcttactcttagatatttccagttctcctgtttatctttaagcctgattcttttgagatgtactttttgatgttgccggttacctttagattgacagtattatgcctgggccagtcttgagccagctttaaatcacagcttttacctatttgttaggctatagtgttttgtaaacttctgtttctattcacatcttctccacttgagagagacaccaaaatccagtcagtatctaatctggcttttgttaacttccctcaggagcagacattcatataggtgatactgtatttcagtcctttcttttgaccccagaagccctagactgagaagataaaatggtcaggttgttggggaaaaaaaagtgccaggctctctagagaaaaatgtgaagagatgctccaggccaatgagaagaattagacaagaaatacacagatgtgccagacttctgagaagcacctgccagcaacagcttccttctttgagcttaggtgagcaggattctggggtttgggatttctagtgatggttatggaaagggtgactgtgcctgggacaaagcgaggtcccaaggggacagcctgaactccctgctcatagtagtggccaaataatttggtggactgtgccaacgctactcctgggtttaatacccatctctaggcttaaagatgagagaacctgggactgttgagcatgtttaatactttccttgatttttttcttcctgtttatgtgggaagttgatttaaatgactgataatgtgtatgaaagcactgtaaaaagtgtaaattgtgaagcattatgtaaatcaggggtccacagtttttctgtaaggggtcaaatcataaatactttagactgtgggccatatggtttctgttacatatttgttttttaaacaacgtttttataaggtcaaaatcattcttagtttttgagccaattggatttggcctgctgttcatagcttaccaccccctgatgtattatttgttattcagagaaaatttctgaatactactagtttccttttctgtgcctgtccctgtgctaggcactaaaaatgcaatgattattgatatctaggtgacctgaaaaaaaatagtgaatgtgctttgtaaactgtaaagcacttgtattctactgtgataagcgttgtggatacaaagaaaggagcaagcataaaaaagtgctctttcaaaaggatatagtactatgcagacacaaggaattgtttgataaatgaataaattatatgtatatttgaggccaatttgtgtttgctgctctggtaattttgagtaaaaatgcagtattccaggtatcagaaacgaaaacacatggaaactgcttttaaactttaaaatatactgaaaacataagggactaagcttgttgtggtcacctataatgtgccagataccatgctgggtgctagagctaccaaagggggaaaagtattctcatagaacaaaaaatttcagaaaggtgcatattaaagtgctttgtaaactaaagcatgatacaaatgtcaatgggctacatatttatgaatgaatgaatggatgaatgaatattaagtgcctcttacataccagctattttgggtactgtaaaatacaagattaattctcctatgtaataagaggaaagtttatcctctatactattcagatgtaaggaatgatatattgcttaattttaaacaatcaagactttactggtgaggttaagttaaattattactgatacatttttccaggtaaccaggaaagagctagtatgaggaaatgaagtaatagatgtgagatccagaccgaaagtcacttaattcagcttgcgaatgtgctttctaaattataaagcacttgtaaatgaaaaatttgatgctttctgtatgaataaaactttctgtaagctaggtattgtctctacaaaattctcattgtatagttaaaccacagtgagaagggttctataagtagttatacaaaccaagggtttaaatacctgttaaatagatcaattttgattgcctactatgtgaactcactgttaaaggcactgaaaatttatcatatttcatttagccacagccaaaaataaggcaatacctatgttagcattttgtgaactctaaggcaccatataaatgtaactgttgattttctcacttggtgctgggtactaggtttataaaattgtatgatagttattatattgtgcaaataaagtaggaaaatttgaataacaatgattatcttttgaatacgcatacgcaagggattggttgtctgaagaatgccactatagtagttatctattgtgtgccaatctcattgctaggcattggggatgcaaagataaaccatctttattgtgtcttgggtagcagaagaaaatatgtgtaaaatcaatttataatttgtaaactgccacccatatataagctatatctgctgaatgatcattgattactcttatccttagagataacaactgggggcacaaacatttattatcattattgaacctacaacagagatctatgtgtagatttacaaagcctacagttctatacagataggaatgaactattggcttactgaatggtgattactttctgtggggctcggaactacatgccctaggatataaaaatgatgttatcattatagagtgctcacagaaggaaatgaagtaatataggtgtgagatccagaccaaaagtcatttaacaagtttattcagtgatgaaaacatgggacaaatggactaatataaggcagtgtactaagctgagtagagagataaagtcctgtccagaagatacatgcttcctggcctgattgaggagatggaaaatttttgcaaaaaacaaggtgttgtggtcttccatccagtttcttaagtgctgatgataaaagtgaattagacccaccttgacctggcctacagaagtaaaggagtaaaaataaatgcctcaggcgtgctttttgattcatttgataaacaaagcatcttttatgtggaatataccattctgggtcctgaggataagagagatgagggcattagatcactgacagctgaagatagaagaacatctttggtttgattgtttaaataatatttcaatgcctattctctgcaaggtactatgtttcgtaaattaaataggtctggcccagaagacccactcaattgcctttgagattaaaaaaaaaaaaaaaaagaaagaaaaatgcaagtttctttcaaaataaagagacatttttcctagtttcaggaatcccccaaatcacttcctcattggcttagtttaaagccaggagactgataaaagggctcagggtttgttctttaattcattaactaaacattctgcttttattacagttaaatggttcaagatgtaacaactagttttaaaggtatttgctcattggtctggcttagagacaggaagacatatgagcaataaaaaaaagattcttttgcatttaccaatttagtaaaaatttattaaaactgaataaagtgctgttcttaagtgcttgaaagacgtaaaccaaagtgcactttatctcatttatcttatggtggaaacacaggaacaaattctctaagagactgtgtttctttagttgagaagaaacttcattgagtagctgtgatatgttcgatactaaggaaaaactaaacagatcacctttgacatgcgttgtagagtgggaataagagagggctttttattttttcgttcatacgagtattgatgaagatgatactaaatgctaaatgaaatatatctgctccaaaaggcatttattctgacttggagatgcaacaaaaacacaaaaatggaatgaagtgatactcttcatcaaacagaagtgactgttatctcaaccattttgttaaatcctaaacagaaaacaaaaaaaatcatgacgaaaagacacttgcttattaattggcttggaaagtagaatataggagaaaggttactgtttattttttttcatgtattcattcattctacaaatatattcgggtgccaataggtacttggtataaggtttttggccccagagacatgggaaaaaaatgcatgccttcccagagaatgcctaatactttccttttggcttgttttcttgttaggggcatggcttagtccctaaataacattgtgtggtttaattcctactccgtatctcttctaccactctggccactacgataagcaggtagctgggttttgtagtgagcttgctccttaagttacaggaactctccttataatagacacttcattttcctagtccatccctcatgaaaaatgactgaccactgctgggcagcaggagggatgatgaccaactaattcccaaaccccagtctcattggtaccagccttggggaaccacctacacttgagccacaattggttttgaagtgcatttacaaggtttgtctattttcagttctttactttttacatgctgacacatacatacactgcctaaatagatctctttcagaaacaatcctcagataacgcatagcaaaatggagatggagacatgatttctcatgcaacagcttctctaattataccttagaaatgttctcctttttatcatcaaatctgctcaagaagggctttttatagtagaataatatcagtggatgaaaacagcttaacattttaccatgcttaagttttaagaataaaataaaaattggaaataattggccaaaattgaaaggaaaaatttttttaaaatttctctaaatgtaggcctggctgggctttgaccttttccgtttttaaatcactcacagagggtgggacaggaggaagagtgaaggaaaaggtcaaacctgttttaagggcaacctgcctttgttctgaattggtcttaagaacattaccagctccaggtttaaattgttcagtttcatgcagttccaatagctgatcattgttgagatgaggacaaaatcctttgtcctcactagtttgctttacatttttgaaaagtattatttttgtccaagtgcttatcaactaaaccttgtgttaggtaagaatggaatttattaagtgaatcagtgtgacccttcttgtcataagattatcttaaagctgaagccaaaatatgcttcaaaagaagaggactttattgttcattgtagttcatacattcaaagcatctgaactgtagtttctatagcaagccaattacatccataagtggagaaggaaatagataaatgtcaaagtatgattggtggagggagcaaggttgaagataatctggggttgaaattttctagttttcattctgtacatttttagttagacatcagatttgaaatattaatgtttacctttcaatgtgtggtatcagctggactcagtaacacccctttcttcagctggggatggggaatggattattggaaaatggaaagaagaaagtaactaaaagccttcctttcacagtttctggcatcactaccactactgattaaacaagaataagagaacattttatcatcatctgctttattcacataaatgaagttgtgatgaataaatctgcttttatgcagacacaaggaattaagtggcttcgtcattgtccttctacctcaaagataatttattccaaaagctaagataaatggaagactcttgaacttgtgaactgatgtgaaatgcagaatctcttttgagtctttgctgtttggaagattgaaaaatattgttcagcatgggtgaccaccagaaagtaatcttaagccatctagatgtcacaattgaaacaaactggggagttggttgctattgtaaaataaaatatactgttttgaaaaaaaagaattt

SEQ ID NO: 326704 - DNA, 7552 bp, Homo sapiens
ttcacacaaggaaacaagctaatgacccaattgattaccgaattagaggcctcggtaccccccaacaagataaagtctcaaaaacaaccaccacaacgtcaagctcttcattgttcctatctgccaaatcattatacttcctacaagcagtgcagagagctgagtcttcagcaggtccaagaaatttgaacacactgaaggaagtcagccttcccacctgaagatcaacatgcctggcactctagcacttgaggatagctgaatgaatgtgtatttctttgtctctttctttcttgtctttgctctttgttctctatctaaagtgtgtcttacccatttccatgtttctcttgctaatttctttcgtgtgtgcctttgcctcattttctctttttgttcacaagagtggtctgtgtcttgtcttagacatatctctcatttttcattttgttgctatttctctttgctctcctagatgtggctcttctttcacgctttatttcatgtctcctttttgggtcacatgctgtgtgctttttgtccttttcttgttctgtctacctctcctttctctgcctacctctcttttctctttgtgaactgtgattatttgttaccccttccccttctcgttcgttttaaatttcaccttttttctgagtctggcctcctttctgctgtttctactttttatctcacatttctcatttctgcatttcctttctgcctctcttgggctattctctctctcctcccctgcgtgcctcagcatctcttgctgtttgtgattttctatttcagtattaatctctgttggcttgtatttgttctctgcttcttccctttctactcacctttgagtatttcagcctcttcatgaatctatctccctctctttgatttcatgtaatctctccttaaatatttctttgcatatgtgggcaagtgtacgtgtgtgtgtgtcatgtgtggcagaggggcttcctaacccctgcctgataggtgcagaacgtcggctatcagagcaagcattgtggagcggttccttatgccaggctgccatgtgagatgatccaagaccaaaacaaggccctagactgcagtaaaacccagaactcaagtagggcagaaggtggaaggctcatatggatagaaggcccaaagtataagacagatggtttgagacttgagacccgaggactaagatggaaagcccatgttccaagatagatagaagcctcaggcctgaaaccaacaaaagcctcaagagccaagaagcttgagttagaagtcttaagacctgggacaggacacatggaaggcctaagaactgagacttgtgacacaaggccaacgacctaagattagcccagggttgtagctggaagacctacaacccaaggatggaaggcccctgtcacaaagcctacctagatggatagaggacccaagcgaaaaaggtatctcaagactaacggccggaatctggaggcccatgacccagaacccaggaaggatagaagcttgaagacctggggaaatcccaagatgagaaccctaaaccctacctcttttctattgtttacacttcttactcttagatatttccagttctcctgtttatctttaagcctgattcttttgagatgtactttttgatgttgccggttacctttagattgacagtattatgcctgggccagtcttgagccagctttaaatcacagcttttacctatttgttaggctatagtgttttgtaaacttctgtttctattcacatcttctccacttgagagagacaccaaaatccagtcagtatctaatctggcttttgttaacttccctcaggagcagacattcatataggtgatactgtatttcagtcctttcttttgaccccagaagccctagactgagaagataaaatggtcaggttgttggggaaaaaaaagtgccaggctctctagagaaaaatgtgaagagatgctccaggccaatgagaagaattagacaagaaatacacagatgtgccagacttctgagaagcacctgccagcaacagcttccttctttgagcttaggtgagcaggattctggggtttgggatttctagtgatggttatggaaagggtgactgtgcctgggacaaagcgaggtcccaaggggacagcctgaactccctgctcatagtagtggccaaataatttggtggactgtgccaacgctactcctgggtttaatacccatctctaggcttaaagatgagagaacctgggactgttgagcatgtttaatactttccttgatttttttcttcctgtttatgtgggaagttgatttaaatgactgataatgtgtatgaaagcactgtaaaacataagagaaaaaccaattagtgtattggcaatcatgcagttaacatttgaaagtgcagtgtaaattgtgaagcattatgtaaatcaggggtccacagtttttctgtaaggggtcaaatcataaatactttagactgtgggccatatggtttctgttacatatttgttttttaaacaacgtttttataaggtcaaaatcattcttagtttttgagccaattggatttggcctgctgttcatagcttaccaccccctgatgtattatttgttattcagagaaaatttctgaatactactagtttccttttctgtgcctgtccctgtgctaggcactaaaaatgcaatgattattgatatctaggtgacctgaaaaaaaatagtgaatgtgctttgtaaactgtaaagcacttgtattctactgtgataagcgttgtggatacaaagaaaggagcaagcataaaaaagtgctctttcaaaaggatatagtactatgcagacacaaggaattgtttgataaatgaataaattatatgtatatttgaggccaatttgtgtttgctgctctggtaattttgagtaaaaatgcagtattccaggtatcagaaacgaaaacacatggaaactgcttttaaactttaaaatatactgaaaacataagggactaagcttgttgtggtcacctataatgtgccagataccatgctgggtgctagagctaccaaagggggaaaagtattctcatagaacaaaaaatttcagaaaggtgcatattaaagtgctttgtaaactaaagcatgatacaaatgtcaatgggctacatatttatgaatgaatgaatggatgaatgaatattaagtgcctcttacataccagctattttgggtactgtaaaatacaagattaattctcctatgtaataagaggaaagtttatcctctatactattcagatgtaaggaatgatatattgcttaattttaaacaatcaagactttactggtgaggttaagttaaattattactgatacatttttccaggtaaccaggaaagagctagtatgaggaaatgaagtaatagatgtgagatccagaccgaaagtcacttaattcagcttgcgaatgtgctttctaaattataaagcacttgtaaatgaaaaatttgatgctttctgtatgaataaaactttctgtaagctaggtattgtctctacaaaattctcattgtatagttaaaccacagtgagaagggttctataagtagttatacaaaccaagggtttaaatacctgttaaatagatcaattttgattgcctactatgtgaactcactgttaaaggcactgaaaatttatcatatttcatttagccacagccaaaaataaggcaatacctatgttagcattttgtgaactctaaggcaccatataaatgtaactgttgattttctcacttggtgctgggtactaggtttataaaattgtatgatagttattatattgtgcaaataaagtaggaaaatttgaataacaatgattatcttttgaatacgcatacgcaagggattggttgtctgaagaatgccactatagtagttatctattgtgtgccaatctcattgctaggcattggggatgcaaagataaaccatctttattgtgtcttgggtagcagaagaaaatatgtgtaaaatcaatttataatttgtaaactgccacccatatataagctatatctgctgaatgatcattgattactcttatccttagagataacaactgggggcacaaacatttattatcattattgaacctacaacagagatctatgtgtagatttacaaagcctacagttctatacagataggaatgaactattggcttactgaatggtgattactttctgtggggctcggaactacatgccctaggatataaaaatgatgttatcattatagagtgctcacagaaggaaatgaagtaatataggtgtgagatccagaccaaaagtcatttaacaagtttattcagtgatgaaaacatgggacaaatggactaatataaggcagtgtactaagctgagtagagagataaagtcctgtccagaagatacatgcttcctggcctgattgaggagatggaaaatttttgcaaaaaacaaggtgttgtggtcttccatccagtttcttaagtgctgatgataaaagtgaattagacccaccttgacctggcctacagaagtaaaggagtaaaaataaatgcctcaggcgtgctttttgattcatttgataaacaaagcatcttttatgtggaatataccattctgggtcctgaggataagagagatgagggcattagatcactgacagctgaagatagaagaacatctttggtttgattgtttaaataatatttcaatgcctattctctgcaaggtactatgtttcgtaaattaaataggtctggcccagaagacccactcaattgcctttgagattaaaaaaaaaaaaaaaaagaaagaaaaatgcaagtttctttcaaaataaagagacatttttcctagtttcaggaatcccccaaatcacttcctcattggcttagtttaaagccaggagactgataaaagggctcagggtttgttctttaattcattaactaaacattctgcttttattacagttaaatggttcaagatgtaacaactagttttaaaggtatttgctcattggtctggcttagagacaggaagacatatgagcaataaaaaaaagattcttttgcatttaccaatttagtaaaaatttattaaaactgaataaagtgctgttcttaagtgcttgaaagacgtaaaccaaagtgcactttatctcatttatcttatggtggaaacacaggaacaaattctctaagagactgtgtttctttagttgagaagaaacttcattgagtagctgtgatatgttcgatactaaggaaaaactaaacagatcacctttgacatgcgttgtagagtgggaataagagagggctttttattttttcgttcatacgagtattgatgaagatgatactaaatgctaaatgaaatatatctgctccaaaaggcatttattctgacttggagatgcaacaaaaacacaaaaatggaatgaagtgatactcttcatcaaacagaagtgactgttatctcaaccattttgttaaatcctaaacagaaaacaaaaaaaatcatgacgaaaagacacttgcttattaattggcttggaaagtagaatataggagaaaggttactgtttattttttttcatgtattcattcattctacaaatatattcgggtgccaataggtacttggtataaggtttttggccccagagacatgggaaaaaaatgcatgccttcccagagaatgcctaatactttccttttggcttgttttcttgttaggggcatggcttagtccctaaataacattgtgtggtttaattcctactccgtatctcttctaccactctggccactacgataagcaggtagctgggttttgtagtgagcttgctccttaagttacaggaactctccttataatagacacttcattttcctagtccatccctcatgaaaaatgactgaccactgctgggcagcaggagggatgatgaccaactaattcccaaaccccagtctcattggtaccagccttggggaaccacctacacttgagccacaattggttttgaagtgcatttacaaggtttgtctattttcagttctttactttttacatgctgacacatacatacactgcctaaatagatctctttcagaaacaatcctcagataacgcatagcaaaatggagatggagacatgatttctcatgcaacagcttctctaattataccttagaaatgttctcctttttatcatcaaatctgctcaagaagggctttttatagtagaataatatcagtggatgaaaacagcttaacattttaccatgcttaagttttaagaataaaataaaaattggaaataattggccaaaattgaaaggaaaaatttttttaaaatttctctaaatgtaggcctggctgggctttgaccttttccgtttttaaatcactcacagagggtgggacaggaggaagagtgaaggaaaaggtcaaacctgttttaagggcaacctgcctttgttctgaattggtcttaagaacattaccagctccaggtttaaattgttcagtttcatgcagttccaatagctgatcattgttgagatgaggacaaaatcctttgtcctcactagtttgctttacatttttgaaaagtattatttttgtccaagtgcttatcaactaaaccttgtgttaggtaagaatggaatttattaagtgaatcagtgtgacccttcttgtcataagattatcttaaagctgaagccaaaatatgcttcaaaagaagaggactttattgttcattgtagttcatacattcaaagcatctgaactgtagtttctatagcaagccaattacatccataagtggagaaggaaatagataaatgtcaaagtatgattggtggagggagcaaggttgaagataatctggggttgaaattttctagttttcattctgtacatttttagttagacatcagatttgaaatattaatgtttacctttcaatgtgtggtatcagctggactcagtaacacccctttcttcagctggggatggggaatggattattggaaaatggaaagaagaaagtaactaaaagccttcctttcacagtttctggcatcactaccactactgattaaacaagaataagagaacattttatcatcatctgctttattcacataaatgaagttgtgatgaataaatctgcttttatgcagacacaaggaattaagtggcttcgtcattgtccttctacctcaaagataatttattccaaaagctaagataaatggaagactcttgaacttgtgaactgatgtgaaatgcagaatctcttttgagtctttgctgtttggaagattgaaaaatattgttcagcatgggtgaccaccagaaagtaatcttaagccatctagatgtcacaattgaaacaaactggggagttggttgctattgtaaaataaaatatactgttttgaaaaaaaagaattt

SEQ ID NO: 326705 - DNA, 7552 bp, Homo sapiens
ttcacacaaggaaacaagctaatgacccaattgattaccgaattagaggcctcggtaccccccaacaagataaagtctcaaaaacaaccaccacaacgtcaagctcttcattgttcctatctgccaaatcattatacttcctacaagcagtgcagagagctgagtcttcagcaggtccaagaaatttgaacacactgaaggaagtcagccttcccacctgaagatcaacatgcctggcactctagcacttgaggatagctgaatgaatgtgtatttctttgtctctttctttcttgtctttgctctttgttctctatctaaagtgtgtcttacccatttccatgtttctcttgctaatttctttcgtgtgtgcctttgcctcattttctctttttgttcacaagagtggtctgtgtcttgtcttagacatatctctcatttttcattttgttgctatttctctttgctctcctagatgtggctcttctttcacgctttatttcatgtctcctttttgggtcacatgctgtgtgctttttgtccttttcttgttctgtctacctctcctttctctgcctacctctcttttctctttgtgaactgtgattatttgttaccccttccccttctcgttcgttttaaatttcaccttttttctgagtctggcctcctttctgctgtttctactttttatctcacatttctcatttctgcatttcctttctgcctctcttgggctattctctctctcctcccctgcgtgcctcagcatctcttgctgtttgtgattttctatttcagtattaatctctgttggcttgtatttgttctctgcttcttccctttctactcacctttgagtatttcagcctcttcatgaatctatctccctctctttgatttcatgtaatctctccttaaatatttctttgcatatgtgggcaagtgtacgtgtgtgtgtgtcatgtgtggcagaggggcttcctaacccctgcctgataggtgcagaacgtcggctatcagagcaagcattgtggagcggttccttatgccaggctgccatgtgagatgatccaagaccaaaacaaggccctagactgcagtaaaacccagaactcaagtagggcagaaggtggaaggctcatatggatagaaggcccaaagtataagacagatggtttgagacttgagacccgaggactaagatggaaagcccatgttccaagatagatagaagcctcaggcctgaaaccaacaaaagcctcaagagccaagaaaacagagggtggcctgaattggaccgaaggcctgagttggatggaagtctcaaggcttgagttagaagtcttaagacctgggacaggacacatggaaggcctaagaactgagacttgtgacacaaggccaacgacctaagattagcccagggttgtagctggaagacctacaacccaaggatggaaggcccctgtcacaaagcctacctagatggatagaggacccaagcgaaaaaggtatctcaagactaacggccggaatctggaggcccatgacccagaacccaggaaggatagaagcttgaagacctggggaaatcccaagatgagaaccctaaaccctacctcttttctattgtttacacttcttactcttagatatttccagttctcctgtttatctttaagcctgattcttttgagatgtactttttgatgttgccggttacctttagattgacagtattatgcctgggccagtcttgagccagctttaaatcacagcttttacctatttgttaggctatagtgttttgtaaacttctgtttctattcacatcttctccacttgagagagacaccaaaatccagtcagtatctaatctggcttttgttaacttccctcaggagcagacattcatataggtgatactgtatttcagtcctttcttttgaccccagaagccctagactgagaagataaaatggtcaggttgttggggaaaaaaaagtgccaggctctctagagaaaaatgtgaagagatgctccaggccaatgagaagaattagacaagaaatacacagatgtgccagacttctgagaagcacctgccagcaacagcttccttctttgagcttaggtgagcaggattctggggtttgggatttctagtgatggttatggaaagggtgactgtgcctgggacaaagcgaggtcccaaggggacagcctgaactccctgctcatagtagtggccaaataatttggtggactgtgccaacgctactcctgggtttaatacccatctctaggcttaaagatgagagaacctgggactgttgagcatgtttaatactttccttgatttttttcttcctgtttatgtgggaagttgatttaaatgactgataatgtgtatgaaagcactgtaaaacataagagaaaaaccaattagtgtattggcaatcatgcagttaacatttgaaagtgcagtgtaaattgtgaagcattatgtaaatcaggggtccacagtttttctgtaaggggtcaaatcataaatactttagactgtgggccatatggtttctgttacatatttgttttttaaacaacgtttttataaggtcaaaatcattcttagtttttgagccaattggatttggcctgctgttcatagcttaccaccccctgatgtattatttgttattcagagaaaatttctgaatactactagtttccttttctgtgcctgtccctgtgctaggcactaaaaatgcaatgattattgatatctaggtgacctgaaaaaaaatagtgaatgtgctttgtaaactgtaaagcacttgtattctactgtgataagcgttgtggatacaaagaaaggagcaagcataaaaaagtgctctttcaaaaggatatagtactatgcagacacaaggaattgtttgataaatgaataaattatatgtatatttgaggccaatttgtgtttgctgctctggtaattttgagtaaaaatgcagtattccaggtatcagaaacgaaaacacatggaaactgcttttaaactttaaaatatactgaaaacataagggactaagcttgttgtggtcacctataatgtgccagataccatgctgggtgctagagctaccaaagggggaaaagtattctcatagaacaaaaaatttcagaaaggtgcatattaaagtgctttgtaaactaaagcatgatacaaatgtcaatgggctacatatttatgaatgaatgaatggatgaatgaatattaagtgcctcttacataccagctattttgggtactgtaaaatacaagattaattctcctatgtaataagaggaaagtttatcctctatactattcagatgtaaggaatgatatattgcttaattttaaacaatcaagactttactggtgaggttaagttaaattattactgatacatttttccaggtaaccaggaaagagctagtatgaggaaatgaagtaatagatgtgagatccagaccgaaagtcacttaattcagcttgcgaatgtgctttctaaattataaagcacttgtaaatgaaaaatttgatgctttctgtatgaataaaactttctgtaagctaggtattgtctctacaaaattctcattgtatagttaaaccacagtgagaagggttctataagtagttatacaaaccaagggtttaaatacctgttaaatagatcaattttgattgcctactatgtgaactcactgttaaaggcactgaaaatttatcatatttcatttagccacagccaaaaataaggcaatacctatgttagcattttgtgaactctaaggcaccatataaatgtaactgttgattttctcacttggtgctgggtactaggtttataaaattgtatgatagttattatattgtgcaaataaagtaggaaaatttgaataacaatgattatcttttgaatacgcatacgcaagggattggttgtctgaagaatgccactatagtagttatctattgtgtgccaatctcattgctaggcattggggatgcaaagataaaccatctttattgtgtcttgggtagcagaagaaaatatgtgtaaaatcaatttataatttgtaaactgccacccatatataagctatatctgctgaatgatcattgattactcttatccttagagataacaactgggggcacaaacatttattatcattattgaacctacaacagagatctatgtgtagatttacaaagcctacagttctatacagataggaatgaactattggcttactgaatggtgattactttctgtggggctcggaactacatgccctaggatataaaaatgatgttatcattatagagtgctcacagaaggaaatgaagtaatataggtgtgagatccagaccaaaagtcatttaacaagtttattcagtgatgaaaacatgggacaaatggactaatataaggcagtgtactaagctgagtagagagataaagtcctgtccagaagatacatgcttcctggcctgattgaggagatggaaaatttttgcaaaaaacaaggtgttgtggtcttccatccagtttcttaagtgctgatgataaaagtgaattagacccaccttgacctggcctacagaagtaaaggagtaaaaataaatgcctcaggcgtgctttttgattcatttgataaacaaagcatcttttatgtggaatataccattctgggtcctgaggataagagagatgagggcattagatcactgacagctgaagatagaagaacatctttggtttgattgtttaaataatatttcaatgcctattctctgcaaggtactatgtttcgtaaattaaataggtctggcccagaagacccactcaattgcctttgagattaaaaaaaaaaaaaaaaagaaagaaaaatgcaagtttctttcaaaataaagagacatttttcctagtttcaggaatcccccaaatcacttcctcattggcttagtttaaagccaggagactgataaaagggctcagggtttgttctttaattcattaactaaacattctgcttttattacagttaaatggttcaagatgtaacaactagttttaaaggtatttgctcattggtctggcttagagacaggaagacatatgagcaataaaaaaaagattcttttgcatttaccaatttagtaaaaatttattaaaactgaataaagtgctgttcttaagtgcttgaaagacgtaaaccaaagtgcactttatctcatttatcttatggtggaaacacaggaacaaattctctaagagactgtgtttctttagttgagaagaaacttcattgagtagctgtgatatgttcgatactaaggaaaaactaaacagatcacctttgacatgcgttgtagagtgggaataagagagggctttttattttttcgttcatacgagtattgatgaagatgatactaaatgctaaatgaaatatatctgctccatgatactcttcatcaaacagaagtgactgttatctcaaccattttgttaaatcctaaacagaaaacaaaaaaaatcatgacgaaaagacacttgcttattaattggcttggaaagtagaatataggagaaaggttactgtttattttttttcatgtattcattcattctacaaatatattcgggtgccaataggtacttggtataaggtttttggccccagagacatgggaaaaaaatgcatgccttcccagagaatgcctaatactttccttttggcttgttttcttgttaggggcatggcttagtccctaaataacattgtgtggtttaattcctactccgtatctcttctaccactctggccactacgataagcaggtagctgggttttgtagtgagcttgctccttaagttacaggaactctccttataatagacacttcattttcctagtccatccctcatgaaaaatgactgaccactgctgggcagcaggagggatgatgaccaactaattcccaaaccccagtctcattggtaccagccttggggaaccacctacacttgagccacaattggttttgaagtgcatttacaaggtttgtctattttcagttctttactttttacatgctgacacatacatacactgcctaaatagatctctttcagaaacaatcctcagataacgcatagcaaaatggagatggagacatgatttctcatgcaacagcttctctaattataccttagaaatgttctcctttttatcatcaaatctgctcaagaagggctttttatagtagaataatatcagtggatgaaaacagcttaacattttaccatgcttaagttttaagaataaaataaaaattggaaataattggccaaaattgaaaggaaaaatttttttaaaatttctctaaatgtaggcctggctgggctttgaccttttccgtttttaaatcactcacagagggtgggacaggaggaagagtgaaggaaaaggtcaaacctgttttaagggcaacctgcctttgttctgaattggtcttaagaacattaccagctccaggtttaaattgttcagtttcatgcagttccaatagctgatcattgttgagatgaggacaaaatcctttgtcctcactagtttgctttacatttttgaaaagtattatttttgtccaagtgcttatcaactaaaccttgtgttaggtaagaatggaatttattaagtgaatcagtgtgacccttcttgtcataagattatcttaaagctgaagccaaaatatgcttcaaaagaagaggactttattgttcattgtagttcatacattcaaagcatctgaactgtagtttctatagcaagccaattacatccataagtggagaaggaaatagataaatgtcaaagtatgattggtggagggagcaaggttgaagataatctggggttgaaattttctagttttcattctgtacatttttagttagacatcagatttgaaatattaatgtttacctttcaatgtgtggtatcagctggactcagtaacacccctttcttcagctggggatggggaatggattattggaaaatggaaagaagaaagtaactaaaagccttcctttcacagtttctggcatcactaccactactgattaaacaagaataagagaacattttatcatcatctgctttattcacataaatgaagttgtgatgaataaatctgcttttatgcagacacaaggaattaagtggcttcgtcattgtccttctacctcaaagataatttattccaaaagctaagataaatggaagactcttgaacttgtgaactgatgtgaaatgcagaatctcttttgagtctttgctgtttggaagattgaaaaatattgttcagcatgggtgaccaccagaaagtaatcttaagccatctagatgtcacaattgaaacaaactggggagttggttgctattgtaaaataaaatatactgttttgaaaaaaaagaattt

SEQ ID NO: 326706 - DNA, 6644 bp, Homo sapiens
ttcacacaaggaaacaagctaatgacccaattgattaccgaattagaggcctcggtaccccccaacaagataaagtctcaaaaacaaccaccacaacgtcaagctcttcattgttcctatctgccaaatcattatacttcctacaagcagtgcagagagctgagtcttcagcaggtccaagaaatttgaacacactgaaggaagtcagccttcccacctgaagatcaacatgcctggcactctagcacttgaggatagctgaatgaatgtgtatttctttgtctctttctttcttgtctttgctctttgttctctatctaaagtgtgtcttacccatttccatgtttctcttgctaatttctttcgtgtgtgcctttgcctcattttctctttttgttcacaagagtggtctgtgtcttgtcttagacatatctctcatttttcattttgttgctatttctctttgctctcctagatgtggctcttctttcacgctttatttcatgtctcctttttgggtcacatgctgtgtgctttttgtccttttcttgttctgtctacctctcctttctctgcctacctctcttttctctttgtgaactgtgattatttgttaccccttccccttctcgttcgttttaaatttcaccttttttctgagtctggcctcctttctgctgtttctactttttatctcacatttctcatttctgcatttcctttctgcctctcttgggctattctctctctcctcccctgcgtgcctcagcatctcttgctgtttgtgattttctatttcagtattaatctctgttggcttgtatttgttctctgcttcttccctttctactcacctttgagtatttcagcctcttcatgaatctatctccctctctttgatttcatgtaatctctccttaaatatttctttgcatatgtgggcaagtgtacgtgtgtgtgtgtcatgtgtggcagaggggcttcctaacccctgcctgataggtgcagaacgtcggctatcagagcaagcattgtggagcggttccttatgccaggctgccatgtgagatgatccaagaccaaaacaaggccctagactgcagtaaaacccagaactcaagtagggcagaaggtggaaggctcatatggatagaaggcccaaagtataagacagatggtttgagacttgagacccgaggactaagatggaaagcccatgttccaagatagatagaagcctcaggcctgaaaccaacaaaagcctcaagagccaagaaaacagagggtggcctgaattggaccgaaggcctgagttggatggaagtctcaaggcttgagttagaagtcttaagacctgggacaggacacatggaaggcctaagaactgagacttgtgacacaaggccaacgacctaagattagcccagggttgtagctggaagacctacaacccaaggatggaaggcccctgtcacaaagcctacctagatggatagaggacccaagcgaaaaaggtatctcaagactaacggccggaatctggaggcccatgacccagaacccaggaaggatagaagcttgaagacctggggaaatcccaagatgagaaccctaaaccctacctcttttctattgtttacacttcttactcttagatatttccagttctcctgtttatctttaagcctgattcttttgagatgtactttttgatgttgccggttacctttagattgacagtattatgcctgggccagtcttgagccagctttaaatcacagcttttacctatttgttaggctatagtgttttgtaaacttctgtttctattcacatcttctccacttgagagagacaccaaaatccagtcagtatctaatctggcttttgttaacttccctcaggagcagacattcatataggtgatactgtatttcagtcctttcttttgaccccagaagccctagactgagaagataaaatggtcaggttgttggggaaaaaaaagtgccaggctctctagagaaaaatgtgaagagatgctccaggccaatgagaagaattagacaagaaatacacagatgtgccagacttctgagaagcacctgccagcaacagcttccttctttgagcttaggtgagcaggattctggggtttgggatttctagtgatggttatggaaagggtgactgtgcctgggacaaagcgaggtcccaaggggacagcctgaactccctgctcatagtagtggccaaataatttggtggactgtgccaacgctactcctgggtttaatacccatctctaggcttaaagatgagagaacctgggactgttgagcatgtttaatactttccttgatttttttcttcctgtttatgtgggaagttgatttaaatgactgataatgtgtatgaaagcactgtaaaacataagagaaaaaccaattagtgtattggcaatcatgcagttaacatttgaaagtgcagtgtaaattgtgaagcattatgtaaatcaggggtccacagtttttctgtaaggggtcaaatcataaatactttagactgtgggccatatggtttctgttacatatttgttttttaaacaacgtttttataaggtcaaaatcattcttagtttttgagccaattggatttggcctgctgttcatagcttaccaccccctgatgtattatttgttattcagagaaaatttctgaatactactagtttccttttctgtgcctgtccctgtgctaggcactaaaaatgcaatgattattgatatctaggtgacctgaaaaaaaatagtgaatgtgctttgtaaactgtaaagcacttgtattctactgtgataagcgttgtggatacaaagaaaggagcaagcataaaaaagtgctctttcaaaaggatatagtactatgcagacacaaggaattgtttgataaatgaataaattatatgtatatttgaggccaatttgtgtttgctgctctggtaattttgagtaaaaatgcagtattccaggtatcagaaacgaaaacacatggaaactgcttttaaactttaaaatatactgaaaacataagggactaagcttgttgtggtcacctataatgtgccagataccatgctgggtgctagagctaccaaagggggaaaagtattctcatagaacaaaaaatttcagaaaggtgcatattaaagtgctttgtaaactaaagcatgatacaaatgtcaatgggctacatatttatgaatgaatgaatggatgaatgaatattaagtgcctcttacataccagctattttgggtacttattcagatgtaaggaatgatatattgcttaattttaaacaatcaagactttactggtgaggttaagttaaattattactgatacatttttccaggtaaccaggaaagagctagtatgaggaaatgaagtaataggtgtgagatccagaccaaaagtcatttaacaagtttattcagtgatgaaaacatgggacaaatggactaatataaggcagtgtactaagctgagtagagagataaagtcctgtccagaagatacatgcttcctggcctgattgaggagatggaaaatttttgcaaaaaacaaggtgttgtggtcttccatccagtttcttaagtgctgatgataaaagtgaattagacccaccttgacctggcctacagaagtaaaggagtaaaaataaatgcctcaggcgtgctttttgattcatttgataaacaaagcatcttttatgtggaatataccattctgggtcctgaggataagagagatgagggcattagatcactgacagctgaagatagaagaacatctttggtttgattgtttaaataatatttcaatgcctattctctgcaaggtactatgtttcgtaaattaaataggtctggcccagaagacccactcaattgcctttgagattaaaaaaaaaaaaaaaaagaaagaaaaatgcaagtttctttcaaaataaagagacatttttcctagtttcaggaatcccccaaatcacttcctcattggcttagtttaaagccaggagactgataaaagggctcagggtttgttctttaattcattaactaaacattctgcttttattacagttaaatggttcaagatgtaacaactagttttaaaggtatttgctcattggtctggcttagagacaggaagacatatgagcaataaaaaaaagattcttttgcatttaccaatttagtaaaaatttattaaaactgaataaagtgctgttcttaagtgcttgaaagacgtaaaccaaagtgcactttatctcatttatcttatggtggaaacacaggaacaaattctctaagagactgtgtttctttagttgagaagaaacttcattgagtagctgtgatatgttcgatactaaggaaaaactaaacagatcacctttgacatgcgttgtagagtgggaataagagagggctttttattttttcgttcatacgagtattgatgaagatgatactaaatgctaaatgaaatatatctgctccaaaaggcatttattctgacttggagatgcaacaaaaacacaaaaatggaatgaagtgatactcttcatcaaacagaagtgactgttatctcaaccattttgttaaatcctaaacagaaaacaaaaaaaatcatgacgaaaagacacttgcttattaattggcttggaaagtagaatataggagaaaggttactgtttattttttttcatgtattcattcattctacaaatatattcgggtgccaataggtacttggtataaggtttttggccccagagacatgggaaaaaaatgcatgccttcccagagaatgcctaatactttccttttggcttgttttcttgttaggggcatggcttagtccctaaataacattgtgtggtttaattcctactccgtatctcttctaccactctggccactacgataagcaggtagctgggttttgtagtgagcttgctccttaagttacaggaactctccttataatagacacttcattttcctagtccatccctcatgaaaaatgactgaccactgctgggcagcaggagggatgatgaccaactaattcccaaaccccagtctcattggtaccagccttggggaaccacctacacttgagccacaattggttttgaagtgcatttacaaggtttgtctattttcagttctttactttttacatgctgacacatacatacactgcctaaatagatctctttcagaaacaatcctcagataacgcatagcaaaatggagatggagacatgatttctcatgcaacagcttctctaattataccttagaaatgttctcctttttatcatcaaatctgctcaagaagggctttttatagtagaataatatcagtggatgaaaacagcttaacattttaccatgcttaagttttaagaataaaataaaaattggaaataattggccaaaattgaaaggaaaaatttttttaaaatttctctaaatgtaggcctggctgggctttgaccttttccgtttttaaatcactcacagagggtgggacaggaggaagagtgaaggaaaaggtcaaacctgttttaagggcaacctgcctttgttctgaattggtcttaagaacattaccagctccaggtttaaattgttcagtttcatgcagttccaatagctgatcattgttgagatgaggacaaaatcctttgtcctcactagtttgctttacatttttgaaaagtattatttttgtccaagtgcttatcaactaaaccttgtgttaggtaagaatggaatttattaagtgaatcagtgtgacccttcttgtcataagattatcttaaagctgaagccaaaatatgcttcaaaagaagaggactttattgttcattgtagttcatacattcaaagcatctgaactgtagtttctatagcaagccaattacatccataagtggagaaggaaatagataaatgtcaaagtatgattggtggagggagcaaggttgaagataatctggggttgaaattttctagttttcattctgtacatttttagttagacatcagatttgaaatattaatgtttacctttcaatgtgtggtatcagctggactcagtaacacccctttcttcagctggggatggggaatggattattggaaaatggaaagaagaaagtaactaaaagccttcctttcacagtttctggcatcactaccactactgattaaacaagaataagagaacattttatcatcatctgctttattcacataaatgaagttgtgatgaataaatctgcttttatgcagacacaaggaattaagtggcttcgtcattgtccttctacctcaaagataatttattccaaaagctaagataaatggaagactcttgaacttgtgaactgatgtgaaatgcagaatctcttttgagtctttgctgtttggaagattgaaaaatattgttcagcatgggtgaccaccagaaagtaatcttaagccatctagatgtcacaattgaaacaaactggggagttggttgctattgtaaaataaaatatactgttttgaaaaaaaagaattt

SEQ ID NO: 326707 - DNA, 6565 bp, Homo sapiens
ttcacacaaggaaacaagctaatgacccaattgattaccgaattagaggcctcggtaccccccaacaagataaagtctcaaaaacaaccaccacaacgtcaagctcttcattgttcctatctgccaaatcattatacttcctacaagcagtgcagagagctgagtcttcagcaggtccaagaaatttgaacacactgaaggaagtcagccttcccacctgaagatcaacatgcctggcactctagcacttgaggatagctgaatgaatgtgtatttctttgtctctttctttcttgtctttgctctttgttctctatctaaagtgtgtcttacccatttccatgtttctcttgctaatttctttcgtgtgtgcctttgcctcattttctctttttgttcacaagagtggtctgtgtcttgtcttagacatatctctcatttttcattttgttgctatttctctttgctctcctagatgtggctcttctttcacgctttatttcatgtctcctttttgggtcacatgctgtgtgctttttgtccttttcttgttctgtctacctctcctttctctgcctacctctcttttctctttgtgaactgtgattatttgttaccccttccccttctcgttcgttttaaatttcaccttttttctgagtctggcctcctttctgctgtttctactttttatctcacatttctcatttctgcatttcctttctgcctctcttgggctattctctctctcctcccctgcgtgcctcagcatctcttgctgtttgtgattttctatttcagtattaatctctgttggcttgtatttgttctctgcttcttccctttctactcacctttgagtatttcagcctcttcatgaatctatctccctctctttgatttcatgtaatctctccttaaatatttctttgcatatgtgggcaagtgtacgtgtgtgtgtgtcatgtgtggcagaggggcttcctaacccctgcctgataggtgcagaacgtcggctatcagagcaagcattgtggagcggttccttatgccaggctgccatgtgagatgatccaagaccaaaacaaggccctagactgcagtaaaacccagaactcaagtagggcagaaggtggaaggctcatatggatagaaggcccaaagtataagacagatggtttgagacttgagacccgaggactaagatggaaagcccatgttccaagatagatagaagcctcaggcctgaaaccaacaaaagcctcaagagccaagaaaacagagggtggcctgaattggaccgaaggcctgagttggatggaagtctcaaggcttgagttagaagtcttaagacctgggacaggacacatggaaggcctaagaactgagacttgtgacacaaggccaacgacctaagattagcccagggttgtagctggaagacctacaacccaaggatggaaggcccctgtcacaaagcctacctagatggatagaggacccaagcgaaaaaggtatctcaagactaacggccggaatctggaggcccatgacccagaacccaggaaggatagaagcttgaagacctggggaaatcccaagatgagaaccctaaaccctacctcttttctattgtttacacttcttactcttagatatttccagttctcctgtttatctttaagcctgattcttttgagatgtactttttgatgttgccggttacctttagattgacagtattatgcctgggccagtcttgagccagctttaaatcacagcttttacctatttgttaggctatagtgttttgtaaacttctgtttctattcacatcttctccacttgagagagacaccaaaatccagtcagtatctaatctggcttttgttaacttccctcaggagcagacattcatataggtgatactgtatttcagtcctttcttttgaccccagaagccctagactgagaagataaaatggtcaggttgttggggaaaaaaaagtgccaggctctctagagaaaaatgtgaagagatgctccaggccaatgagaagaattagacaagaaatacacagatgtgccagacttctgagaagcacctgccagcaacagcttccttctttgagcttaggtgagcaggattctggggtttgggatttctagtgatggttatggaaagggtgactgtgcctgggacaaagcgaggtcccaaggggacagcctgaactccctgctcatagtagtggccaaataatttggtggactgtgccaacgctactcctgggtttaatacccatctctaggcttaaagatgagagaacctgggactgttgagcatgtttaatactttccttgatttttttcttcctgtttatgtgggaagttgatttaaatgactgataatgtgtatgaaagcactgtaaaacataagagaaaaaccaattagtgtattggcaatcatgcagttaacatttgaaagtgcagtgtaaattgtgaagcattatgtaaatcaggggtccacagtttttctgtaaggggtcaaatcataaatactttagactgtgggccatatggtttctgttacatatttgttttttaaacaacgtttttataaggtcaaaatcattcttagtttttgagccaattggatttggcctgctgttcatagcttaccaccccctgatgtattatttgttattcagagaaaatttctgaatactactagtttccttttctgtgcctgtccctgtgctaggcactaaaaatgcaatgattattgatatctaggtgacctgaaaaaaaatagtgaatgtgctttgtaaactgtaaagcacttgtattctactgtgataagcgttgtggatacaaagaaaggagcaagcataaaaaagtgctctttcaaaaggatatagtactatgcagacacaaggaattgtttgataaatgaataaattatatgtatatttgaggccaatttgtgtttgctgctctggtaattttgagtaaaaatgcagtattccaggtatcagaaacgaaaacacatggaaactgcttttaaactttaaaatatactgaaaacataagggactaagcttgttgtggtcacctataatgtgccagataccatgctgggtgctagagctaccaaagggggaaaagtattctcatagaacaaaaaatttcagaaaggtgcatattaaagtgctttgtaaactaaagcatgatacaaatgtcaatgggctacatatttatgaatgaatgaatggatgaatgaatattaagtgcctcttacataccagctattttgggtactgtaaaatacaagattaattctcctatgtaataagaggaaagtttatcctctatactattcagatgtaaggaatgatatattgcttaattttaaacaatcaagactttactggtgaggttaagttaaattattactgatacatttttccaggtaaccaggaaagagctagtatgaggaaatgaagtaatagatgtgagatccagaccgaaagtcacttaattcagcttgcgaatgtgctttctaaattataaagcacttgtaaatgaaaaatttgatgctttctgtatgaataaaactttctgtaagctaggtattgtctctacaaaattctcattgtatagttaaaccacagtgagaagggttctataagtagttatacaaaccaagggtttaaatacctgttaaatagatcaattttgattgcctactatgtgaactcactgttaaaggcactgaaaatttatcatatttcatttagccacagccaaaaataaggcaatacctatgttagcattttgtgaactctaaggcaccatataaatgtaactgttgattttctcacttggtgctgggtactaggtttataaaattgtatgatagttattatattgtgcaaataaagtaggaaaatttgaataacaatgattatcttttgaatacgcatacgcaagggattggttgtctgaagaatgccactatagtagttatctattgtgtgccaatctcattgctaggcattggggatgcaaagataaaccatctttattgtgtcttgggtagcagaagaaaatatgtgtaaaatcaatttataatttgtaaactgccacccatatataagctatatctgctgaatgatcattgattactcttatccttagagataacaactgggggcacaaacatttattatcattattgaacctacaacagagatctatgtgtagatttacaaagcctacagttctatacagataggaatgaactattggcttactgaatggtgattactttctgtggggctcggaactacatgccctaggatataaaaatgatgttatcattatagagtgctcacagaaggaaatgaagtaatataggtgtgagatccagaccaaaagtcatttaacaagtttattcagtgatgaaaacatgggacaaatggactaatataaggcagtgtactaagctgagtagagagataaagtcctgtccagaagatacatgcttcctggcctgattgaggagatggaaaatttttgcaaaaaacaaggtgttgtggtcttccatccagtttcttaagtgctgatgataaaagtgaattagacccaccttgacctggcctacagaagtaaaggagtaaaaataaatgcctcaggcgtgctttttgattcatttgataaacaaagcatcttttatgtggaatataccattctgggtcctgaggataagagagatgagggcattagatcactgacagctgaagatagaagaacatctttggtttgattgtttaaataatatttcaatgcctattctctgcaaggtactatgtttcgtaaattaaataggtctggcccagaagacccactcaattgcctttgagattaaaaaaaaaaaaaaaaagaaagaaaaatgcaagtttctttcaaaataaagagacatttttcctagtttcaggaatcccccaaatcacttcctcattggcttagtttaaagccaggagactgataaaagggctcagggtttgttctttaattcattaactaaacattctgcttttattacagttaaatggttcaagatgtaacaactagttttaaaggtatttgctcattggtctggcttagagacaggaagacatatgagcaataaaaaaaagattcttttgcatttaccaatttagtaaaaatttattaaaactgaataaagtgctgttcttaagtgcttgaaagacgtaaaccaaagtgcactttatctcatttatcttatggtggaaacacaggaacaaattctctaagagactgtgtttctttagttgagaagaaacttcattgagtagctgtgatatgttcgatactaaggaaaaactaaacagatcacctttgacatgcgttgtagagtgggaataagagagggctttttattttttcgttcatacgagtattgatgaagatgatactaaatgctaaatgaaatatatctgctccaaaaggcatttattctgacttggagatgcaacaaaaacacaaaaatggaatgaagtgatactcttcatcaaacagaagtgactgttatctcaaccattttgttaaatcctaaacagaaaacaaaaaaaatcatgacgaaaagacacttgcttattaattggcttggaaagtagaatataggagaaaggttactgtttattttttttcatgtattcattcattctacaaatatattcgggtgccaataggtacttggtataaggtttttggccccagagacatgggaaaaaaatgcatgccttcccagagaatgcctaatactttccttttggcttgttttcttgttaggggcatggcttagtccctaaataacattgtgtggtttaattcctactccgtatctcttctaccactctggccactacgataagcaggtagctgggttttgtagtgagcttgctccttaagttacaggaactctccttataatagacacttcattttcctagtccatccctcatgaaaaatgactgaccactgctgggcagcaggagggatgatgaccaactaattcccaaaccccagtctcattggtaccagccttggggaaccacctacacttgagccacaattggttttgaagtgcatttacaagtttctggcatcactaccactactgattaaacaagaataagagaacattttatcatcatctgctttattcacataaatgaagttgtgatgaataaatctgcttttatgcagacacaaggaattaagtggcttcgtcattgtccttctacctcaaagataatttattccaaaagctaagataaatggaagactcttgaacttgtgaactgatgtgaaatgcagaatctcttttgagtctttgctgtttggaagattgaaaaatattgttcagcatgggtgaccaccagaaagtaatcttaagccatctagatgtcacaattgaaacaaactggggagttggttgctattgtaaaataaaatatactgttttgaaaaaaaagaattt

SEQ ID NO: 326708 - DNA, 3708 bp, Homo sapiens
ttcacacaaggaaacaagctaatgacccaattgattaccgaattagaggcctcggtaccccccaacaagataaagtctcaaaaacaaccaccacaacgtcaagctcttcattgttcctatctgccaaatcattatacttcctacaagcagtgcagagagctgagtcttcagcaggtccaagaaatttgaacacactgaaggaagtcagccttcccacctgaagatcaacatgcctggcactctagcacttgaggatagctgaatgaatgtgtatttctttgtctctttctttcttgtctttgctctttgttctctatctaaagtgtgtcttacccatttccatgtttctcttgctaatttctttcgtgtgtgcctttgcctcattttctctttttgttcacaagagtggtctgtgtcttgtcttagacatatctctcatttttcattttgttgctatttctctttgctctcctagatgtggctcttctttcacgctttatttcatgtctcctttttgggtcacatgctgtgtgctttttgtccttttcttgttctgtctacctctcctttctctgcctacctctcttttctctttgtgaactgtgattatttgttaccccttccccttctcgttcgttttaaatttcaccttttttctgagtctggcctcctttctgctgtttctactttttatctcacatttctcatttctgcatttcctttctgcctctcttgggctattctctctctcctcccctgcgtgcctcagcatctcttgctgtttgtgattttctatttcagtattaatctctgttggcttgtatttgttctctgcttcttccctttctactcacctttgagtatttcagcctcttcatgaatctatctccctctctttgatttcatgtaatctctccttaaatatttctttgcatatgtgggcaagtgtacgtgtgtgtgtgtcatgtgtggcagaggggcttcctaacccctgcctgataggtgcagaacgtcggctatcagagcaagcattgtggagcggttccttatgccaggctgccatgtgagatgatccaagaccaaaacaaggccctagactgcagtaaaacccagaactcaagtagggcagaaggtggaaggctcatatggatagaaggcccaaagtataagacagatggtttgagacttgagacccgaggactaagatggaaagcccatgttccaagatagatagaagcctcaggcctgaaaccaacaaaagcctcaagagccaagaaaacagagggtggcctgaattggaccgaaggcctgagttggatggaagtctcaaggcttgagttagaagtcttaagacctgggacaggacacatggaaggcctaagaactgagacttgtgacacaaggccaacgacctaagattagcccagggttgtagctggaagacctacaacccaaggatggaaggcccctgtcacaaagcctacctagatggatagaggacccaagcgaaaaaggtatctcaagactaacggccggaatctggaggcccatgacccagaacccaggaaggatagaagcttgaagacctggggaaatcccaagatgagaaccctaaaccctacctcttttctattgtttacacttcttactcttagatatttccagttctcctgtttatctttaagcctgattcttttgagatgtactttttgatgttgccggttacctttagattgacagtattatgcctgggccagtcttgagccagctttaaatcacagcttttacctatttgttaggctatagtgttttgtaaacttctgtttctattcacatcttctccacttgagagagacaccaaaatccagtcagtatctaatctggcttttgttaacttccctcaggagcagacattcatataggtgatactgtatttcagtcctttcttttgaccccagaagccctagactgagaagataaaatggtcaggttgttggggaaaaaaaagtgccaggctctctagagaaaaatgtgaagagatgctccaggccaatgagaagaattagacaagaaatacacagatgtgccagacttctgagaagcacctgccagcaacagcttccttctttgagcttagtccatccctcatgaaaaatgactgaccactgctgggcagcaggagggatgatgaccaactaattcccaaaccccagtctcattggtaccagccttggggaaccacctacacttgagccacaattggttttgaagtgcatttacaaggtttgtctattttcagttctttactttttacatgctgacacatacatacactgcctaaatagatctctttcagaaacaatcctcagataacgcatagcaaaatggagatggagacatgatttctcatgcaacagcttctctaattataccttagaaatgttctcctttttatcatcaaatctgctcaagaagggctttttatagtagaataatatcagtggatgaaaacagcttaacattttaccatgcttaagttttaagaataaaataaaaattggaaataattggccaaaattgaaaggaaaaatttttttaaaatttctctaaatgtaggcctggctgggctttgaccttttccgtttttaaatcactcacagagggtgggacaggaggaagagtgaaggaaaaggtcaaacctgttttaagggcaacctgcctttgttctgaattggtcttaagaacattaccagctccaggtttaaattgttcagtttcatgcagttccaatagctgatcattgttgagatgaggacaaaatcctttgtcctcactagtttgctttacatttttgaaaagtattatttttgtccaagtgcttatcaactaaaccttgtgttaggtaagaatggaatttattaagtgaatcagtgtgacccttcttgtcataagattatcttaaagctgaagccaaaatatgcttcaaaagaagaggactttattgttcattgtagttcatacattcaaagcatctgaactgtagtttctatagcaagccaattacatccataagtggagaaggaaatagataaatgtcaaagtatgattggtggagggagcaaggttgaagataatctggggttgaaattttctagttttcattctgtacatttttagttagacatcagatttgaaatattaatgtttacctttcaatgtgtggtatcagctggactcagtaacacccctttcttcagctggggatggggaatggattattggaaaatggaaagaagaaagtaactaaaagccttcctttcacagtttctggcatcactaccactactgattaaacaagaataagagaacattttatcatcatctgctttattcacataaatgaagttgtgatgaataaatctgcttttatgcagacacaaggaattaagtggcttcgtcattgtccttctacctcaaagataatttattccaaaagctaagataaatggaagactcttgaacttgtgaactgatgtgaaatgcagaatctcttttgagtctttgctgtttggaagattgaaaaatattgttcagcatgggtgaccaccagaaagtaatcttaagccatctagatgtcacaattgaaacaaactggggagttggttgctattgtaaaataaaatatactgttttgaaaaaaaagaattt

SEQ ID NO: 326709 - DNA, 4579 bp, Homo sapiens
ttcacacaaggaaacaagctaatgacccaattgattaccgaattagaggcctcggtaccccccaacaagataaagtctcaaaaacaaccaccacaacgtcaagctcttcattgttcctatctgccaaatcattatacttcctacaagcagtgcagagagctgagtcttcagcaggtccaagaaatttgaacacactgaaggaagtcagccttcccacctgaagatcaacatgcctggcactctagcacttgaggatagctgaatgaatgtgtatttctttgtctctttctttcttgtctttgctctttgttctctatctaaagtgtgtcttacccatttccatgtttctcttgctaatttctttcgtgtgtgcctttgcctcattttctctttttgttcacaagagtggtctgtgtcttgtcttagacatatctctcatttttcattttgttgctatttctctttgctctcctagatgtggctcttctttcacgctttatttcatgtctcctttttgggtcacatgctgtgtgctttttgtccttttcttgttctgtctacctctcctttctctgcctacctctcttttctctttgtgaactgtgattatttgttaccccttccccttctcgttcgttttaaatttcaccttttttctgagtctggcctcctttctgctgtttctactttttatctcacatttctcatttctgcatttcctttctgcctctcttgggctattctctctctcctcccctgcgtgcctcagcatctcttgctgtttgtgattttctatttcagtattaatctctgttggcttgtatttgttctctgcttcttccctttctactcacctttgagtatttcagcctcttcatgaatctatctccctctctttgatttcatgtaatctctccttaaatatttctttgcatatgtgggcaagtgtacgtgtgtgtgtgtcatgtgtggcagaggggcttcctaacccctgcctgataggtgcagaacgtcggctatcagagcaagcattgtggagcggttccttatgccaggctgccatgtgagatgatccaagaccaaaacaaggccctagactgcagtaaaacccagaactcaagtagggcagaaggtggaaggctcatatggatagaaggcccaaagtataagacagatggtttgagacttgagacccgaggactaagatggaaagcccatgttccaagatagatagaagcctcaggcctgaaaccaacaaaagcctcaagagccaagaaaacagagggtggcctgaattggaccgaaggcctgagttggatggaagtctcaaggcttgagttagaagtcttaagacctgggacaggacacatggaaggcctaagaactgagacttgtgacacaaggccaacgacctaagattagcccagggttgtagctggaagacctacaacccaaggatggaaggcccctgtcacaaagcctacctagatggatagaggacccaagcgaaaaaggtatctcaagactaacggccggaatctggaggcccatgacccagaacccaggaaggatagaagcttgaagacctggggaaatcccaagatgagaaccctaaaccctacctcttttctattgtttacacttcttactcttagatatttccagttctcctgtttatctttaagcctgattcttttgagatgtactttttgatgttgccggttacctttagattgacagtattatgcctgggccagtcttgagccagctttaaatcacagcttttacctatttgttaggctatagtgttttgtaaacttctgtttctattcacatcttctccacttgagagagacaccaaaatccagtcagtatctaatctggcttttgttaacttccctcaggagcagacattcatataggtgatactgtatttcagtcctttcttttgaccccagaagccctagactgagaagataaaatggtcaggttgttggggaaaaaaaagtgccaggctctctagagaaaaatgtgaagagatgctccaggccaatgagaagaattagacaagaaatacacagatgtgccagacttctgagaagcacctgccagcaacagcttccttctttgagcttaggtgagcaggattctggggtttgggatttctagtgatggttatggaaagggtgactgtgcctgggacaaagcgaggtcccaaggggacagcctgaactccctgctcatagtagtggccaaataatttggtggactgtgccaacgctactcctgggtttaatacccatctctaggcttaaagatgagagaacctgggactgttgagcatgtttaatactttccttgatttttttcttcctgtttatgtgggaagttgatttaaatgactgataatgtgtatgaaagcactgtaaaacataagagaaaaaccaattagtgtattggcaatcatgcagttaacatttgaaagtgcagtgtaaattgtgaagcattatgtaaatcaggggtccacagtttttctgtaaggggtcaaatcataaatactttagactgtgggccatatggtttctgttacatatttgttttttaaacaacgtttttataaggtcaaaatcattcttagtttttgagccaattggatttggcctgctgttcatagcttaccaccccctgatgtattatttgttattcagagaaaatttctgaatactactagtttccttttctgtgcctgtccctgtgctaggcactaaaaatgcaatgattattgatatctaggtgacctgaaaaaaaatagtgaatgtgctttgtaaactgtaaagcacttgtattctactgtgataagcgttgtggatacaaagaaaggagcaagcataaaaaagtgctctttcaaaaggatatagtactatgcagacacaaggaattgtttgataaatgaataaattatatgtatatttgaggccaatttgtgtttgctgctctggtaattttgagtaaaaatgcagtattccaggtatcagaaacgaaaacacatggaaactgcttttaaactttaaaatatactgaaaacataagggactaagcttgttgtggtcacctataatgtgccagataccatgctgggtgctagagctaccaaagggggaaaagtattctcatagaacaaaaaatttcagaaaggtgcatattaaagtgctttgtaaactaaagcatgatacaaatgtcaatgggctacatatttatgaatgaatgaatggatgaatgaatattaagtgcctcttacataccagctattttgggtactgtaaaatacaagattaattctcctatgtaataagaggaaagtttatcctctatactattcagatgtaaggaatgatatattgcttaattttaaacaatcaagactttactggtgaggttaagttaaattattactgatacatttttccaggtaaccaggaaagagctagtatgaggaaatgaagtaatagatgtgagatccagaccgaaagtcacttaattcagcttgcgaatgtgctttctaaattataaagcacttgtaaatgaaaaatttgatgctttctgtatgaataaaactttctgtaagctaggtattgtctctacaaaattctcattgtatagttaaaccacagtgagaagggttctataagtagttatacaaaccaagggtttaaatacctgttaaatagatcaattttgattgcctactatgtgaactcactgttaaaggcactgaaaatttatcatatttcatttagccacagccaaaaataaggcaatacctatgttagcattttgtgaactctaaggcaccatataaatgtaactgttgattttctcacttggtgctgggtactaggtttataaaattgtatgatagttattatattgtgcaaataaagtaggaaaatttgaataacaatgattatcttttgaatacgcatacgcaagggattggttgtctgaagaatgccactatagtagttatctattgtgtgccaatctcattgctaggcattggggatgcaaagataaaccatctttattgtgtcttgggtagcagaagaaaatatgtgtaaaatcaatttataatttgtaaactgccacccatatataagctatatctgctgaatgatcattgattactcttatccttagagataacaactgggggcacaaacatttattatcattattgaacctacaacagagatctatgtgtagatttacaaagcctacagttctatacagataggaatgaactattggcttactgaatggtgattactttctgtggggctcggaactacatgccctaggatataaaaatgatgttatcattatagagtgctcacagaaggaaatgaagtaatataggtgtgagatccagaccaaaagtcatttaacaagtttattcagtgacgttcctcatcccagtgacgttcctcatcccagtgacgttcctcatcccagtgacgttcctcatccgtgacgttcctcataccagtgacgttcctcatcccagtgacgttcaactccc

SEQ ID NO: 326710 - DNA, 3230 bp, Homo sapiens
ttcacacaaggaaacaagctaatgacccaattgattaccgaattagaggcctcggtaccccccaacaagataaagtctcaaaaacaaccaccacaacgtcaagctcttcattgttcctatctgccaaatcattatacttcctacaagcagtgcagagagctgagtcttcagcaggtccaagaaatttgaacacactgaaggaagtcagccttcccacctgaagatcaacatgcctggcactctagcacttgaggatagctgaatgaatgtgtatttctttgtctctttctttcttgtctttgctctttgttctctatctaaagtgtgtcttacccatttccatgtttctcttgctaatttctttcgtgtgtgcctttgcctcattttctctttttgttcacaagagtggtctgtgtcttgtcttagacatatctctcatttttcattttgttgctatttctctttgctctcctagatgtggctcttctttcacgctttatttcatgtctcctttttgggtcacatgctgtgtgctttttgtccttttcttgttctgtctacctctcctttctctgcctacctctcttttctctttgtgaactgtgattatttgttaccccttccccttctcgttcgttttaaatttcaccttttttctgagtctggcctcctttctgctgtttctactttttatctcacatttctcatttctgcatttcctttctgcctctcttgggctattctctctctcctcccctgcgtgcctcagcatctcttgctgtttgtgattttctatttcagtattaatctctgttggcttgtatttgttctctgcttcttccctttctactcacctttgagtatttcagcctcttcatgaatctatctccctctctttgatttcatgtaatctctccttaaatatttctttgcatatgtgggcaagtgtacgtgtgtgtgtgtcatgtgtggcagaggggcttcctaacccctgcctgataggtgcagaacgtcggctatcagagcaagcattgtggagcggttccttatgccaggctgccatgtgagatgatccaagaccaaaacaaggccctagactgcagtaaaacccagaactcaagtagggcagaaggtggaaggctcatatggatagaaggcccaaagtataagacagatggtttgagacttgagacccgaggactaagatggaaagcccatgttccaagatagatagaagcctcaggcctgaaaccaacaaaagcctcaagagccaagaaaacagagggtggcctgaattggaccgaaggcctgagttggatggaagtctcaaggcttgagttagaagtcttaagacctgggacaggacacatggaaggcctaagaactgagacttgtgacacaaggccaacgacctaagattagcccagggttgtagctggaagacctacaacccaaggatggaaggcccctgtcacaaagcctacctagatggatagaggacccaagcgaaaaaggtatctcaagactaacggccggaatctggaggcccatgacccagaacccaggaaggatagaagcttgaagacctggggaaatcccaagatgagaaccctaaaccctacctcttttctattgtttacacttcttactcttagatatttccagttctcctgtttatctttaagcctgattcttttgagatgtactttttgatgttgccggttacctttagattgacagtattatgcctgggccagtcttgagccagctttaaatcacagcttttacctatttgttaggctatagtgttttgtaaacttctgtttctattcacatcttctccacttgagagagacaccaaaatccagtcagtatctaatctggcttttgttaacttccctcaggagcagacattcatataggtgatactgtatttcagtcctttcttttgaccccagaagccctagactgagaagataaaatggtcaggttgttggggaaaaaaaagtgccaggctctctagagaaaaatgtgaagagatgctccaggccaatgagaagaattagacaagaaatacacagatgtgccagacttctgagaagcacctgccagcaacagcttccttctttgagcttaggtgagcaggattctggggtttgggatttctagtgatggttatggaaagggtgactgtgcctgggacaaagcgaggtcccaaggggacagcctgaactccctgctcatagtagtggccaaataatttggtggactgtgccaacgctactcctgggtttaatacccatctctaggcttaaagatgagagaacctgggactgttgagcatgtttaatactttccttgatttttttcttcctgtttatgtgggaagttgatttaaatgactgataatgtgtatgaaagcactgtaaaacataagagaaaaaccaattagtgtattggcaatcatgcagttaacatttgaaagtgcagtgtaaattgtgaagcattatgtaaatcaggggtccacagtttttctgtaaggggtcaaatcataaatactttagactgtgggccatatggtttctgttacatatttgttttttaaacaacgtttttataaggtcaaaatcattcttagtttttgagccaattggatttggcctgctgttcatagcttaccaccccctgatgtattatttgttattcagagaaaatttctgaatactactagtttccttttctgtgcctgtccctgtgctaggcactaaaaatgcaatgattattgatatctaggtgacctgaaaaaaaatagtgaatgtgctttgtaaactgtaaagcacttgtattctactgtgataagcgttgtggatacaaagaaaggagcaagcataaaaaagtgctctttcaaaaggatatagtactatgcagacacaaggaattgtttgataaatgaataaattatatgtatatttgaggccaatttgtgtttgctgctctggtaattttgagtaaaaatgcagtattccaggtatcagaaacgaaaacacatggaaactgcttttaaactttaaaatatactgaaaacataagggactaagcttgttgtggtcacctataatgtgccagataccatgctgggtgctagagctaccaaagggggaaaagtattctcatagaacaaaaaatttcagaaaggtgcatattaaagtgctttgtaaactaaagcatga

SEQ ID NO: 326711 - DNA, 2667 bp, Homo sapiens
ttcacacaaggaaacaagctaatgacccaattgattaccgaattagaggcctcggtaccccccaacaagataaagtctcaaaaacaaccaccacaacgtcaagctcttcattgttcctatctgccaaatcattatacttcctacaagcagtgcagagagctgagtcttcagcaggtccaagaaatttgaacacactgaaggaagtcagccttcccacctgaagatcaacatgcctggcactctagcacttgaggatagctgaatgaatgtgtatttctttgtctctttctttcttgtctttgctctttgttctctatctaaagtgtgtcttacccatttccatgtttctcttgctaatttctttcgtgtgtgcctttgcctcattttctctttttgttcacaagagtggtctgtgtcttgtcttagacatatctctcatttttcattttgttgctatttctctttgctctcctagatgtggctcttctttcacgctttatttcatgtctcctttttgggtcacatgctgtgtgctttttgtccttttcttgttctgtctacctctcctttctctgcctacctctcttttctctttgtgaactgtgattatttgttaccccttccccttctcgttcgttttaaatttcaccttttttctgagtctggcctcctttctgctgtttctactttttatctcacatttctcatttctgcatttcctttctgcctctcttgggctattctctctctcctcccctgcgtgcctcagcatctcttgctgtttgtgattttctatttcagtattaatctctgttggcttgtatttgttctctgcttcttccctttctactcacctttgagtatttcagcctcttcatgaatctatctccctctctttgatttcatgtaatctctccttaaatatttctttgcatatgtgggcaagtgtacgtgtgtgtgtgtcatgtgtggcagaggggcttcctaacccctgcctgataggtgcagaacgtcggctatcagagcaagcattgtggagcggttccttatgccaggctgccatgtgagatgatccaagaccaaaacaaggccctagactgcagtaaaacccagaactcaagtagggcagaaggtggaaggctcatatggatagaaggcccaaagtataagacagatggtttgagacttgagacccgaggactaagatggaaagcccatgttccaagatagatagaagcctcaggcctgaaaccaacaaaagcctcaagagccaagaaaacagagggtggcctgaattggaccgaaggcctgagttggatggaagtctcaaggcttgagttagaagtcttaagacctgggacaggacacatggaaggcctaagaactgagacttgtgacacaaggccaacgacctaagattagcccagggttgtagctggaagacctacaacccaaggatggaaggcccctgtcacaaagcctacctagatggatagaggacccaagcgaaaaaggtatctcaagactaacggccggaatctggaggcccatgacccagaacccaggaaggatagaagcttgaagacctggggaaatcccaagatgagaaccctaaaccctacctcttttctattgtttacacttcttactcttagatatttccagttctcctgtttatctttaagcctgattcttttgagatgtactttttgatgttgccggttacctttagattgacagtattatgcctgggccagtcttgagccagctttaaatcacagcttttacctatttgttaggctatagtgttttgtaaacttctgtttctattcacatcttctccacttgagagagacaccaaaatccagtcagtatctaatctggcttttgttaacttccctcaggagcagacattcatataggtgatactgtatttcagtcctttcttttgaccccagaagccctagactgagaagataaaatggtcaggttgttggggaaaaaaaagtgccaggctctctagagaaaaatgtgaagagatgctccaggccaatgagaagaattagacaagaaatacacagatgtgccagacttctgagaagcacctgccagcaacagcttccttctttgagcttagtccatccctcatgaaaaatgactgaccactgctgggcagcaggagggatgatgaccaactaattcccaaaccccagtctcattggtaccagccttggggaaccacctacacttgagccacaattggttttgaagtgcatttacaagtttctggcatcactaccactactgattaaacaagaataagagaacattttatcatcatctgctttattcacataaatgaagttgtgatgaataaatctgcttttatgcagacacaaggaattaagtggcttcgtcattgtccttctacctcaaagataatttattccaaaagctaagataaatggaagactcttgaacttgtgaactgatgtgaaatgcagaatctcttttgagtctttgctgtttggaagattgaaaaatattgttcagcatgggtgaccaccagaaagtaatcttaagccatctagatgtcacaattgaaacaaactggggagttggttgctattgtaaaataaaatatactgttttgaaaaaaaagaattt

SEQ ID NO: 326712 - DNA, 2609 bp, Homo sapiens
ttcacacaaggaaacaagctaatgacccaattgattaccgaattagaggcctcggtaccccccaacaagataaagtctcaaaaacaaccaccacaacgtcaagctcttcattgttcctatctgccaaatcattatacttcctacaagcagtgcagagagctgagtcttcagcaggtccaagaaatttgaacacactgaaggaagtcagccttcccacctgaagatcaacatgcctggcactctagcacttgaggatagctgaatgaatgtgtatttctttgtctctttctttcttgtctttgctctttgttctctatctaaagtgtgtcttacccatttccatgtttctcttgctaatttctttcgtgtgtgcctttgcctcattttctctttttgttcacaagagtggtctgtgtcttgtcttagacatatctctcatttttcattttgttgctatttctctttgctctcctagatgtggctcttctttcacgctttatttcatgtctcctttttgggtcacatgctgtgtgctttttgtccttttcttgttctgtctacctctcctttctctgcctacctctcttttctctttgtgaactgtgattatttgttaccccttccccttctcgttcgttttaaatttcaccttttttctgagtctggcctcctttctgctgtttctactttttatctcacatttctcatttctgcatttcctttctgcctctcttgggctattctctctctcctcccctgcgtgcctcagcatctcttgctgtttgtgattttctatttcagtattaatctctgttggcttgtatttgttctctgcttcttccctttctactcacctttgagtatttcagcctcttcatgaatctatctccctctctttgatttcatgtaatctctccttaaatatttctttgcatatgtgggcaagtgtacgtgtgtgtgtgtcatgtgtggcagaggggcttcctaacccctgcctgataggtgcagaacgtcggctatcagagcaagcattgtggagcggttccttatgccaggctgccatgtgagatgatccaagaccaaaacaaggccctagactgcagtaaaacccagaactcaagtagggcagaaggtggaaggctcatatggatagaaggcccaaagtataagacagatggtttgagacttgagacccgaggactaagatggaaagcccatgttccaagatagatagaagcctcaggcctgaaaccaacaaaagcctcaagagccaagaaaacagagggtggcctgaattggaccgaaggcctgagttggatggaagtctcaaggcttgagttagaagtcttaagacctgggacaggacacatggaaggcctaagaactgagacttgtgacacaaggccaacgacctaagattagcccagggttgtagctggaagacctacaacccaaggatggaaggcccctgtcacaaagcctacctagatggatagaggacccaagcgaaaaaggtatctcaagactaacggccggaatctggaggcccatgacccagaacccaggaaggatagaagcttgaagacctggggaaatcccaagatgagaaccctaaaccctacctcttttctattgtttacacttcttactcttagatatttccagttctcctgtttatctttaagcctgattcttttgagatgtactttttgatgttgccggttacctttagattgacagtattatgcctgggccagtcttgagccagctttaaatcacagcttttacctatttgttaggctatagtgttttgtaaacttctgtttctattcacatcttctccacttgagagagacaccaaaatccagtcagtatctaatctggcttttgttaacttccctcaggagcagacattcatataggtgatactgtatttcagtcctttcttttgaccccagaagccctagactgagaagataaaatggtcaggttgttggggaagaattagacaagaaatacacagatgtgccagacttctgagaagcacctgccagcaacagcttccttctttgagcttagtccatccctcatgaaaaatgactgaccactgctgggcagcaggagggatgatgaccaactaattcccaaaccccagtctcattggtaccagccttggggaaccacctacacttgagccacaattggttttgaagtgcatttacaagtttctggcatcactaccactactgattaaacaagaataagagaacattttatcatcatctgctttattcacataaatgaagttgtgatgaataaatctgcttttatgcagacacaaggaattaagtggcttcgtcattgtccttctacctcaaagataatttattccaaaagctaagataaatggaagactcttgaacttgtgaactgatgtgaaatgcagaatctcttttgagtctttgctgtttggaagattgaaaaatattgttcagcatgggtgaccaccagaaagtaatcttaagccatctagatgtcacaattgaaacaaactggggagttggttgctattgtaaaataaaatatactgttttgaaaaaaaagaattt

SEQ ID NO: 326713 - DNA, 2624 bp, Homo sapiens
ttcacacaaggaaacaagctaatgacccaattgattaccgaattagaggcctcggtaccccccaacaagataaagtctcaaaaacaaccaccacaacgtcaagctcttcattgttcctatctgccaaatcattatacttcctacaagcagtgcagagagctgagtcttcagcaggtccaagaaatttgaacacactgaaggaagtcagccttcccacctgaagatcaacatgcctggcactctagcacttgaggatagctgaatgaatgtgtatttctttgtctctttctttcttgtctttgctctttgttctctatctaaagtgtgtcttacccatttccatgtttctcttgctaatttctttcgtgtgtgcctttgcctcattttctctttttgttcacaagagtggtctgtgtcttgtcttagacatatctctcatttttcattttgttgctatttctctttgctctcctagatgtggctcttctttcacgctttatttcatgtctcctttttgggtcacatgctgtgtgctttttgtccttttcttgttctgtctacctctcctttctctgcctacctctcttttctctttgtgaactgtgattatttgttaccccttccccttctcgttcgttttaaatttcaccttttttctgagtctggcctcctttctgctgtttctactttttatctcacatttctcatttctgcatttcctttctgcctctcttgggctattctctctctcctcccctgcgtgcctcagcatctcttgctgtttgtgattttctatttcagtattaatctctgttggcttgtatttgttctctgcttcttccctttctactcacctttgagtatttcagcctcttcatgaatctatctccctctctttgatttcatgtaatctctccttaaatatttctttgcatatgtgggcaagtgtacgtgtgtgtgtgtcatgtgtggcagaggggcttcctaacccctgcctgataggtgcagaacgtcggctatcagagcaagcattgtggagcggttccttatgccaggctgccatgtgagatgatccaagaccaaaacaaggccctagactgcagtaaaacccagaactcaagtagggcagaaggtggaaggctcatatggatagaaggcccaaagtataagacagatggtttgagacttgagacccgaggactaagatggaaagcccatgttccaagatagatagaagcctcaggcctgaaaccaacaaaagcctcaagagccaagaaaacagagggtggcctgaattggaccgaaggcctgagttggatggaagtctcaaggcttgagttagaagtcttaagacctgggacaggacacatggaaggcctaagaactgagacttgtgacacaaggccaacgacctaagattagcccagggttgtagctggaagacctacaacccaaggatggaaggcccctgtcacaaagcctacctagatggatagaggacccaagcgaaaaaggtatctcaagactaacggccggaatctggaggcccatgacccagaacccaggaaggatagaagcttgaagacctggggaaatcccaagatgagaaccctaaaccctacctcttttctattgtttacacttcttactcttagatatttccagttctcctgtttatctttaagcctgattcttttgagatgtactttttgatgttgccggttacctttagattgacagtattatgcctgggccagtcttgagccagctttaaatcacagcttttacctatttgttaggctatagtgttttgtaaacttctgtttctattcacatcttctccacttgagagagacaccaaaatccagtcagtatctaatctggcttttgttaacttccctcaggagcagacattcatataggtgatactgtatttcagtcctttcttttgaccccagaagccctagactgagaagataaaatggtcaggttgttggggaaaaaaaagtgccaggctctctagagaaaaatgtgaagagatgctccaggccaatgagaagaattagacaagaaatacacagatgtgccagacttctgagaagcacctgccagcaacagcttccttctttgagcttaggtgagcaggattctggggtttgggatttctagtgatggttatggaaagggtgactgtgcctgggacaaagcgaggtcccaaggggacagcctgaactccctgctcatagtagtggccaaataatttggtggactgtgccaacgctactcctgggtttaatacccatctctaggcttaaagatgagagaacctgggactgttgagcatgtttaatactttccttgatttttttcttcctgtttatgtgggaagttgatttaaatgactgataatgtgtatgaaagcactgtaaaacataagagaaaaaccaattagtgtattggcaatcatgcagttaacatttgaaagtgcagtgtaaattgtgaagcattatgtaaatcaggggtccacagtttttctgtaaggggtcaaatcataaatactttagactgtgggccatatggtttctgttacatatttgttaggctatagtgtcttgcccgaattc

SEQ ID NO: 326714 - DNA, 2521 bp, Homo sapiens
ttcacacaaggaaacaagctaatgacccaattgattaccgaattagaggcctcggtaccccccaacaagataaagtctcaaaaacaaccaccacaacgtcaagctcttcattgttcctatctgccaaatcattatacttcctacaagcagtgcagagagctgagtcttcagcaggtccaagaaatttgaacacactgaaggaagtcagccttcccacctgaagatcaacatgcctggcactctagcacttgaggatagctgaatgaatgtgtatttctttgtctctttctttcttgtctttgctctttgttctctatctaaagtgtgtcttacccatttccatgtttctcttgctaatttctttcgtgtgtgcctttgcctcattttctctttttgttcacaagagtggtctgtgtcttgtcttagacatatctctcatttttcattttgttgctatttctctttgctctcctagatgtggctcttctttcacgctttatttcatgtctcctttttgggtcacatgctgtgtgctttttgtccttttcttgttctgtctacctctcctttctctgcctacctctcttttctctttgtgaactgtgattatttgttaccccttccccttctcgttcgttttaaatttcaccttttttctgagtctggcctcctttctgctgtttctactttttatctcacatttctcatttctgcatttcctttctgcctctcttgggctattctctctctcctcccctgcgtgcctcagcatctcttgctgtttgtgattttctatttcagtattaatctctgttggcttgtatttgttctctgcttcttccctttctactcacctttgagtatttcagcctcttcatgaatctatctccctctctttgatttcatgtaatctctccttaaatatttctttgcatatgtgggcaagtgtacgtgtgtgtgtgtcatgtgtggcagaggggcttcctaacccctgcctgataggtgcagaacgtcggctatcagagcaagcattgtggagcggttccttatgccaggctgccatgtgagatgatccaagaccaaaacaaggccctagactgcagtaaaacccagaactcaagtagggcagaaggtggaaggctcatatggatagaaggcccaaagtataagacagatggtttgagacttgagacccgaggactaagatggaaagcccatgttccaagatagatagaagcctcaggcctgaaaccaacaaaagcctcaagagccaagaaaacagagggtggcctgaattggaccgaaggcctgagttggatggaagtctcaaggcttgagttagaagtcttaagacctgggacaggacacatggaaggcctaagaactgagacttgtgacacaaggccaacgacctaagattagcccagggttgtagctggaagacctacaacccaaggatggaaggcccctgtcacaaagcctacctagatggatagaggacccaagcgaaaaaggtatctcaagactaacggccggaatctggaggcccatgacccagaacccaggaaggatagaagcttgaagacctggggaaatcccaagatgagaaccctaaaccctacctcttttctattgtttacacttcttactcttagatatttccagttctcctgtttatctttaagcctgattcttttgagatgtactttttgatgttgccggttacctttagattgacagtattatgcctgggccagtcttgagccagctttaaatcacagcttttacctatttgttaggctatagtgttttgtaaacttctgtttctattcacatcttctccacttgagagagacaccaaaatccagtcagtatctaatctggcttttgttaacttccctcaggagcagacattcatataggtgatactgtatttcagtcctttcttttgaccccagaagccctagactgagaagataaaatggtcaggttgttggggaaaaaaaagtgccaggctctctagagaaaaatgtgaagagatgctccaggccaatgagaagaattagacaagaaatacacagatgtgccagacttctgagaagcacctgccagcaacagcttccttctttgagcttagtttctggcatcactaccactactgattaaacaagaataagagaacattttatcatcatctgctttattcacataaatgaagttgtgatgaataaatctgcttttatgcagacacaaggaattaagtggcttcgtcattgtccttctacctcaaagataatttattccaaaagctaagataaatggaagactcttgaacttgtgaactgatgtgaaatgcagaatctcttttgagtctttgctgtttggaagattgaaaaatattgttcagcatgggtgaccaccagaaagtaatcttaagccatctagatgtcacaattgaaacaaactggggagttggttgctattgtaaaataaaatatactgttttgaaaaaaaagaattt

SEQ ID NO: 326715 - DNA, 313 bp, Homo sapiens
gcttgtcattagaggactttagggagaccaagcaggctagaaagtagagacaggagatacctatgtctaatgcttcagtttatacttcctaggtttttttcattggggtttttgtaactcttttggtatcctaccggtgctttggtagcctactgaaccctgtctttcttcttaaggacattctgagcatgtgagacctgaggactgcaaacagctataagaggctccaaattaatcatatctttccctttgagaatctggccaagctccagctaatctacttggatgggttgccagctatctggagaaaaag

SEQ ID NO: 326716 - DNA, 2232 bp, Homo sapiens
atatctccattttctaataggaagcacttggacttaaaattgctaagatattttttgcagttgctatttctgtgcatcttgaatctatctgacacaatcaaatgacagtattgttaactctcacaccattaagaaaatttcttattttgtaggcattcactgtgagaggtaaaattgctgctttggcaggtatgattccagtttgccaaacggcttttcttccttccacaacctctttttcccctagcccagggtgaaacaagtgggtcatctccaaccttgatttttatttggattcagcattttgggtttggaaggttacaagaaggaaccataaatggccatattcctagatttttatttatctgacaaaatacacaacttaaaagccaggaaaactaaggttcattacagggagatgaactttttctaattggaggacaaattgtggaaggtggggtctgatctttgcttcaccacttgaagagactgtcatccttcacctgaggttccatttctagcttttatgtgacctctcttgaacaaagtcatttgggaacccccagaaatgacccctttacattgtaggaccataagcaaaacactggttgtgtatagtcactgatccccaaggacttgcagttttttatttctgctggtgtgtcttgggatcagcttataactcctactcttacttagtcagtgaccagtccagtctggtctggaccaggcctgacaaacttctgctcacttgcatcattttcattctgagccagtaggactttgggtagactttaaagcccaagaattggtactcgctttggctagtgacatttgatttttgtctccatcttgatttctgacatcattggccaagtcacattaactttttttgatcactgagaaaaacagtcgaacaaggcattacagagggtggttaaggtagagggtggggggcaggaatgcttatgtaggatagaaagaatgtgggggtagctgtttggttatggtgatccagtcctttggaaccttacaaggctcctgtgggcatgtcaatgttaccattacagcctctacgacccacccacctttgaaaagtcagtacaagtagaccacagtttaaagtagttagtataattctactaaggtttaatcattatacttgttcacttcctggtgcatatttcctaaatatgcttggggtgtggggtggggggttgagttttcactgttccattgcgtgtcatcttatatttttctccatcctgtgactttggcatcttactcgactttctattttcttttcccttggcttattgcagtagtctgctggtgcaggtagagagctcagtgcacctattcccctgttactgctaattatcttgaatattgtcagaggttattttgatgttctaagaatataaagtcattttttacaaaatcatcttttccaagttaaaagcaaaataaaaaaatcccctgtgctagggtgcccatttcagcttttgacattgcccctgtacttttatagatgctctttttgtccgtgttggtagtaactaatgactagtgaattttcatgtaaatgaagcaaaataaatatttcagattttattaatctctcataacccagccaaatctgatgacttcattttaattgcttcccagaaagcacttcccctcctaccttctattctattctattctattctattctattctattctattctgttctattctgttcattctattctgttctattctgttctattctgtttttagaataacacactaggtaaagaaactttaactgcaaggagtcagtgacttttagtgctccctgataaatgatgttattgacaaaagtaaaaaattatttcattgtttttttcctgtattactatctcctctcctgtgcttttgacagtgtgtttagtggatggataatatgtatttctctttcccactcccagattccaaattccctgcctttttggcccacctcaccacaaaagctccatagtttattaatgtaagtttgaatggatgcttctttggggaaacttcaggagttaatggaagagtttcagaaaggaatgagaatgcctcaggagttgttctgtgatggaaattggtctgttgttctgttaatgctgatggaaagaaacttacaacgcttaataaaaatctattcttttagtaaaaaaaattgtgaaataattttgggtgt

SEQ ID NO: 326717 - DNA, 1167 bp, Homo sapiens
  misc_feature (1066)..(1066): n is a, c, g, or t
  misc_feature (1143)..(1143): n is a, c, g, or t
  misc_feature (1146)..(1146): n is a, c, g, or t
atatctccattttctaataggaagcacttggacttaaaattgctaagatattttttgcagttgctatttctgtgcatcttgaatctatctgacacaatcaaatgacagtattgttaactctcacaccattaagaaaatttcttattttgtaggcattcactgtgagaggtaaaattgctgctttggcaggtatgattccagtttgccaaacggcttttcttccttccacaacctctttttcccctagcccagggtgaaacaagtgggtcatctccaaccttgatttttatttggattcagcattttgggtttggaaggttacaagaaggaaccataaatggccatattcctagatttttatttatctgacaaaatacacaacttaaaagccaggaaaactaaggttcattacagggagatgaactttttctaattggaggacaaattgtggaaggtggggtctgatctttgcttcaccacttgaagagactgtcatccttcacctgaggttccatttctagcttttatgtgacctctcttgaacaaagtcatttgggaacccccagaaatgacccctttacattgtaggaccataagcaaaacactggttgtgtatagtcactgatccccaaggacttgcagttttttatttctgctggtgtgtcttgggatcagcttataactcctactcttacttagtcagtgaccagtccagtctggtctggaccaggcctgacaaacttctgctcacttgcatcattttcattctgagccagtaggactttgggtagactttaaagcccaagaattggtactcgctttggctagtgacatttgatttttgtctccatcttgatttctgacatcattggccaagtcacattaactttttttgatcactgagaaaaacagtcgaacaaggcattacagagggtggttaaggtagagggtggggggcaggaatgcttatgtaggatagaaagaatgtgggggtagctgtttggttgggatatatttaaaggaattggtagttaaaaggaaggtggtgggtgtgtttattatattngttatgggggttaaaatggattatattgagaagtagagtttgaggtgattagaatgttttaaggtggaatatttttnttnagggtgaagtgtgttgaattt

SEQ ID NO: 326718 - DNA, 3249 bp, Homo sapiens
tgccagttctcttcggggactaactgcaacggagagactcaagatgattccctttttacccatgttttctctactattgctgcttattgttaaccctataaacgccaacaatcattatgacaagatcttggctcatagtcgtatcaggggtcgggaccaaggcccaaatgtctgtgcccttcaacagattttgggcaccaaaaagaaatacttcagcacttgtaagaactggtataaaaagtccatctgtggacagaaaacgactgtgttatatgaatgttgccctggttatatgagaatggaaggaatgaaaggctgcccagcagttttgcccattgaccatgtttatggcactctgggcatcgtgggagccaccacaacgcagcgctattctgacgcctcaaaactgagggaggagatcgagggaaagggatccttcacttactttgcaccgagtaatgaggcttgggacaacttggattctgatatccgtagaggtttggagagcaacgtgaatgttgaattactgaatgctttacatagtcacatgattaataagagaatgttgaccaaggacttaaaaaatggcatgattattccttcaatgtataacaatttggggcttttcattaaccattatcctaatggggttgtcactgttaattgtgctcgaatcatccatgggaaccagattgcaacaaatggtgttgtccatgtcattgaccgtgtgcttacacaaattggtacctcaattcaagacttcattgaagcagaagatgacctttcatcttttagagcagctgccatcacatcggacatattggaggcccttggaagagacggtcacttcacactctttgctcccaccaatgaggcttttgagaaacttccacgaggtgtcctagaaaggatcatgggagacaaagtggcttccgaagctcttatgaagtaccacatcttaaatactctccagtgttctgagtctattatgggaggagcagtctttgagacgctggaaggaaatacaattgagataggatgtgacggtgacagtataacagtaaatggaatcaaaatggtgaacaaaaaggatattgtgacaaataatggtgtgatccatttgattgatcaggtcctaattcctgattctgccaaacaagttattgagctggctggaaaacagcaaaccaccttcacggatcttgtggcccaattaggcttggcatctgctctgaggccagatggagaatacactttgctggcacctgtgaataatgcattttctgatgatactctcagcatggatcagcgcctccttaaattaattctgcagaatcacatattgaaagtaaaagttggccttaatgagctttacaacgggcaaatactggaaaccatcggaggcaaacagctcagagtcttcgtatatcgtacagctgtctgcattgaaaattcatgcatggagaaagggagtaagcaagggagaaacggtgcgattcacatattccgcgagatcatcaagccagcagagaaatccctccatgaaaagttaaaacaagataagcgctttagcaccttcctcagcctacttgaagctgcagacttgaaagagctcctgacacaacctggagactggacattatttgtgccaaccaatgatgcttttaagggaatgactagtgaagaaaaagaaattctgatacgggacaaaaatgctcttcaaaacatcattctttatcacctgacaccaggagttttcattggaaaaggatttgaacctggtgttactaacattttaaagaccacacaaggaagcaaaatctttctgaaagaagtaaatgatacacttctggtgaatgaattgaaatcaaaagaatctgacatcatgacaacaaatggtgtaattcatgttgtagataaactcctctatccagcagacacacctgttggaaatgatcaactgctggaaatacttaataaattaatcaaatacatccaaattaagtttgttcgtggtagcaccttcaaagaaatccccgtgactgtctatagcaactaaaattataaccaaagttgtggaaccaaaaattaaagtgattgaaggcagtcttcagcctattatcaaaactgaaggacccacactaacaaaagtcaaaattgaaggtgaacctgaattcagactgattaaagaaggtgaaacaataactgaagtgatccatggagagccaattattaaaaaatacaccaaaatcattgatggagtgcctgtggaaataactgaaaaagagacacgagaagaacgaatcattacaggtcctgaaataaaatacactaggatttctactggaggtggagaaacagaagaaactctgaagaaattgttacaagaagaggtcaccaaggtcaccaaattcattgaaggtggtgatggtcatttatttgaagatgaagaaattaaaagactgcttcagggagacacacccgtgaggaagttgcaagccaacaaaaaagttcaaggttctagaagacgattaagggaaggtcgttctcagtgaaaatccaaaaaccagaaaaaaatgtttatacaaccctaagtcaataacctgaccttagaaaattgtgagagccaagttgacttcaggaactgaaacatcagcacaaagaagcaatcatcaaataattctgaacacaaatttaatatttttttttctgaatgagaaacatgagggaaattgtggagttagcctcctgtggtaaaggaattgaagaaaatataacaccttacaccctttttcatcttgacattaaaagttctggctaactttggaatccattagagaaaaatccttgtcaccagattcattacaattcaaatcgaagagttgtgaactgttatcccattgaaaagaccgagccttgtatgtatgttatggatacataaaatgcacgcaagccattatctctccatgggaagctaagttataaaaataggtgcttggtgtacaaaactttttatatcaaaaggctttgcacatttctatatgagtgggtttactggtaaattatgttattttttacaactaattttgtactctcagaatgtttgtcatatgcttcttgcaatgcatattttttaatctcaaacgtttcaataaaaccatttttcagatataaagagaattacttcaaattgagtaattcagaaaaactcaagatttaagttaaaaagtggtttggacttgggaacag

SEQ ID NO: 326719 - DNA, 2282 bp, Homo sapiens
  misc_feature (2225)..(2225): n is a, c, g, or t
  misc_feature (2242)..(2242): n is a, c, g, or t
  misc_feature (2251)..(2251): n is a, c, g, or t
  misc_feature (2260)..(2260): n is a, c, g, or t
  misc_feature (2274)..(2274): n is a, c, g, or t
tgccagttctcttcggggactaactgcaacggagagactcaagatgattccctttttacccatgttttctctactattgctgcttattgttaaccctataaacgccaacaatcattatgacaagatcttggctcatagtcgtatcaggggtcgggaccaaggcccaaatgtctgtgcccttcaacagattttgggcaccaaaaagaaatacttcagcacttgtaagaactggtataaaaagtccatctgtggacagaaaacgactgtgttatatgaatgttgccctggttatatgagaatggaaggaatgaaaggctgcccagcagttttgcccattgaccatgtttatggcactctgggcatcgtgggagccaccacaacgcagcgctattctgacgcctcaaaactgagggaggagatcgagggaaagggatccttcacttactttgcaccgagtaatgaggcttgggacaacttggattctgatatccgtagaggtttggagagcaacgtgaatgttgaattactgaatgctttacatagtcacatgattaataagagaatgttgaccaaggacttaaaaaatggcatgattattccttcaatgtataacaatttggggcttttcattaaccattatcctaatggggttgtcactgttaattgtgctcgaatcatccatgggaaccagattgcaacaaatggtgttgtccatgtcattgaccgtgtgcttacacaaattggtacctcaattcaagacttcattgaagcagaagatgacctttcatcttttagagcagctgccatcacatcggacatattggaggcccttggaagagacggtcacttcacactctttgctcccaccaatgaggcttttgagaaacttccacgaggtgtcctagaaaggatcatgggagacaaagtggcttccgaagctcttatgaagtaccacatcttaaatactctccagtgttctgagtctattatgggaggagcagtctttgagacgctggaaggaaatacaattgagataggatgtgacggtgacagtataacagtaaatggaatcaaaatggtgaacaaaaaggatattgtgacaaataatggtgtgatccatttgattgatcaggtcctaattcctgattctgccaaacaagttattgagctggctggaaaacagcaaaccaccttcacggatcttgtggcccaattaggcttggcatctgctctgaggccagatggagaatacactttgctggcacctgtgaataatgcattttctgatgatactctcagcatggatcagcgcctccttaaattaattctgcagaatcacatattgaaagtaaaagttggccttaatgagctttacaacgggcaaatactggaaaccatcggaggcaaacagctcagagtcttcgtatatcgtacagctgtctgcattgaaaattcatgcatggagaaagggagtaagcaagggagaaacggtgcgattcacatattccgcgagatcatcaagccagcagagaaatccctccatgaaaagttaaaacaagataagcgctttagcaccttcctcagcctacttgaagctgcagacttgaaagagctcctgacacaacctggagactggacattatttgtgccaaccaatgatgcttttaagggaatgactagtgaagaaaaagaaattctgatacgggacaaaaatgctcttcaaaacatcattctttatcacctgacaccaggagttttcattggaaaaggatttgaacctggtgttactaacattttaaagaccacacaaggaagcaaaatctttctgaaagaagtaaatgatacacttctggtgaatgaattgaaatcaaaagaatctgacatcatgacaacaaatggtgtaattcatgttgtagataaactcctctatccagcagacacacctgttggaaatgatcaactgctggaaatacttaataaattaatcaaatacatccaaattaagtttgttcgtggtagcaccttcaaagaaatccccgtgactgtctatagacccacactaacaaaagtcaaaattgaaggtgaacctgaattcagactgattaaagaaggtgaaacaataactgaagtgatccatggagagccaattattaaaaaatacaccaaaatcattgatggagtgcctgtgggaaataactgaaaaagagacacgagaagacgaatcnttaccggtctgaataanatacactangattctacngaggtgggaaccgnacgaactc

SEQ ID NO: 326720 - DNA, 3078 bp, Homo sapiens
tgccagttctcttcggggactaactgcaacggagagactcaagatgattccctttttacccatgttttctctactattgctgcttattgttaaccctataaacgccaacaatcattatgacaagatcttggctcatagtcgtatcaggggtcgggaccaaggcccaaatgtctgtgcccttcaacagattttgggcaccaaaaagaaatacttcagcacttgtaagaactggtataaaaagtccatctgtggacagaaaacgactgtgttatatgaatgttgccctggttatatgagaatggaaggaatgaaaggctgcccagcagttttgcccattgaccatgtttatggcactctgggcatcgtgggagccaccacaacgcagcgctattctgacgcctcaaaactgagggaggagatcgagggaaagggatccttcacttactttgcaccgagtaatgaggcttgggacaacttggattctgatatccgtagaggtttggagagcaacgtgaatgttgaattactgaatgctttacatagtcacatgattaataagagaatgttgaccaaggacttaaaaaatggcatgattattccttcaatgtataacaatttggggcttttcattaaccattatcctaatggggttgtcactgttaattgtgctcgaatcatccatgggaaccagattgcaacaaatggtgttgtccatgtcattgaccgtgtgcttacacaaattggtacctcaattcaagacttcattgaagcagaagatgacctttcatcttttagagcagctgccatcacatcggacatattggaggcccttggaagagacggtcacttcacactctttgctcccaccaatgaggcttttgagaaacttccacgaggtgtcctagaaaggatcatgggagacaaagtggcttccgaagctcttatgaagtaccacatcttaaatactctccagtgttctgagtctattatgggaggagcagtctttgagacgctggaaggaaatacaattgagataggatgtgacggtgacagtataacagtaaatggaatcaaaatggtgaacaaaaaggatattgtgacaaataatggtgtgatccatttgattgatcaggtcctaattcctgattctgccaaacaagttattgagctggctggaaaacagcaaaccaccttcacggatcttgtggcccaattaggcttggcatctgctctgaggccagatggagaatacactttgctggcacctgtgaataatgcattttctgatgatactctcagcatggatcagcgcctccttaaattaattctgcagaatcacatattgaaagtaaaagttggccttaatgagctttacaacgggcaaatactggaaaccatcggaggcaaacagctcagagtcttcgtatatcgtacagctgtctgcattgaaaattcatgcatggagaaagggagtaagcaagggagaaacggtgcgattcacatattccgcgagatcatcaagccagcagagaaatccctccatgaaaagttaaaacaagataagcgctttagcaccttcctcagcctacttgaagctgcagacttgaaagagctcctgacacaacctggagactggacattatttgtgccaaccaatgatgcttttaagggaatgactagtgaagaaaaagaaattctgatacgggacaaaaatgctcttcaaaacatcattctttatcacctgacaccaggagttttcattggaaaaggatttgaacctggtgttactaacattttaaagaccacacaaggaagcaaaatctttctgaaagaagtaaatgatacacttctggtgaatgaattgaaatcaaaagaatctgacatcatgacaacaaatggtgtaattcatgttgtagataaactcctctatccagcagacacacctgttggaaatgatcaactgctggaaatacttaataaattaatcaaatacatccaaattaagtttgttcgtggtagcaccttcaaagaaatccccgtgactgtctatagagccaattattaaaaaatacaccaaaatcattgatggagtgcctgtggaaataactgaaaaagagacacgagaagaacgaatcattacaggtcctgaaataaaatacactaggatttctactggaggtggagaaacagaagaaactctgaagaaattgttacaagaagaggtcaccaaggtcaccaaattcattgaaggtggtgatggtcatttatttgaagatgaagaaattaaaagactgcttcagggagacacacccgtgaggaagttgcaagccaacaaaaaagttcaaggttctagaagacgattaagggaaggtcgttctcagtgaaaatccaaaaaccagaaaaaaatgtttatacaaccctaagtcaataacctgaccttagaaaattgtgagagccaagttgacttcaggaactgaaacatcagcacaaagaagcaatcatcaaataattctgaacacaaatttaatatttttttttctgaatgagaaacatgagggaaattgtggagttagcctcctgtggtaaaggaattgaagaaaatataacaccttacaccctttttcatcttgacattaaaagttctggctaactttggaatccattagagaaaaatccttgtcaccagattcattacaattcaaatcgaagagttgtgaactgttatcccattgaaaagaccgagccttgtatgtatgttatggatacataaaatgcacgcaagccattatctctccatgggaagctaagttataaaaataggtgcttggtgtacaaaactttttatatcaaaaggctttgcacatttctatatgagtgggtttactggtaaattatgttattttttacaactaattttgtactctcagaatgtttgtcatatgcttcttgcaatgcatattttttaatctcaaacgtttcaataaaaccatttttcagatataaagagaattacttcaaattgagtaattcagaaaaactcaagatttaagttaaaaagtggtttggacttgggaacag

SEQ ID NO: 326721 - DNA, 942 bp, Homo sapiens
  misc_feature (885)..(885): n is a, c, g, or t
  misc_feature (902)..(902): n is a, c, g, or t
  misc_feature (911)..(911): n is a, c, g, or t
  misc_feature (920)..(920): n is a, c, g, or t
  misc_feature (934)..(934): n is a, c, g, or t
ctgaccatagaggatcccctcgaatcgacggtttctccacgatacacaggcttcccatctaaagtcatgcttaactaaaagggaaaaaaaatgaaccaagcaaaagtatatagagtagccgtgacatttgcattattttctagactttacatttgcctgcaacaggcataacatgaaactccagagggaatttggattgataggaatgttcacataaacaccagcagtggctaactgttacacaacattcaaagtattcgagagaactgcagctcctgacacaacctggagactggacattatttgtgccaaccaatgatgcttttaagggaatgactagtgaagaaaaagaaattctgatacgggacaaaaatgctcttcaaaacatcattctttatcacctgacaccaggagttttcattggaaaaggatttgaacctggtgttactaacattttaaagaccacacaaggaagcaaaatctttctgaaagaagtaaatgatacacttctggtgaatgaattgaaatcaaaagaatctgacatcatgacaacaaatggtgtaattcatgttgtagataaactcctctatccagcagacacacctgttggaaatgatcaactgctggaaatacttaataaattaatcaaatacatccaaattaagtttgttcgtggtagcaccttcaaagaaatccccgtgactgtctatagacccacactaacaaaagtcaaaattgaaggtgaacctgaattcagactgattaaagaaggtgaaacaataactgaagtgatccatggagagccaattattaaaaaatacaccaaaatcattgatggagtgcctgtgggaaataactgaaaaagagacacgagaagacgaatcnttaccggtctgaataanatacactangattctacngaggtgggaaccgnacgaactc

SEQ ID NO: 326722 - DNA, 738 bp, Homo sapiens
  misc_feature (681)..(681): n is a, c, g, or t
  misc_feature (698)..(698): n is a, c, g, or t
  misc_feature (707)..(707): n is a, c, g, or t
  misc_feature (716)..(716): n is a, c, g, or t
  misc_feature (730)..(730): n is a, c, g, or t
ctgaccatagaggatcccctcgaatcgacggtttctcatgtataaacttttcatggagggatttctagctcctgacacaacctggagactggacattatttgtgccaaccaatgatgcttttaagggaatgactagtgaagaaaaagaaattctgatacgggacaaaaatgctcttcaaaacatcattctttatcacctgacaccaggagttttcattggaaaaggatttgaacctggtgttactaacattttaaagaccacacaaggaagcaaaatctttctgaaagaagtaaatgatacacttctggtgaatgaattgaaatcaaaagaatctgacatcatgacaacaaatggtgtaattcatgttgtagataaactcctctatccagcagacacacctgttggaaatgatcaactgctggaaatacttaataaattaatcaaatacatccaaattaagtttgttcgtggtagcaccttcaaagaaatccccgtgactgtctatagacccacactaacaaaagtcaaaattgaaggtgaacctgaattcagactgattaaagaaggtgaaacaataactgaagtgatccatggagagccaattattaaaaaatacaccaaaatcattgatggagtgcctgtgggaaataactgaaaaagagacacgagaagacgaatcnttaccggtctgaataanatacactangattctacngaggtgggaaccgnacgaactc

SEQ ID NO: 326723 - DNA, 322 bp, Homo sapiens
ctggctatccttcattcatttattcaaaaacatttattgagtccgggagcggtggctcatgcctgcaatctcagcaccttgggataactgcaacggagagactcaagatgattccctttttacccatgttttctctactattgctgcttattgttaaccctataaacgccaacaatcattatgacaagatcttggctcatagtcgtatcaggggtcgggaccaaggcccaaatgtctgtgcccttcaacagattttgggcaccaaaaagaaatacttcagcactcttgtgatgcacgtgactagctggcatcctggtatcct

SEQ ID NO: 326724 - DNA, 3076 bp, Homo sapiens
tgccagttctcttcggggactaactgcaacggagagactcaagatgattccctttttacccatgttttctctactattgctgcttattgttaaccctataaacgccaacaatcattatgacaagatcttggctcatagtcgtatcaggggtcgggaccaaggcccaaatgtctgtgcccttcaacagattttgggcaccaaaaagaaatacttcagcacttgtaagaactggtataaaaagtccatctgtggacagaaaacgactgtgttatatgaatgttgccctggttatatgagaatggaaggaatgaaaggctgcccagcagttttgcccattgaccatgtttatggcactctgggcatcgtgggagccaccacaacgcagcgctattctgacgcctcaaaactgagggaggagatcgagggaaagggatccttcacttactttgcaccgagtaatgaggcttgggacaacttggattctgatatccgtagaggtttggagagcaacgtgaatgttgaattactgaatgctttacatagtcacatgattaataagagaatgttgaccaaggacttaaaaaatggcatgattattccttcaatgtataacaatttggggcttttcattaaccattatcctaatggggttgtcactgttaattgtgctcgaatcatccatgggaaccagattgcaacaaatggtgttgtccatgtcattgaccgtgtgcttacacaaattggtacctcaattcaagacttcattgaagcagaagatgacctttcatcttttagagcagctgccatcacatcggacatattggaggcccttggaagagacggtcacttcacactctttgctcccaccaatgaggcttttgagaaacttccacgaggtgtcctagaaaggatcatgggagacaaagtggcttccgaagctcttatgaagtaccacatcttaaatactctccagtgttctgagtctattatgggaggagcagtctttgagacgctggaaggaaatacaattgagataggatgtgacggtgacagtataacagtaaatggaatcaaaatggtgaacaaaaaggatattgtgacaaataatggtgtgatccatttgattgatcaggtcctaattcctgattctgccaaacaagttattgagctggctggaaaacagcaaaccaccttcacggatcttgtggcccaattaggcttggcatctgctctgaggccagatggagaatacactttgctggcacctgtgaataatgcattttctgatgatactctcagcatggatcagcgcctccttaaattaattctgcagaatcacatattgaaagtaaaagttggccttaatgagctttacaacgggcaaatactggaaaccatcggaggcaaacagctcagagtcttcgtatatcgtacagctgtctgcattgaaaattcatgcatggagaaagggagtaagcaagggagaaacggtgcgattcacatattccgcgagatcatcaagccagcagagaaatccctccatgaaaagttaaaacaagataagcgctttagcaccttcctcagcctacttgaagctgcagacttgaaagagctcctgacacaacctggagactggacattatttgtgccaaccaatgatgcttttaagggaatgactagtgaagaaaaagaaattctgatacgggacaaaaatgctcttcaaaacatcattctttatcacctgacaccaggagttttcattggaaaaggatttgaacctggtgttactaacattttaaagaccacacaaggaagcaaaatctttctgaaagaagtaaatgatacacttctggtgaatgaattgaaatcaaaagaatctgacatcatgacaacaaatggtgtaattcatgttgtagataaactcctctatccagcagacacacctgttggaaatgatcaactgctggaaatacttaataaattaatcaaatacatccaaattaagtttgttcgtggtagcaccttcaaagaaatccccgtgactgtctatagccaattattaaaaaatacaccaaaatcattgatggagtgcctgtggaaataactgaaaaagagacacgagaagaacgaatcattacaggtcctgaaataaaatacactaggatttctactggaggtggagaaacagaagaaactctgaagaaattgttacaagaagaggtcaccaaggtcaccaaattcattgaaggtggtgatggtcatttatttgaagatgaagaaattaaaagactgcttcagggagacacacccgtgaggaagttgcaagccaacaaaaaagttcaaggttctagaagacgattaagggaaggtcgttctcagtgaaaatccaaaaaccagaaaaaaatgtttatacaaccctaagtcaataacctgaccttagaaaattgtgagagccaagttgacttcaggaactgaaacatcagcacaaagaagcaatcatcaaataattctgaacacaaatttaatatttttttttctgaatgagaaacatgagggaaattgtggagttagcctcctgtggtaaaggaattgaagaaaatataacaccttacaccctttttcatcttgacattaaaagttctggctaactttggaatccattagagaaaaatccttgtcaccagattcattacaattcaaatcgaagagttgtgaactgttatcccattgaaaagaccgagccttgtatgtatgttatggatacataaaatgcacgcaagccattatctctccatgggaagctaagttataaaaataggtgcttggtgtacaaaactttttatatcaaaaggctttgcacatttctatatgagtgggtttactggtaaattatgttattttttacaactaattttgtactctcagaatgtttgtcatatgcttcttgcaatgcatattttttaatctcaaacgtttcaataaaaccatttttcagatataaagagaattacttcaaattgagtaattcagaaaaactcaagatttaagttaaaaagtggtttggacttgggaacag

SEQ ID NO: 326725 - DNA, 2987 bp, Homo sapiens
tgccagttctcttcggggactaactgcaacggagagactcaagatgattccctttttacccatgttttctctactattgctgcttattgttaaccctataaacgccaacaatcattatgacaagatcttggctcatagtcgtatcaggggtcgggaccaaggcccaaatgtctgtgcccttcaacagattttgggcaccaaaaagaaatacttcagcacttgtaagaactggtataaaaagtccatctgtggacagaaaacgactgtgttatatgaatgttgccctggttatatgagaatggaaggaatgaaaggctgcccagcagttttgcccattgaccatgtttatggcactctgggcatcgtgggagccaccacaacgcagcgctattctgacgcctcaaaactgagggaggagatcgagggaaagggatccttcacttactttgcaccgagtaatgaggcttgggacaacttggattctgatatccgtagaggtttggagagcaacgtgaatgttgaattactgaatgctttacatagtcacatgattaataagagaatgttgaccaaggacttaaaaaatggcatgattattccttcaatgtataacaatttggggcttttcattaaccattatcctaatggggttgtcactgttaattgtgctcgaatcatccatgggaaccagattgcaacaaatggtgttgtccatgtcattgaccgtgtgcttacacaaattggtacctcaattcaagacttcattgaagcagaagatgacctttcatcttttagagcagctgccatcacatcggacatattggaggcccttggaagagacggtcacttcacactctttgctcccaccaatgaggcttttgagaaacttccacgaggtgtcctagaaaggatcatgggagacaaagtggcttccgaagctcttatgaagtaccacatcttaaatactctccagtgttctgagtctattatgggaggagcagtctttgagacgctggaaggaaatacaattgagataggatgtgacggtgacagtataacagtaaatggaatcaaaatggtgaacaaaaaggatattgtgacaaataatggtgtgatccatttgattgatcaggtcctaattcctgattctgccaaacaagttattgagctggctggaaaacagcaaaccaccttcacggatcttgtggcccaattaggcttggcatctgctctgaggccagatggagaatacactttgctggcacctgtgaataatgcattttctgatgatactctcagcatggatcagcgcctccttaaattaattctgcagaatcacatattgaaagtaaaagttggccttaatgagctttacaacgggcaaatactggaaaccatcggaggcaaacagctcagagtcttcgtatatcgtacagctgtctgcattgaaaattcatgcatggagaaagggagtaagcaagggagaaacggtgcgattcacatattccgcgagatcatcaagccagcagagaaatccctccatgaaaagttaaaacaagataagcgctttagcaccttcctcagcctacttgaagctgcagacttgaaagagctcctgacacaacctggagactggacattatttgtgccaaccaatgatgcttttaagggaatgactagtgaagaaaaagaaattctgatacgggacaaaaatgctcttcaaaacatcattctttatcacctgacaccaggagttttcattggaaaaggatttgaacctggtgttactaacattttaaagaccacacaaggaagcaaaatctttctgaaagaagtaaatgatacacttctggtgaatgaattgaaatcaaaagaatctgacatcatgacaacaaatggtgtaattcatgttgtagataaactcctctatccagcagacacacctgttggaaatgatcaactgctggaaatacttaataaattaatcaaatacatccaaattaagtttgttcgtggtagcaccttcaaagaaatccccgtgactgtctatagtcctgaaataaaatacactaggatttctactggaggtggagaaacagaagaaactctgaagaaattgttacaagaagaggtcaccaaggtcaccaaattcattgaaggtggtgatggtcatttatttgaagatgaagaaattaaaagactgcttcagggagacacacccgtgaggaagttgcaagccaacaaaaaagttcaaggttctagaagacgattaagggaaggtcgttctcagtgaaaatccaaaaaccagaaaaaaatgtttatacaaccctaagtcaataacctgaccttagaaaattgtgagagccaagttgacttcaggaactgaaacatcagcacaaagaagcaatcatcaaataattctgaacacaaatttaatatttttttttctgaatgagaaacatgagggaaattgtggagttagcctcctgtggtaaaggaattgaagaaaatataacaccttacaccctttttcatcttgacattaaaagttctggctaactttggaatccattagagaaaaatccttgtcaccagattcattacaattcaaatcgaagagttgtgaactgttatcccattgaaaagaccgagccttgtatgtatgttatggatacataaaatgcacgcaagccattatctctccatgggaagctaagttataaaaataggtgcttggtgtacaaaactttttatatcaaaaggctttgcacatttctatatgagtgggtttactggtaaattatgttattttttacaactaattttgtactctcagaatgtttgtcatatgcttcttgcaatgcatattttttaatctcaaacgtttcaataaaaccatttttcagatataaagagaattacttcaaattgagtaattcagaaaaactcaagatttaagttaaaaagtggtttggacttgggaacag

SEQ ID NO: 326726 - DNA, 802 bp, Homo sapiens
  misc_feature (745)..(745): n is a, c, g, or t
  misc_feature (762)..(762): n is a, c, g, or t
  misc_feature (771)..(771): n is a, c, g, or t
  misc_feature (780)..(780): n is a, c, g, or t
  misc_feature (794)..(794): n is a, c, g, or t
ggtgctctgacgatcccatgcgcgacgcttccactcacgccagcagacgaacactccctccatgaaagttaaaacaatgataagcgctttagcaccttcctcagcctacttgaagctgcagacttgaaagagctcctgacacaacctggagactggacattatttgtgccaaccaatgatgcttttaagggaatgactagtgaagaaaaagaaattctgatacgggacaaaaatgctcttcaaaacatcattctttatcacctgacaccaggagttttcattggaaaaggatttgaacctggtgttactaacattttaaagaccacacaaggaagcaaaatctttctgaaagaagtaaatgatacacttctggtgaatgaattgaaatcaaaagaatctgacatcatgacaacaaatggtgtaattcatgttgtagataaactcctctatccagcagacacacctgttggaaatgatcaactgctggaaatacttaataaattaatcaaatacatccaaattaagtttgttcgtggtagcaccttcaaagaaatccccgtgactgtctatagacccacactaacaaaagtcaaaattgaaggtgaacctgaattcagactgattaaagaaggtgaaacaataactgaagtgatccatggagagccaattattaaaaaatacaccaaaatcattgatggagtgcctgtgggaaataactgaaaaagagacacgagaagacgaatcnttaccggtctgaataanatacactangattctacngaggtgggaaccgnacgaactc

SEQ ID NO: 326727 - DNA, 672 bp, Homo sapiens
gcgggtggggggtgcctggggccgggctgatggggggaaggcgaacggaggccagtgtggggctgggacagactggaggggtctctagaacgggtgatgcggttggaacgggtgatgggttgacagacaaggtagtgcaagggcagaggcttctggctggaagtcctggacccccagcataaaggaggggaggaaaggaagggggctcatataaagcaggagaccctgagccccgacacaggtggcgtgggggaggacacgcagaatgacgaggataaaacccgctcttaggaccgtggcttctgtcctgggtctcagggcacacgcgcgcacacatatacaacacaagatgcttctggcatgaggggcagggtcccagagaccccaccctcattcaagctaaaaactgggaggggctgagcaggggctgggaccaagacccatgttttaccagtggggcgagttttgttggtttttctctccaaaagggaaatttaaaaatctacaacaaatcacaccaaattcattaaaagtgataaaaacccagcctccccctcctcacttgagctttcagacgggccagaaaagctcaacgatgaagaaacaggaacatgcccaggtcaggtctccccacccaaacacaagtccggagtgggagcttggagctggatg

SEQ ID NO: 326728 - DNA, 186 bp, Homo sapiens
  misc_feature (43)..(43): n is a, c, g, or t
gaattcaagcccgggggtaatgctggctcgcagttttctcacngtgttgactgaagggttttttgccgtggctcaacagctttcgagccagtgtgcaccctccgagttctacccatgagccatggcattgagatgctgaggtcttccttcctccagccacttcgccaatccaaggctccttgctgc

SEQ ID NO: 326729 - DNA, 190 bp, Homo sapiens
tccatctcaaaaaaaaaaaaaacctaagatgataacattgacagctagtgggtggagatgctgctaaacatccttataatgcacaggacagatcctttctcctcctcttcccccgatctcacaaacaaagaattacctggacctaaatgtcaattgtgctaaggcgagaagctctttttcagagagtgct

SEQ ID NO: 326730 - DNA, 195 bp, Homo sapiens
ataagagttttgttgattagaataggaagctatacactgtaaaacgtttattcagttatatgtatatattatctcaaattacataagatcatatggttgtagataaaaattttattattttgtcattacatactttacttgcatttctcccttgaacctgcccttatcttcctttttttcttttcttcctactgt

SEQ ID NO: 326731 - DNA, 116 bp, Homo sapiens
agatggaagtaaagaaggttgttctctaaacaagtcacataagaagctgtatcctcagtctctcacgatcctatttactattcctaggcactatctcccacattctcacatggcca

SEQ ID NO: 326732 - DNA, 363 bp, Homo sapiens
ccataaaagaggcagttaagcaggggcctgggacccccacatggccagtctaacttagcacctggcctctcaactgcactcttaattttccaagtgttttcatatctactatttcacctcttcttcgcaaaagcccatgaggtagcctaggatctcatcagcctctctactagacagaaataaaatggggaagaggacaaagaatgactgaggcagaaccggggttagaacttgagtctcttgcctccccagcgtagatgtgagtaaggtccctgggaacaggggttcctcgggaggcgcctcacagcagctcacacctgcctggcgctttttaccagaggaaaggacgcagctgcctcccag

SEQ ID NO: 326733 - DNA, 1013 bp, Homo sapiens
catgtgcactggcaagcaagagcctgcggttaggtagaacagtgactgctgcaattatctgggtgtgagaggataagtagtctggacttggatggtggcagtaggaatagagaggaaggactactaaggtgaacacctttagaacctggtgactgactgtgaaggaaacggataaggtaaagacaatcttctctcgcttcccccttgaaatcacgccgagtttaattctgtagccccaagtgaagaacaattattcccagcagtactaggacctgcctacaaataggagagcttggaatagaattatctgctctgaacacacaacagaatcctttcctctcttgtcaccctgctctggaaaataaaacatttctcatcttttgaggtttcctgtattttccccacctttttcagcccactgaactttctgaaaacatttccctagacactttgtttataatcctcttggatgaaaaaggcaggactgaatttcaagatttttgtgataatcagtccaaactatggacaacttttgtttgtttccctgcaagcaggattgccatttcctaaatccggtgtggtctccaggttggagcaaggagagccatggatcccagatctgctgggctctaaggagaaagaacttcccaagtggcagccacataggagacagacgagtgcatgctgatctgttaccatccaagaaagatagaagaagctgggtggaacaggatcactggagctttgaagatgagaaggtggcaggtgtgcactggggctatgaagagaccagaacgctcctcgcaattctcagccagactgagttttatgaggctctcagaaactgccataggaacagccaagtgtatggggctgtggctgagcggctcagggaatatggtcttctccggaccctggaacagtgtcggaccaagttcaaaggtctccagaagagctatcggaaagtcaagagcggccacccacctgagacctgccccttctttgaagagatg

SEQ ID NO: 326734 - DNA, 242 bp, Homo sapiens
tggtcagggagaagggggttgggaatggctggcaaattggagcaccaacattacctttatggataatttcttttaaaaaatagtatagctgaaatgcatctgttaaaaatgtcatgattgaaagcagaactgagtttcaaattacaaccttaaaattgttgttagatatttcttcacatatcagctatactattttttcttggccccactccccaacattctgagaatggactaaaatagtg

SEQ ID NO: 326735 - DNA, 2248 bp, Homo sapiens
gcatgcttttttttttttccggtaggtcgccagctgaggcggtttgtaagttttgggtcgcagtatgctagaattttgaggctcccttctgatgaaaattgagctgtccatgcagccatggaacccgggttacagcagtgagggggccacggctcaagaaacttacacatgtccaaaaatgattgagatggagcaggcggaggcccagcttgctgagttagacctgctagccagtatgttccctggtgagaatgagctcatagtgaatgaccagctggctgtagcagaactgaaagattgtattgaaaagaagacaatggaggggcgatcttcaaaagtctactttactatcaatatgaacctggatgtatctgacgaaaaaatggcgatgttttctctggcctgtattcttccctttaaatacccggcagttctgcctgaaattactgtcagatcagtattattgagtagatcccagcagactcagctgaacacagatctgactgcattcctgcaaaaacattgtcatggagatgtttgtatactgaatgccacagagtgggttagagaacacgcctctggctatgtcagcagagatacttcatcttcacccaccacaggaagcacagtccagtcagttgacctcatcttcacgagactctggatctacagccatcatatctataacaaatgcaaaagaaagaatattctagagtgggcaaaggagctttccctgtctgggtttagcatgcctggaaaacctggtgttgtttgtgtggaaggcccacaaagtgcctgtgaagaattctggtcaagactcagaaaattaaactggaagagaattttaattcgccatcgagaagacattccttttgatggtacaaatgatgaaacggaaagacaaaggaaattttccatttttgaagaaaaagtgttcagtgttaatggagccaggggaaaccacatggactttggtcagctctatcagttcttaaacaccaaaggatgtggggatgttttccagatgttctttggtgtagaaggacaatgacatcaagagtagttgaaagtatcttgccactgttggccttttgatttttttttcccactttttcttgaaagattaagtaattttattttagttccattctagaatgttggggagtggggcacaagaaaaaatagtatagctgaaatgcatctgttaaaaatgtcatgattgaaagcagaactgagtttcaaattacaaccttaaaattgttgttagatatttcttcacatatcagctgcccattttgaaaaagaaattatccataaaggtaatgttggtgctccaatttgccagccattcccaacccccttctcccttacctgccttcactaaagaacccagaaaagctaattgctcccctttcagcctctgttgcaactaacaactctcagtggcctcaggacacagctttggccttgggaattctgggaaaacttttacttcctgattaaagatacatatgcagctaggccacctcctcccccccttactgccataaacaccaaagtgatgactggagctggaggagttatttgaaccacgacggaagggccaagagaaccacgaagatgccagttgccacattgttgagctgctgacccaacaccagccattgcctgtctctaaacatcttatgaaataaaaccagttttgtttaatttctaggctttttttttaaatagacggagtcttgctctgtcgcccgggctagagtgcaatggtgcaacctccgctcactgcaacctccgcctcccaagttcaagcgattctcctgcctcagcctcccaagtagctgagattacaggcgcccgccaccatgcctggctaatttttgtgttttttagtagagacagggtgtcaccattttggccaggctggtcttgaactcctgacctcaggtgatcctcccacctcggcttcccaatgtgcttggattacaggcataagccaccgtgcctggccaatatctaggctttttactagcagttgaaagctagtttgtcaaatagagtttttcagagctttagttttgcatttaccccagccttttgatacacaaataggtgaagtttttctgaagtggagtttgcagttccccactttttgtatactcacgctctgcccctgctcctgggcttgcctcagacaaggctgaggcattagtagggcttaaacttttttaacaagcctcaacaa

SEQ ID NO: 326736 - DNA, 1655 bp, Homo sapiens
gcatgcttttttttttttccggtaggtcgccagctgaggcggtttgtaagttttgggtcgcagtatgctagaattttgaggctcccttctgatgaaaattgagctgtccatgcagccatggaacccgggttacagcagtgagggggccacggctcaagaaacttacacatgtccaaaaatgattgagatggagcaggcggaggcccagcttgctgagttagacctgctagccagtatgttccctggtgagaatgagctcatagtgaatgaccagctggctgtagcagaactgaaagattgtattgaaaagaagacaatggaggggcgatcttcaaaagtctactttactatcaatatgaacctggatgtatctgacgaaaaaatggcgatgttttctctggcctgtattcttccctttaaatacccggcagttctgcctgaaattactgtcagatcagtattattgagtagatcccagcagactcagctgaacacagatctgactgcattcctgcaaaaacattgtcatggagatgtttgtatactgaatgccacagagtgggttagagaacacgcctctggctatgtcagcagagatacttcatcttcacccaccacaggaagcacagtccagtcagttgacctcatcttcacgagactctggatctacagccatcatatctataacaaatgcaaaagaaagaatattctagagtgggcaaaggagctttccctgtctgggtttagcatgcctggaaaacctggtgttgtttgtgtggaaggcccacaaagtgcctgtgaagaattctggtcaagactcagaaaattaaactggaagagaattttaattcgccatcgagaagacattccttttgatggtacaaatgatgaaacggaaagacaaaggaaattttccatttttgaagactatcagttcttaaacaccaaaggatgtggggatgttttccagatgttctttggtgtagaaggacaatgacatcaagagtagttgaaagtatcttgccactgttggccttttgatttttttttcccactttttcttgaaagattaagtaattttattttagttccattctagaatgttggggagtggggcacaagaaaaaatagtatagctgaaatgcatctgttaaaaatgtcatgattgaaagcagaactgagtttcaaattacaaccttaaaattgttgttagatatttcttcacatatcagctgcccattttgaaaaagaaattatccataaaggtaatgttggtgctccaatttgccagccattcccaacccccttctcccttacctgccttcactaaagaacccagaaaagctaattgctcccctttcagcctctgttgcaactaacaactctcagtggcctcaggacacagctttggccttgggaattctgggaaaacttttacttcctgattaaagatacatatgcagctaggccacctcctcccccccttactgccataaacaccaaagtgatgactggagctggaggagttatttgaaccacgacggaagggccaagagaaccacgaagatgccagttgccacattgttgagctgctgacccaacaccagccattgcctgtctctaaacatcttatgaaataaaaccagttttgttta

SEQ ID NO: 326737 - DNA, 1796 bp, Homo sapiens
gcatgcttttttttttttccggtaggtcgccagctgaggcggtttgtaagttttgggtcgcagtatgctagaattttgaggctcccttctgatgaaaattgagctgtccatgcagccatggaacccgggttacagcagtgagggggccacggctcaagaaacttacacatgtccaaaaatgattgagatggagcaggcggaggcccagcttgctgagttagacctgctagccagtatgttccctggtgagaatgagctcatagtgaatgaccagctggctgtagcagaactgaaagattgtattgaaaagaagacaatggaggggcgatcttcaaaagtctactttactatcaatatgaacctggatgtatctgacgaaaaaatggtaattcagttttgcttttagagggattgaaacatgttgagacttaaaacattggttagtgcactttttcttcttctctttaatcaggcgatgttttctctggcctgtattcttccctttaaatacccggcagttctgcctgaaattactgtcagatcagtattattgagtagatcccagcagactcagctgaacacagatctgactgcattcctgcaaaaacattgtcatggagatgtttgtatactgaatgccacagagtgggttagagaacacgcctctggctatgtcagcagagatacttcatcttcacccaccacaggaagcacagtccagtcagttgacctcatcttcacgagactctggatctacagccatcatatctataacaaatgcaaaagaaagaatattctagagtgggcaaaggagctttccctgtctgggtttagcatgcctggaaaacctggtgttgtttgtgtggaaggcccacaaagtgcctgtgaagaattctggtcaagactcagaaaattaaactggaagagaattttaattcgccatcgagaagacattccttttgatggtacaaatgatgaaacggaaagacaaaggaaattttccatttttgaagaaaaagtgttcagtgttaatggagccaggggaaaccacatggactttggtcagctctatcagttcttaaacaccaaaggatgtggggatgttttccagatgttctttggtgtagaaggacaatgacatcaagagtagttgaaagtatcttgccactgttggccttttgatttttttttcccactttttcttgaaagattaagtaattttattttagttccattctagaatgttggggagtggggcacaagaaaaaatagtatagctgaaatgcatctgttaaaaatgtcatgattgaaagcagaactgagtttcaaattacaaccttaaaattgttgttagatatttcttcacatatcagctgcccattttgaaaaagaaattatccataaaggtaatgttggtgctccaatttgccagccattcccaacccccttctcccttacctgccttcactaaagaacccagaaaagctaattgctcccctttcagcctctgttgcaactaacaactctcagtggcctcaggacacagctttggccttgggaattctgggaaaacttttacttcctgattaaagatacatatgcagctaggccacctcctcccccccttactgccataaacaccaaagtgatgactggagctggaggagttatttgaaccacgacggaagggccaagagaaccacgaagatgccagttgccacattgttgagctgctgacccaacaccagccattgcctgtctctaaacatcttatgaaataaaaccagttttgttta

SEQ ID NO: 326738 - DNA, 1641 bp, Homo sapiens
gcatgcttttttttttttccggtaggtcgccagctgaggcggtttgtaagttttgggtcgcagtatgctagaattttgaggctcccttctgatgaaaattgagctgtccatgcagccatggaacccgggttacagcagtgagggggccacggctcaagaaacttacacatgtccaaaaatgattgagatggagcaggcggaggcccagcttgctgagttagacctgctagccagtatgttccctggtgagaatgagctcatagtgaatgaccagctggctgtagcagaactgaaagattgtattgaaaagaagacaatggaggggcgatcttcaaaagtctactttactatcaatatgaacctggatgtatctgacgaaaaaatgatcagtattattgagtagatcccagcagactcagctgaacacagatctgactgcattcctgcaaaaacattgtcatggagatgtttgtatactgaatgccacagagtgggttagagaacacgcctctggctatgtcagcagagatacttcatcttcacccaccacaggaagcacagtccagtcagttgacctcatcttcacgagactctggatctacagccatcatatctataacaaatgcaaaagaaagaatattctagagtgggcaaaggagctttccctgtctgggtttagcatgcctggaaaacctggtgttgtttgtgtggaaggcccacaaagtgcctgtgaagaattctggtcaagactcagaaaattaaactggaagagaattttaattcgccatcgagaagacattccttttgatggtacaaatgatgaaacggaaagacaaaggaaattttccatttttgaagaaaaagtgttcagtgttaatggagccaggggaaaccacatggactttggtcagctctatcagttcttaaacaccaaaggatgtggggatgttttccagatgttctttggtgtagaaggacaatgacatcaagagtagttgaaagtatcttgccactgttggccttttgatttttttttcccactttttcttgaaagattaagtaattttattttagttccattctagaatgttggggagtggggcacaagaaaaaatagtatagctgaaatgcatctgttaaaaatgtcatgattgaaagcagaactgagtttcaaattacaaccttaaaattgttgttagatatttcttcacatatcagctgcccattttgaaaaagaaattatccataaaggtaatgttggtgctccaatttgccagccattcccaacccccttctcccttacctgccttcactaaagaacccagaaaagctaattgctcccctttcagcctctgttgcaactaacaactctcagtggcctcaggacacagctttggccttgggaattctgggaaaacttttacttcctgattaaagatacatatgcagctaggccacctcctcccccccttactgccataaacaccaaagtgatgactggagctggaggagttatttgaaccacgacggaagggccaagagaaccacgaagatgccagttgccacattgttgagctgctgacccaacaccagccattgcctgtctctaaacatcttatgaaataaaaccagttttgttta

SEQ ID NO: 326739 - DNA, 2010 bp, Homo sapiens
gcatgcttttttttttttccggtaggtcgccagctgaggcggtttgtaagttttgggtcgcagtatgctagaattttgaggctcccttctgatgaaaattgagctgtccatgcagccatggaacccgggttacagcagtgagggggccacggctcaaggccgggcgcagtggctcacacctgtaatcccagcactttgggaggccgaggcgggcggatcatgaggtcaggagatcaagaccatcctggctaacacgaaacttacacatgtccaaaaatgattgagatggagcaggcggaggcccagcttgctgagttagacctgctagccagtatgttccctggtgagaatgagctcatagtgaatgaccagctggctgtagcagaactgaaagattgtattgaaaagaagacaatggaggggcgatcttcaaaagtctactttactatcaatatgaacctggatgtatctgacgaaaaaatggtaattcagttttgcttttagagggattgaaacatgttgagacttaaaacattggttagtgcactttttcttcttctctttaatcaggcgatgttttctctggcctgtattcttccctttaaatacccggcagttctgcctgaaattactgtcaggtacgttacagaagctctggccaactttggaggtcaaaattaatctgagaataaaagcaattctcgaatttgttttctgttccaagacaatatttttcttgtatcttttctattagatcagtattattgagtagatcccagcagactcagctgaacacagatctgactgcattcctgcaaaaacattgtcatggagatgtttgtatactgaatgccacagagtgggttagagaacacgcctctggctatgtcagcagagatacttcatcttcacccaccacaggaagcacagtccagtcagttgacctcatcttcacgagactctggatctacagccatcatatctataacaaatgcaaaagaaagaatattctagagtgggcaaaggagctttccctgtctgggtttagcatgcctggaaaacctggtgttgtttgtgtggaaggcccacaaagtgcctgtgaagaattctggtcaagactcagaaaattaaactggaagagaattttaattcgccatcgagaagacattccttttgatggtacaaatgatgaaacggaaagacaaaggaaattttccatttttgaagaaaaagtgttcagtgttaatggagccaggggaaaccacatggactttggtcagctctatcagttcttaaacaccaaaggatgtggggatgttttccagatgttctttggtgtagaaggacaatgacatcaagagtagttgaaagtatcttgccactgttggccttttgatttttttttcccactttttcttgaaagattaagtaattttattttagttccattctagaatgttggggagtggggcacaagaaaaaatagtatagctgaaatgcatctgttaaaaatgtcatgattgaaagcagaactgagtttcaaattacaaccttaaaattgttgttagatatttcttcacatatcagctgcccattttgaaaaagaaattatccataaaggtaatgttggtgctccaatttgccagccattcccaacccccttctcccttacctgccttcactaaagaacccagaaaagctaattgctcccctttcagcctctgttgcaactaacaactctcagtggcctcaggacacagctttggccttgggaattctgggaaaacttttacttcctgattaaagatacatatgcagctaggccacctcctcccccccttactgccataaacaccaaagtgatgactggagctggaggagttatttgaaccacgacggaagggccaagagaaccacgaagatgccagttgccacattgttgagctgctgacccaacaccagccattgcctgtctctaaacatcttatgaaataaaaccagttttgttta

SEQ ID NO: 326740 - DNA, 383 bp, Homo sapiens
gcatgcttttttttttttccggtaggtcgccagctgaggcggtttgtaagttttgggtcgcagtatgctagaattttgaggctcccttctgatgaaaattgagctgtccatgcagccatggaacccgggttacagcagtgagggggccacggctcaaggtgagtctcgcctcagctagcgccagtggtgaccgccacgggggtttcccacgctgcagcgcccagtgcaaccctttgggaacgtgcccggcatggcggccccggttcccctcactgcatgcgcccatcggtcggctcggtcctcggcgttgcttcccggcttctgcagccctgctccagccggggacctcgccccgggggcaatcagggtgcgagggcggccgc

SEQ ID NO: 326741 - DNA, 882 bp, Homo sapiens
cacatgttgatgtattcatttcttccaagattgcatatgtaaattgtctctcttatctttacctccttagaaacttacacatgtccaaaaatgattgagatggagcaggcggaggcccagcttgctgagttagacctgctagccagtatgttccctggtgagaatgagctcatagtgaatgaccagctggctgtagcagaactgaaagattgtattgaaaagaagacaatggaggggcgatcttcaaaagtctactttactatcaatatgaacctggatgtatctgacgaaaaaatggtaattcagttttgcttttagagggattgaaacatgttgagacttaaaacattggttagtgcactttttcttcttctctttaatcaggcgatgttttctctggcctgtattcttccctttaaatacccggcagttctgcctgaaattactgtcaggtacgttacagaagctctggccaactttggaggtcaaaattaatctgagaataaaagcaattctcgaatttgttttctgttccaagacaatatttttcttgtatcttttctattagatcagtattattgagtagatcccagcagactcagctgaacacagatctgactgcattcctgcaaaaacattgtcatggagatgtttgtatactgaatgccacagagtgggttagagaacacgcctctggctatgtcagcagagatacttcatcttcacccaccacaggaagcacagtccagtcagttgacctcatcttcacgagactctggatctacagccatcatatctataacaaatgcaaaagaaagaatattctagagtgggcaaaggagctttccctgtctgggtttagcatgcctggaaaacctggtg

SEQ ID NO: 326742 - DNA, 1709 bp, Homo sapiens
gcatgcttttttttttttccggtaggtcgccagctgaggcggtttgtaagttttgggtcgcagtatgctagaattttgaggctcccttctgatgaaaattgagctgtccatgcagccatggaacccgggttacagcagtgagggggccacggctcaagaaacttacacatgtccaaaaatgattgagatggagcaggcggaggcccagcttgctgagttagacctgctagccagtatgttccctggtgagaatgagctcatagtgaatgaccagctggctgtagcagaactgaaagattgtattgaaaagaagacaatggaggggcgatcttcaaaagtctactttactatcaatatgaacctggatgtatctgacgaaaaaatggcgatgttttctctggcctgtattcttccctttaaatacccggcagttctgcctgaaattactgtcagatcagtattattgagtagatcccagcagactcagctgaacacagatctgactgcattcctgcaaaaacattgtcatggagatgtttgtatactgaatgccacagagtgggttagagaacacgcctctggctatgtcagcagagatacttcatcttcacccaccacaggaagcacagtccagtcagttgacctcatcttcacgagactctggatctacagccatcatatctataacaaatgcaaaagaaagaatattctagagtgggcaaaggagctttccctgtctgggtttagcatgcctggaaaacctggtgttgtttgtgtggaaggcccacaaagtgcctgtgaagaattctggtcaagactcagaaaattaaactggaagagaattttaattcgccatcgagaagacattccttttgatggtacaaatgatgaaacggaaagacaaaggaaattttccatttttgaagaaaaagtgttcagtgttaatggagccaggggaaaccacatggactttggtcagctctatcagttcttaaacaccaaaggatgtggggatgttttccagatgttctttggtgtagaaggacaatgacatcaagagtagttgaaagtatcttgccactgttggccttttgatttttttttcccactttttcttgaaagattaagtaattttattttagttccattctagaatgttggggagtggggcacaagaaaaaatagtatagctgaaatgcatctgttaaaaatgtcatgattgaaagcagaactgagtttcaaattacaaccttaaaattgttgttagatatttcttcacatatcagctgcccattttgaaaaagaaattatccataaaggtaatgttggtgctccaatttgccagccattcccaacccccttctcccttacctgccttcactaaagaacccagaaaagctaattgctcccctttcagcctctgttgcaactaacaactctcagtggcctcaggacacagctttggccttgggaattctgggaaaacttttacttcctgattaaagatacatatgcagctaggccacctcctcccccccttactgccataaacaccaaagtgatgactggagctggaggagttatttgaaccacgacggaagggccaagagaaccacgaagatgccagttgccacattgttgagctgctgacccaacaccagccattgcctgtctctaaacatcttatgaaataaaaccagttttgttta

SEQ ID NO: 326743 - DNA, 1807 bp, Homo sapiens
gcatgcttttttttttttccggtaggtcgccagctgaggcggtttgtaagttttgggtcgcagtatgctagaattttgaggctcccttctgatgaaaattgagctgtccatgcagccatggaacccgggttacagcagtgagggggccacggctcaaggccgggcgcagtggctcacacctgtaatcccagcactttgggaggccgaggcgggcggatcatgaggtcaggagatcaagaccatcctggctaacacgaaacttacacatgtccaaaaatgattgagatggagcaggcggaggcccagcttgctgagttagacctgctagccagtatgttccctggtgagaatgagctcatagtgaatgaccagctggctgtagcagaactgaaagattgtattgaaaagaagacaatggaggggcgatcttcaaaagtctactttactatcaatatgaacctggatgtatctgacgaaaaaatggcgatgttttctctggcctgtattcttccctttaaatacccggcagttctgcctgaaattactgtcagatcagtattattgagtagatcccagcagactcagctgaacacagatctgactgcattcctgcaaaaacattgtcatggagatgtttgtatactgaatgccacagagtgggttagagaacacgcctctggctatgtcagcagagatacttcatcttcacccaccacaggaagcacagtccagtcagttgacctcatcttcacgagactctggatctacagccatcatatctataacaaatgcaaaagaaagaatattctagagtgggcaaaggagctttccctgtctgggtttagcatgcctggaaaacctggtgttgtttgtgtggaaggcccacaaagtgcctgtgaagaattctggtcaagactcagaaaattaaactggaagagaattttaattcgccatcgagaagacattccttttgatggtacaaatgatgaaacggaaagacaaaggaaattttccatttttgaagaaaaagtgttcagtgttaatggagccaggggaaaccacatggactttggtcagctctatcagttcttaaacaccaaaggatgtggggatgttttccagatgttctttggtgtagaaggacaatgacatcaagagtagttgaaagtatcttgccactgttggccttttgatttttttttcccactttttcttgaaagattaagtaattttattttagttccattctagaatgttggggagtggggcacaagaaaaaatagtatagctgaaatgcatctgttaaaaatgtcatgattgaaagcagaactgagtttcaaattacaaccttaaaattgttgttagatatttcttcacatatcagctgcccattttgaaaaagaaattatccataaaggtaatgttggtgctccaatttgccagccattcccaacccccttctcccttacctgccttcactaaagaacccagaaaagctaattgctcccctttcagcctctgttgcaactaacaactctcagtggcctcaggacacagctttggccttgggaattctgggaaaacttttacttcctgattaaagatacatatgcagctaggccacctcctcccccccttactgccataaacaccaaagtgatgactggagctggaggagttatttgaaccacgacggaagggccaagagaaccacgaagatgccagttgccacattgttgagctgctgacccaacaccagccattgcctgtctctaaacatcttatgaaataaaaccagttttgttta

SEQ ID NO: 326744 - DNA, 1654 bp, Homo sapiens
gcatgcttttttttttttccggtaggtcgccagctgaggcggtttgtaagttttgggtcgcagtatgctagaattttgaggctcccttctgatgaaaattgagctgtccatgcagccatggaacccgggttacagcagtgagggggccacggctcaagaaacttacacatgtccaaaaatgattgagatggagcaggcggaggcccagcttgctgagttagacctgctagccagtatgttccctggtgagaatgagctcatagtgaatgaccagctggctgtagcagaactgaaagattgtattgaaaagaagacaatggaggggcgatcttcaaaagtctactttactatcaatatgaacctggatgtatctgacgaaaaaatggcgatgttttctctggcctgtattcttccctttaaatacccggcagttctgcctgaaattactgtcagatcagtattattgagtagatcccagcagactcagctgaacacagatctgactgcattcctgcaaaaacattgtcatggagatgtttgtatactgaatgccacagagtgggttagagaacacgcctctggctatgtcagcagagatacttcatcttcacccaccacaggaagcacagtccagtcagttgacctcatcttcacgagactctggatctacagccatcatatctataacaaatgctgcctggaaaacctggtgttgtttgtgtggaaggcccacaaagtgcctgtgaagaattctggtcaagactcagaaaattaaactggaagagaattttaattcgccatcgagaagacattccttttgatggtacaaatgatgaaacggaaagacaaaggaaattttccatttttgaagaaaaagtgttcagtgttaatggagccaggggaaaccacatggactttggtcagctctatcagttcttaaacaccaaaggatgtggggatgttttccagatgttctttggtgtagaaggacaatgacatcaagagtagttgaaagtatcttgccactgttggccttttgatttttttttcccactttttcttgaaagattaagtaattttattttagttccattctagaatgttggggagtggggcacaagaaaaaatagtatagctgaaatgcatctgttaaaaatgtcatgattgaaagcagaactgagtttcaaattacaaccttaaaattgttgttagatatttcttcacatatcagctgcccattttgaaaaagaaattatccataaaggtaatgttggtgctccaatttgccagccattcccaacccccttctcccttacctgccttcactaaagaacccagaaaagctaattgctcccctttcagcctctgttgcaactaacaactctcagtggcctcaggacacagctttggccttgggaattctgggaaaacttttacttcctgattaaagatacatatgcagctaggccacctcctcccccccttactgccataaacaccaaagtgatgactggagctggaggagttatttgaaccacgacggaagggccaagagaaccacgaagatgccagttgccacattgttgagctgctgacccaacaccagccattgcctgtctctaaacatcttatgaaataaaaccagttttgttta

SEQ ID NO: 326745 - DNA, 1278 bp, Homo sapiens
gcatgcttttttttttttccggtaggtcgccagctgaggcggtttgtaagttttgggtcgcagtatgctagaattttgaggctcccttctgatgaaaattgagctgtccatgcagccatggaacccgggttacagcagtgagggggccacggctcaagaaacttacacatgtccaaaaatgattgagatggagcaggcggaggcccagcttgctgagttagacctgctagccagtatgttccctggtgagaatgagctcatagtgaatgaccagctggctgtagcagaactgaaagattgtattgaaaagaagacaatggaggggcgatcttcaaaagtctactttactatcaatatgaacctggatgtatctgacgaaaaaatgactcagaaaattaaactggaagagaattttaattcgccatcgagaagacattccttttgatggtacaaatgatgaaacggaaagacaaaggaaattttccatttttgaagaaaaagtgttcagtgttaatggagccaggggaaaccacatggactttggtcagctctatcagttcttaaacaccaaaggatgtggggatgttttccagatgttctttggtgtagaaggacaatgacatcaagagtagttgaaagtatcttgccactgttggccttttgatttttttttcccactttttcttgaaagattaagtaattttattttagttccattctagaatgttggggagtggggcacaagaaaaaatagtatagctgaaatgcatctgttaaaaatgtcatgattgaaagcagaactgagtttcaaattacaaccttaaaattgttgttagatatttcttcacatatcagctgcccattttgaaaaagaaattatccataaaggtaatgttggtgctccaatttgccagccattcccaacccccttctcccttacctgccttcactaaagaacccagaaaagctaattgctcccctttcagcctctgttgcaactaacaactctcagtggcctcaggacacagctttggccttgggaattctgggaaaacttttacttcctgattaaagatacatatgcagctaggccacctcctcccccccttactgccataaacaccaaagtgatgactggagctggaggagttatttgaaccacgacggaagggccaagagaaccacgaagatgccagttgccacattgttgagctgctgacccaacaccagccattgcctgtctctaaacatcttatgaaataaaaccagttttgttta

SEQ ID NO: 326746 - DNA, 486 bp, Homo sapiens
aagctacaacatgcatgaaccttggaaacctgtgttaaatgaaagaagccagtcacataagaccagatattgtatagtcccattgatctgaaatttccagaacaggcaaatcaatagagagaaaaagaagactggtgagtgtctagagctgggggagttggaaggcaatgagggttgactgctaatggatatatggtttcttctgaggatgattgaaaatgctctaaaaattattttgatggttgcacagccctgtgaatatactaaaaataattgaattgtagactttaaattgtaaatacgaaaagtgaattctatcacaagaaaactgttattaaaaaacaaagactactacgtagtgatgtgtcgttcccactagacactttaagaggcattttatgccagtttgccccactgttgttgacgctaagttttgatcactgggataatttggtttccactggatcttgtcattgcattaggttg

SEQ ID NO: 326747 - DNA, 965 bp, Homo sapiens
ttgagaggggaagagctgagtgcgggctggagcagcgagaatgcttcacggaggatgttggggagagaggatttgatttgccgagtggtttggagatctttaggggcgggtaggggaagagggtggctggacttaaggtaggagccgaaagtgggcatgggagcccatccccgtgggtgtgaggccggggtaggaccaggcttcccggctaggcacgcctggctggctgcctctgcctctactaacttcctttgtctctttatcctcctgcttaggccgtgtcttcctctctctctgccattttctctatcagaaaacattaaagctgagtagaaacttcaagatgatcattctggcccagcccttttatctctttatctccaatggtgtgcgttttaagtttctctgacttggtttttctgtccctgtctcccacagttgttcccgctctgcacctgtgtttcagttactctctctctctgtcttagatctttttgtttctgcctagtctctgtgccctgtctttgtgtgtttctttctctgcctgaaaccctccctcttttcccttcaggcatatgtctctaaaccaatgttatgtatcaaagactgttgaaagagacagggctactctaggaatggatgggtggggatattttccccatggatcaagatccagtttagggttgggaaataaaggatagggataaaagaggcaccccattcagtcagcagatacttattcagcacctactatgtgtttgatactgtatacaaaagacatgaatgggctgggtcctgaacagagaataaagggtttgactccattctggaaattcttttgtttgcaaacaggtgttgttaatttgttcaaaggcaggcaaacaatctctctggcaacacaattttcttctgtatttaattaaaaaatattaaagctttttttctatgatgaatgataaaatatg

SEQ ID NO: 326748 - DNA, 773 bp, Homo sapiens
gggaagctctgagtcactgaatagcaaagaaaaatatgaaagcaagaggaattgctttcacatctagaaaatgttgcaagataatctgaaatcttctggtgctggtgaatgcatgaagaggttcacagtatcttttaaagtacttctgaaaagataaggagtttaaaaggtgggtgtgtacactggcactgagctgcagtaggatttttccttggatagtctggtctggagctgggacagcagctgctgctgtggaaaggccagctggcaagatgatggaagaaatctccattatggtagcctatgacgcccatgttttcagccagctgcacgatgaagacttcctcactagtctggtggccatcagcaagcccaggtctatggtaccaaccaagaagctgaagaaatatgagaaagaatatcagacaatgcgagagagtcagctgcaacaggaagacccaatggatagatacaagtttgtatatttgtaggtaactccagctgttgcatttatactgggaatcttcataagaagctgagagaaagagaggggaaaaagaaagtggctttctactttcaaaaatgaaacaaaaaggaaaaatggcaaagtactgttttagctgtgcatgtcatatccacaaagacttttagcaggtgaactgttccaagactgacacaaggatgtttcaaacttgcctctgtctgtagaaaatgttaaaaataccaactcacttggaaggaaaaataaaaatcacaaaggtatattgagcaca

SEQ ID NO: 326749 - DNA, 660 bp, Homo sapiens
gtattggttaccgggagtgtggctggtttctgttgcctgttttgatactcttctcctggggtgtgtacactggcactgagctgcagtaggatttttccttggatagtctggtctggagctgggacagcagctgctgctgtggaaaggccagctggcaagatgatggaagaaatctccattatggtagcctatgacgcccatgttttcagccagctgcacgatgaagacttcctcactagtctggtggccatcagcaagcccaggtctatggtaccaaccaagaagctgaagaaatatgagaaagaatatcagacaatgcgagagagtcagctgcaacaggaagacccaatggatagatacaagtttgtatatttgtaggtaactccagctgttgcatttatactgggaatcttcataagaagctgagagaaagagaggggaaaaagaaagtggctttctactttcaaaaatgaaacaaaaaggaaaaatggcaaagtactgttttagctgtgcatgtcatatccacaaagacttttagcaggtgaactgttccaagactgacacaaggatgtttcaaacttgcctctgtctgtagaaaatgttaaaaataccaactcacttggaaggaaaaataaaaatcacaaaggtatattgagcaca

SEQ ID NO: 326750 - DNA, 448 bp, Homo sapiens
gtattggttaccgggagtgtggctggtttctgttgcctgttttgatactcttctcctggtaccaaccaagaagctgaagaaatatgagaaagaatatcagacaatgcgagagagtcagctgcaacaggaagacccaatggatagatacaagtttgtatatttgtaggtaactccagctgttgcatttatactgggaatcttcataagaagctgagagaaagagaggggaaaaagaaagtggctttctactttcaaaaatgaaacaaaaaggaaaaatggcaaagtactgttttagctgtgcatgtcatatccacaaagacttttagcaggtgaactgttccaagactgacacaaggatgtttcaaacttgcctctgtctgtagaaaatgttaaaaataccaactcacttggaaggaaaaataaaaatcacaaaggtatattgagcaca

SEQ ID NO: 326751 - DNA, 427 bp, Homo sapiens
  misc_feature (57)..(57): n is a, c, g, or t
cgcaccacgcgaccccgtatagataacaacaacacttcaggtaccacccagagctgntaaatatgagaaagaatatcagacaatgcgagagagtcagctgcaacaggaagacccaatggatagatacaagtttgtatatttgtaggtaactccagctgttgcatttatactgggaatcttcataagaagctgagagaaagagaggggaaaaagaaagtggctttctactttcaaaaatgaaacaaaaaggaaaaatggcaaagtactgttttagctgtgcatgtcatatccacaaagacttttagcaggtgaactgttccaagactgacacaaggatgtttcaaacttgcctctgtctgtagaaaatgttaaaaataccaactcacttggaaggaaaaataaaaatcacaaaggtatattgagcaca

SEQ ID NO: 326752 - DNA, 679 bp, Homo sapiens
cgaaatgactggcatttgcagtgctattcatttgtaaaattccttctaggatcagatgtgctagcataacacatgaattgataagtagttatgtgtacatgctgcaagagttgttctgttttctagtaaaagactcttttctcatccttagatctgttcgcagttgagtaccaggctggagaaacagcaagcagccagcaaggaggagctggaagtggtaaaggtaaggagtgaaatcgtgctgtgataaaatttatttcaaagtcacacaggcttgtaagtacctgaaagaaccccaaacaccaccattttgtattaaaggatttattaataggaattatggagactaggatacctctcttctgaccaggtgtgattgtcttccctaccaggtgaaaggttatgatgctcccataaatcatatggactgtcagaggcagctaacatgaaaggaagtaggatttgacattgtcacaagaagccccagagcttgagatgagagtggtatgaacctgagaaccctcagcagcccacatctgactgagcctgcattgatgtggcttcagtatgggactcagtaggatcatcccatcactctctttataagtaaacaccatgggcaatatagaacttagctggaaaaacatgtgttgggtaactgattcttgcactaagtttt

SEQ ID NO: 326753 - DNA, 676 bp, Homo sapiens
gtattggttaccgggagtgtggctggtttctgttgcctgttttgatactcttctcctggtaccaaccaagaagctgaagaaatatgagaaagaatatcagacaatgcgagagagtcagctgcaacaggaagacccaatggatagatacaagtttgtatatttgtaggtaactccagctgttgcatttatactgggaatcttcataagaagctgagagaaagagaggggaaaaagaaagtggctttctactttcaaaaatgaaacaaaaaggaaaaatggcaaagtactgttttagctgtgcatgtcatatccacaaagacttttagcaggtgaactgttccaagactgacacaaggatgtttcaaacttgcctctgtctgtagaaaatgttaaaaataccaactcacttggaaggaaaaataaaaatcacaaaggtatattgagcacaaaaaaaaaaaaaaaaaaaaaaaaattgggggcatttaattgttgggggtggggaaaaaaggttttgtgaaggtggccgtggtttctaatggcggtgtttcctggacccagttttttggtccaagggtggaaaacctggcgggtccccaaataggggagccggaattaaattcagataggcaagggttaacctgttaggtattttcgtagaaaaagaaaggaagaaaaa

SEQ ID NO: 326754 - DNA, 7109 bp, Homo sapiens
  misc_feature (151)..(151): n is a, c, g, or t
  misc_feature (363)..(363): n is a, c, g, or t
aaaatatttttatgtgcttcttttaaaaaatacacaaatgggcacaggtggtatttatttgttcttagattagtggaataagggttagcattctgaaattcaaacaaacaaaaagaaaacctttatatacaggatcaaacatgttgatttntactttccttcccccacttccgtggcttttagcatctgaaaatggttagtaagaaaagaataattagttggtgagcctttccaaacaccaaaagacaggacccatatattatatttggttaacgctcatggacacttttagtattttttaaaaaatcaaatgaagtgatgttttgttctaaagcgtcattctcaaaatttttgtaaaaggtnacgtttctgatcattcccattcccagaaatagaagtgcagcgtagctcatgtaagttatggctcttcacctgcaaaaacaaattctgaataaattctgcatacttaacctcagcaaacaaagacctgaaagattcaaaagatgagaatcttgctcgtgccgaattcggcacgagggcacatttggctatttttcaaagagagcatgtagttcaagaaatggcttattttgttttttattcttctttttgtggtctatttaggaaaacaaaatgaaggtggcctttgtctttcagttatggaacagctaccggacctgcatagccatttttctgatctgaacctggaagctcatatgtatgcatcccagtggtttctcactctttttactgccaagttcccactctgcatggtgttccacatcattgacttactgctttgtgagggtttgaacataatctttcatgtagctttggctctcctaaagacctcaaaggaagaccttctgcaggctgattttgaaggtgctttaaagttctttagagttcagcttccaaagagatacagggcagaggaaaatgcaagaagactgatggagcaggcttgcaatattaaagtaccaaccaagaagctgaagaaatatgagaaagaatatcagacaatgcgagagagtcagctgcaacaggaagacccaatggatagatacaagagggagaaccgaagattacaggaggccagcatgaggttggaacaagagaatgatgaccttgcccatgaactagtaacaagcaaaattgctctacggaatgacttggatcaggcagaagacaaggcagatgtgttgaataaagagctccttttgaccaaacagaggctggtggagactgaagaggagaagaggaagcaagaggaagagactgcccagctaaaagaagtcttcaggaaacagctagagaaggcagaatatgaaataaagaagactacagctatcattgctgagtataaacagatctgttcgcagttgagtaccaggctggagaaacagcaagcagccagcaaggaggagctggaagtggtaaagggtaagatgatggcatgcaaacactgcagtgacattttcagcaaggagggtgctttgaaactagcagccacaggcagagaggaccagggaattgaaacagatgatgagaaggactcacttaagaagcagctgagagagatggaactggaactggcacaaaccaaactgcagttggtggaggccaagtgtaaaattcaggaacttgaacatcagagaggagcccttatgaatgaaatccaagctgcgaaaaactcttggtttagcaaaaccctgaactctatcaaaacggccacgggcacccagccattgcagccagcaccggtcacccagccacccaaggagagcacatagttccagccttacccaagcacaagagcacaatgttcaaaccaatggaaatctgggaggattcttcctggtgtccctttgaaggaaagtcaaggaggccagaaaacaagccagaatttttcagtagctctcactctttcttgtatgacacttttcaaagggatgctatttaaactgacctgttctatgttgaatacctattttccagcttctggaaggccatgttcagatccatcatagtattacacattattttgtttgcctgatgtttagttggaaataagtaattcagaactaaatgcttttttatttagaattattcataattatttttatcttacataaaaatggagacatctgttattccaaggttgaagtgataagaagatctttgtcacaggaaaaaaaaaattgaaacctaaacatcttaagttttcaggatttattcagataaagcacactgtggggccaggcatgaccactctcaggtttcctcctgagcctgattcccagggaagtgttaatcctgtccaaaggaaagaaccaatcagcgatcattggtttactttcattttctgttcggtacatctggaaatgaagtgccaggaatagacgggctgttcagattatacgctaggtaaaaggaactgaaattttaataagtgtaggtcaggatcatttgggctgtggtattctaacagatccttttaagaatgccacataggacttgtgagttcctaagtacaccaaagtatggacacagatgtgacttctggcaattataaagttaaaggtggatattgcaccttacagacttagggagcctttaccagagacgcctaaaaagccccaggttcagccattgtgctgaatagagtggaatatagaaccagggacagagtatttcatttaacgttgatatatacttgctaaggaaacactaacaatactgtaactttgttaaaggacatagtattgaaatgggaaatagaggtcaggctcacatcatcttagtttaatgctgggcaactttttctgatttctgtagttccctgaaaatgtgtccttcgtacccataaagagatacaaatgcatttgtaacatttttgattgaatataaaacctttacagaaatacttatctcatggaaaggtaaagctattgtttaaaaattagtggaaatattttttcaattatatttaacatgcctataaaaatagtccttgcaggaaattatttgataagagcaaaactatttttattttataaactattttggaggcctctgatcctttcaaaccaaccaaactactattagatatgtacaataacatttgttgatattaatcattggcctcattgttgaacatattatttgcaaagaatcttaaactctgtagtgccagaatgattctcatctgtgccatattttgcaattaaaagtaacacacccttagaagaatcaaataagagccatctacatcccaggaggatgcaccaagttgctcacagtggatcttttcctctaaaatgatcttttatgttctaaaaagtgaaatcccctttatctgtgtttatattctctacagcccataaaactgatgtgattgttatgttatactcatcagataatacttttcttacataaatctttcattgttgttctgacatctttcattacaaaatttattttcttaacaaaaaggaacataacccagcattccaagtgtctgtgttggctttaacattctctacatggtggtctagataagctaatttttttttttttttttttgtaaaatgtaatagctagaaaatgttatcttggcgcttgtttttgtaaatcatttagtataggctgttagctttactggtactttacgctttgattccaagaagccttgtgcagttgccttatcaaatggccagctaaattaaagatgctcttttgtgttgtgaatttcatagttctgtacagagcttgtttcaatttacaaaaataagtacattccacagaatgcctaaagtgtgtaattttctttaaataatagtaggtgagggagaaacataatggctctaggtcaatcccttatctaaagaccttgttcaacttcatagtccctttccttttaaagaggagaagagaaaaatcccccctggccaggcatggtggctcacatctgtaatcccagcactttgggaggctgaggtgggtggatcacctaaggtcaggagtttgagaccagcctggccaacatggtgaaaccctatctctactgcaaaatacaaaaattagccgggcttggtggcgggtgcctgtaatcccagctactcgggaggttgaggcaggagaatcacttgaacccaggaggcagaggttgcagtgggccaagattacggcattacattccatccagcctgggcgacaagagcaaaattccgtctcgaaaaatcaccaggtacatacctctcaagtttgataagtccatcttttgagttttcttttagctctttcaaaagattacgagggcaatacatattttttttttttttattctccagccccatatcatacttgggtatgcctgttggtaccataagcctaaactctccttcactgcaatgcctttgagtcagtagcaatagtaaagactagaaacaaagaaaattcagaatttggtatgtgatatgattgttcatacaatatgttataatagcaatattccaaacaatatgtccttcactgtctattgttggaaaactcatgcatcccagcatgaagtaactcctagttttaattttagttattttgagatatatttgagaattgcatctcttctcttgaatttcatttagaagagattaaccagccaaatatccaggaaagtttcaaaacattctagtgtttttcatcctttgctaggatgcactctgtacaaaacattcctctgaaaatctaatatttgcagtatctaagaattgatcatttctattttcattaaattctgtggaaaaaattaaatgaatgaaattcaacttcataattcagttcatcagcttttgtatcttgagaatctaaacacgtctttaaatctgaaagaaaccaagctggattttgcagtgcatatgtttgctagcttcccacatcctgaaccatgtcaaaatttggttttatttagttacatataatttaatgcaaagaaattctgttacttaatgttctgtttatttatgagtgcctatcaggaacactaataggaatgccattcaaccagtgtcttctgcccctctcccagctgttaaattagtacttcttcattggctttctgaaatgtcctgagtaaagtagaaaagcaacctttgtatggatgtggggatatttaatagtatgtatcttgtttcatttttttcctatgatgtattaatatttatttttctccaacccctgctccattttcttaaaatattttccagttaataactagttgctttatttcctagctgaagtgagaaaaccaacggaaaacaatacagatttgggcagaggagatagagttacatctttaaaggagtgagccagtcacccaggagaatcacatgtgtaactgatgtaggggtttaagtcttcatactttcactaaaatctgtctactaactctcccaccaacctttgcatcaaacacttaggtacctgcctgattaggggggcccctttaagggaaaaaacttttaaaaaattaaatgccttggttttgttttatcttctgggaaagaacacttttacttgattagcaagatgattatattatataacttgcccttaaaaacactccaaaatactgactccttttctccaattacaaatgagtgtgaagaaattctgttgtatgatttgaacactattaggtttgtatgtgtgtttaattggaagaattttatatagagtatctctgctgcttttgtttacctgggtaccacacaaccaaatacacattgagatttcaagaaatgatgatgaaagccagaaggccagaccacagctctgcagcctgtttcctacaaccagatataaaactctttctcgtcgccatgctgatagtcacactgaactagaactgtcccaacacattcttcctctctcataatggcttccatttaatacaggcaaagccctttaccttagcaaattctttatctttcaaaagtgaccaaaatgaggacttcaaccttggctgcacctcaataggagatgctgatcttgagttgtaatgagaaaagtgggcatataggagattttagtgactgcagtcagctgtctggcattcctttctcagtttgcatctaaaagactacatatgtcaagcttatctccacctgaatttgctgcctgctataaaaacatttcattaatatatcccattcttcctacctccatctctggtttgtcattagtggtattctgaaaagcttaagaaaaaagaatcattgagtagaaagtgaacattttaagttattttcctttttcattggcaattagttaacatgtaaaatcttttccattaaactgtataacttttaataactatatattatatatgggataaaatatatggactgaattgtgagaatataaatgcatcgaaagactctggtgtcatgaaagcacaagaataaggctggagatggtcccagatccaagatgtcccaaaagccttttgtatcagtttctctatttttggtattttgcataatgcatggatccttagttcaaatgagggacaaagtttctcagtcagccccacttcctttctttctaactcctacctttcccttgcagaggaggtagtagagattctggaattgtctatttttatgaattccattattttgtccatggcatctctaatgaaaacaggttctagaataaaggagttgattagtctgaacagtactaattaactacaaaataaacgttagtgatcagcctcttcctctataaacaatgaccaattagacgtttccgtaattccatgtattatgtatagtacactctataaatgtaaatgtaatgcttgtctaaaaagtgcaatttattgtacattgtcccaacaaatgtttacttttataatcgttatgaacttgaattggattagtatcttgtttttatgtgtgaatgaagccttgtgaaataaacaaatgcaactgagaaggtaacaaggtgactgtttttgtgagccagtgatgttttcaatgctttgtgttgcccctttggccccattaagcagtaataaacatttgttctgaagtccaaaaaaaaat

SEQ ID NO: 326755 - DNA, 6797 bp, Homo sapiens
tgtctaaagagggaagtgaagccagtaggagactgagagattagaagaacagggcagtagaggatgaatttgcagtgaggttaaaggaacaatttattgggagaagggaatgtaggagggtagaagactttaaaattgaaaagaaataaaaggaggcagggatgtaaaacgagccataagtacaatgacaaatgggcattaaggaggaaaaagactatgtagaagaatctggtaaatatggatattaacagcaataagctcctttttaacgatttaattctaccaagtaaatatttgggattactcgctttttgccttttatttaccaaaaaattcatatattttcaaaggaacagctaccggacctgcatagccatttttctgatctgaacctggaagctcatatgtatgcatcccagtggtttctcactctttttactgccaagttcccactctgcatggtgttccacatcattgacttactgctttgtgagggtttgaacataatctttcatgtagctttggctctcctaaagacctcaaaggaagaccttctgcaggctgattttgaaggtgctttaaagttctttagagttcagcttccaaagagatacagggcagaggaaaatgcaagaagactgatggagcaggcttgcaatattaaagtaccaaccaagaagctgaagaaatatgagaaagaatatcagacaatgcgagagagtcagctgcaacaggaagacccaatggatagatacaagagggagaaccgaagattacaggaggccagcatgaggttggaacaagagaatgatgaccttgcccatgaactagtaacaagcaaaattgctctacggaatgacttggatcaggcagaagacaaggcagatgtgttgaataaagagctccttttgaccaaacagaggctggtggagactgaagaggagaagaggaagcaagaggaagagactgcccagctaaaagaagtcttcaggaaacagctagagaaggcagaatatgaaataaagaagactacagctatcattgctgagtataaacagatctgttcgcagttgagtaccaggctggagaaacagcaagcagccagcaaggaggagctggaagtggtaaagggtaagatgatggcatgcaaacactgcagtgacattttcagcaaggagggtgctttgaaactagcagccacaggcagagaggaccagggaattgaaacagatgatgagaaggactcacttaagaagcagctgagagagatggaactggaactggcacaaaccaaactgcagttggtggaggccaagtgtaaaattcaggaacttgaacatcagagaggagcccttatgaatgaaatccaagctgcgaaaaactcttggtttagcaaaaccctgaactctatcaaaacggccacgggcacccagccattgcagccagcaccggtcacccagccacccaaggagagcacatagttccagccttacccaagcacaagagcacaatgttcaaaccaatggaaatctgggaggattcttcctggtgtccctttgaaggaaagtcaaggaggccagaaaacaagccagaatttttcagtagctctcactctttcttgtatgacacttttcaaagggatgctatttaaactgacctgttctatgttgaatacctattttccagcttctggaaggccatgttcagatccatcatagtattacacattattttgtttgcctgatgtttagttggaaataagtaattcagaactaaatgcttttttatttagaattattcataattatttttatcttacataaaaatggagacatctgttattccaaggttgaagtgataagaagatctttgtcacaggaaaaaaaaaattgaaacctaaacatcttaagttttcaggatttattcagataaagcacactgtggggccaggcatgaccactctcaggtttcctcctgagcctgattcccagggaagtgttaatcctgtccaaaggaaagaaccaatcagcgatcattggtttactttcattttctgttcggtacatctggaaatgaagtgccaggaatagacgggctgttcagattatacgctaggtaaaaggaactgaaattttaataagtgtaggtcaggatcatttgggctgtggtattctaacagatccttttaagaatgccacataggacttgtgagttcctaagtacaccaaagtatggacacagatgtgacttctggcaattataaagttaaaggtggatattgcaccttacagacttagggagcctttaccagagacgcctaaaaagccccaggttcagccattgtgctgaatagagtggaatatagaaccagggacagagtatttcatttaacgttgatatatacttgctaaggaaacactaacaatactgtaactttgttaaaggacatagtattgaaatgggaaatagaggtcaggctcacatcatcttagtttaatgctgggcaactttttctgatttctgtagttccctgaaaatgtgtccttcgtacccataaagagatacaaatgcatttgtaacatttttgattgaatataaaacctttacagaaatacttatctcatggaaaggtaaagctattgtttaaaaattagtggaaatattttttcaattatatttaacatgcctataaaaatagtccttgcaggaaattatttgataagagcaaaactatttttattttataaactattttggaggcctctgatcctttcaaaccaaccaaactactattagatatgtacaataacatttgttgatattaatcattggcctcattgttgaacatattatttgcaaagaatcttaaactctgtagtgccagaatgattctcatctgtgccatattttgcaattaaaagtaacacacccttagaagaatcaaataagagccatctacatcccaggaggatgcaccaagttgctcacagtggatcttttcctctaaaatgatcttttatgttctaaaaagtgaaatcccctttatctgtgtttatattctctacagcccataaaactgatgtgattgttatgttatactcatcagataatacttttcttacataaatctttcattgttgttctgacatctttcattacaaaatttattttcttaacaaaaaggaacataacccagcattccaagtgtctgtgttggctttaacattctctacatggtggtctagataagctaatttttttttttttttttttgtaaaatgtaatagctagaaaatgttatcttggcgcttgtttttgtaaatcatttagtataggctgttagctttactggtactttacgctttgattccaagaagccttgtgcagttgccttatcaaatggccagctaaattaaagatgctcttttgtgttgtgaatttcatagttctgtacagagcttgtttcaatttacaaaaataagtacattccacagaatgcctaaagtgtgtaattttctttaaataatagtaggtgagggagaaacataatggctctaggtcaatcccttatctaaagaccttgttcaacttcatagtccctttccttttaaagaggagaagagaaaaatcccccctggccaggcatggtggctcacatctgtaatcccagcactttgggaggctgaggtgggtggatcacctaaggtcaggagtttgagaccagcctggccaacatggtgaaaccctatctctactgcaaaatacaaaaattagccgggcttggtggcgggtgcctgtaatcccagctactcgggaggttgaggcaggagaatcacttgaacccaggaggcagaggttgcagtgggccaagattacggcattacattccatccagcctgggcgacaagagcaaaattccgtctcgaaaaatcaccaggtacatacctctcaagtttgataagtccatcttttgagttttcttttagctctttcaaaagattacgagggcaatacatattttttttttttttattctccagccccatatcatacttgggtatgcctgttggtaccataagcctaaactctccttcactgcaatgcctttgagtcagtagcaatagtaaagactagaaacaaagaaaattcagaatttggtatgtgatatgattgttcatacaatatgttataatagcaatattccaaacaatatgtccttcactgtctattgttggaaaactcatgcatcccagcatgaagtaactcctagttttaattttagttattttgagatatatttgagaattgcatctcttctcttgaatttcatttagaagagattaaccagccaaatatccaggaaagtttcaaaacattctagtgtttttcatcctttgctaggatgcactctgtacaaaacattcctctgaaaatctaatatttgcagtatctaagaattgatcatttctattttcattaaattctgtggaaaaaattaaatgaatgaaattcaacttcataattcagttcatcagcttttgtatcttgagaatctaaacacgtctttaaatctgaaagaaaccaagctggattttgcagtgcatatgtttgctagcttcccacatcctgaaccatgtcaaaatttggttttatttagttacatataatttaatgcaaagaaattctgttacttaatgttctgtttatttatgagtgcctatcaggaacactaataggaatgccattcaaccagtgtcttctgcccctctcccagctgttaaattagtacttcttcattggctttctgaaatgtcctgagtaaagtagaaaagcaacctttgtatggatgtggggatatttaatagtatgtatcttgtttcatttttttcctatgatgtattaatatttatttttctccaacccctgctccattttcttaaaatattttccagttaataactagttgctttatttcctagctgaagtgagaaaaccaacggaaaacaatacagatttgggcagaggagatagagttacatctttaaaggagtgagccagtcacccaggagaatcacatgtgtaactgatgtaggggtttaagtcttcatactttcactaaaatctgtctactaactctcccaccaacctttgcatcaaacacttaggtacctgcctgattaggggggcccctttaagggaaaaaacttttaaaaaattaaatgccttggttttgttttatcttctgggaaagaacacttttacttgattagcaagatgattatattatataacttgcccttaaaaacactccaaaatactgactccttttctccaattacaaatgagtgtgaagaaattctgttgtatgatttgaacactattaggtttgtatgtgtgtttaattggaagaattttatatagagtatctctgctgcttttgtttacctgggtaccacacaaccaaatacacattgagatttcaagaaatgatgatgaaagccagaaggccagaccacagctctgcagcctgtttcctacaaccagatataaaactctttctcgtcgccatgctgatagtcacactgaactagaactgtcccaacacattcttcctctctcataatggcttccatttaatacaggcaaagccctttaccttagcaaattctttatctttcaaaagtgaccaaaatgaggacttcaaccttggctgcacctcaataggagatgctgatcttgagttgtaatgagaaaagtgggcatataggagattttagtgactgcagtcagctgtctggcattcctttctcagtttgcatctaaaagactacatatgtcaagcttatctccacctgaatttgctgcctgctataaaaacatttcattaatatatcccattcttcctacctccatctctggtttgtcattagtggtattctgaaaagcttaagaaaaaagaatcattgagtagaaagtgaacattttaagttattttcctttttcattggcaattagttaacatgtaaaatcttttccattaaactgtataacttttaataactatatattatatatgggataaaatatatggactgaattgtgagaatataaatgcatcgaaagactctggtgtcatgaaagcacaagaataaggctggagatggtcccagatccaagatgtcccaaaagccttttgtatcagtttctctatttttggtattttgcataatgcatggatccttagttcaaatgagggacaaagtttctcagtcagccccacttcctttctttctaactcctacctttcccttgcagaggaggtagtagagattctggaattgtctatttttatgaattccattattttgtccatggcatctctaatgaaaacaggttctagaataaaggagttgattagtctgaacagtactaattaactacaaaataaacgttagtgatcagcctcttcctctataaacaatgaccaattagacgtttccgtaattccatgtattatgtatagtacactctataaatgtaaatgtaatgcttgtctaaaaagtgcaatttattgtacattgtcccaacaaatgtttacttttataatcgttatgaacttgaattggattagtatcttgtttttatgtgtgaatgaagccttgtgaaataaacaaatgcaactgagaaggtaacaaggtgactgtttttgtgagccagtgatgttttcaatgctttgtgttgcccctttggccccattaagcagtaataaacatttgttctgaagtccaaaaaaaaat

SEQ ID NO: 326756 - DNA, 8758 bp, Homo sapiens
agaggggcctggacgagcgcgcttccgacccgccgccaccgcctcctcccctccttctcggcccgccccctccctcgcctcttcctgccaggcggcccttctcccctcccctctcagttccctccgccctcctcgggctccagcggtggcggagcgaacgggaccggcccggcttcagagcgcgaggtggagggtggaacgcgggcgcctgaaggagttgttgtctcggcagcgcccgcggagacgtgaagaggtggttgtgggaagagaagtttgcagaactgaaatggaggtcagagcttcattacagaaggttagtggatcatctgattctgtggctacaatgaacagtgaagaatttgttttggttcctcagtatgcagatgataattctacaaaacatgaagaaaaacctcaactgaagatagtttctaatggtgatgaacaattggaaaaagccatggaagagattttgagagattccgagaaaaggccaagcagtcttcttgttgattgtcaaagttccagtgagatttcagaccattcgtttggagatattccagccagccaaacaaataagccatctcttcagttaattttggatccgtctaacacagaaatttctacacccagaccatcttctccaggtggactacctgaagaagatagtgttttatttaataaactgacctacttaggatgtatgaaggtttcttccccacgtaatgaagtagaggctttacgggcaatggcaaccatgaaatcttccagtcaatacccctttcctgttaccctgtatgtaccaaatgttccagaaggttctgtgagaattatagaccaatccagcaatgtggagatagcatcttttccaatctataaggtgttattctgtgcacgtggacatgacggaacaacagagagcaattgctttgcatttacagagagttcccatggttcggaagaatttcagatacatgttttctcctgtgaaattaaagaggcagtaagcagaattttgtacagtttctgtacagcattcaaacgttcttccagacaagtgtctgatgttaaagactcagttattcctacccccgacagtgatgtgtttaccttcagtgtctccttggaggtaaaagaagacgatggaaaaggaaactttagccctgtgcctaaggatagagataaattttatttcaaattaaagcaaggaatagagaagaaggttgtgattacagtgcagcaactttctaacaaagaattagctattgaaagatgttttggaatgttattaagcccaggtcgaaacgtgaagaacagtgacatgcatttactggatatggaatccatgggaaagagctatgatgggagagcttatgtcatcactggcatgtggaaccccaatgcaccagtatttctggcacttaacgaggaaaccccaaaagataagcaagtatacatgactgtggcagtggatatggtagtcacagaggtggtggagcctgttcgctttctcctggagacagtagtccgtgtgtaccctgcaaatgagcgattttggtatttcagcagaaagactttcacagagactttcttcatgagattgaaacagtctgagggaaaaggccataccaatgctggagatgcaatatatgaggtggtgagtctacagcgagagtctgacaaggaggaaccagtcactcctactagtggagggggtccaatgtcaccccaggatgatgaagcagaagaggagagtgataatgaactctcaagtggaacaggtgatgtgtctaaggattgtcctgagaagatcctgtattcttggggagagttgctaggaaaatggcacagtaaccttggtgcacgaccgaaagggctgtctactctggtgaagagtggtgtccctgaagcattgagggcagaggtatggcagttattggcaggctgccatgacaaccaggcaatgctggatagataccgaattcttatcacaaaggactcagcccaggagagtgttattactcgagatattcatcgtacatttcccgcacatgattactttaaagatactggaggagatggtcaagaatcgctctataagatctgcaaggcctactctgtgtatgatgaagacattgggtactgtcaagggcagtcttttcttgctgctgtattactgctgcatatgccagaggaacaagcattctgtgttttggtgaaaatcatgtacgactatggtttgagagacctctacagaaacaacttcgaagatcttcattgcaaattctaccagttggagagactaatgcaggaacagctaccggacctgcatagccatttttctgatctgaacctggaagctcatatgtatgcatcccagtggtttctcactctttttactgccaagttcccactctgcatggtgttccacatcattgacttactgctttgtgagggtttgaacataatctttcatgtagctttggctctcctaaagacctcaaaggaagaccttctgcaggctgattttgaaggtgctttaaagttctttagagttcagcttccaaagagatacagggcagaggaaaatgcaagaagactgatggagcaggcttgcaatattaaagtaccaaccaagaagctgaagaaatatgagaaagaatatcagacaatgcgagagagtcagctgcaacaggaagacccaatggatagatacaagagggagaaccgaagattacaggaggccagcatgaggttggaacaagagaatgatgaccttgcccatgaactagtaacaagcaaaattgctctacggaatgacttggatcaggcagaagacaaggcagatgtgttgaataaagagctccttttgaccaaacagaggctggtggagactgaagaggagaagaggaagcaagaggaagagactgcccagctaaaagaagtcttcaggaaacagctagagaaggcagaatatgaaataaagaagactacagctatcattgctgagtataaacagatctgttcgcagttgagtaccaggctggagaaacagcaagcagccagcaaggaggagctggaagtggtaaagggtaagatgatggcatgcaaacactgcagtgacattttcagcaaggagggtgctttgaaactagcagccacaggcagagaggaccagggaattgaaacagatgatgagaaggactcacttaagaagcagctgagagagatggaactggaactggcacaaaccaaactgcagttggtggaggccaagtgtaaaattcaggaacttgaacatcagagaggagcccttatgaatgaaatccaagctgcgaaaaactcttggtttagcaaaaccctgaactctatcaaaacggccacgggcacccagccattgcagccagcaccggtcacccagccacccaaggagagcacatagttccagccttacccaagcacaagagcacaatgttcaaaccaatggaaatctgggaggattcttcctggtgtccctttgaaggaaagtcaaggaggccagaaaacaagccagaatttttcagtagctctcactctttcttgtatgacacttttcaaagggatgctatttaaactgacctgttctatgttgaatacctattttccagcttctggaaggccatgttcagatccatcatagtattacacattattttgtttgcctgatgtttagttggaaataagtaattcagaactaaatgcttttttatttagaattattcataattatttttatcttacataaaaatggagacatctgttattccaaggttgaagtgataagaagatctttgtcacaggaaaaaaaaaattgaaacctaaacatcttaagttttcaggatttattcagataaagcacactgtggggccaggcatgaccactctcaggtttcctcctgagcctgattcccagggaagtgttaatcctgtccaaaggaaagaaccaatcagcgatcattggtttactttcattttctgttcggtacatctggaaatgaagtgccaggaatagacgggctgttcagattatacgctaggtaaaaggaactgaaattttaataagtgtaggtcaggatcatttgggctgtggtattctaacagatccttttaagaatgccacataggacttgtgagttcctaagtacaccaaagtatggacacagatgtgacttctggcaattataaagttaaaggtggatattgcaccttacagacttagggagcctttaccagagacgcctaaaaagccccaggttcagccattgtgctgaatagagtggaatatagaaccagggacagagtatttcatttaacgttgatatatacttgctaaggaaacactaacaatactgtaactttgttaaaggacatagtattgaaatgggaaatagaggtcaggctcacatcatcttagtttaatgctgggcaactttttctgatttctgtagttccctgaaaatgtgtccttcgtacccataaagagatacaaatgcatttgtaacatttttgattgaatataaaacctttacagaaatacttatctcatggaaaggtaaagctattgtttaaaaattagtggaaatattttttcaattatatttaacatgcctataaaaatagtccttgcaggaaattatttgataagagcaaaactatttttattttataaactattttggaggcctctgatcctttcaaaccaaccaaactactattagatatgtacaataacatttgttgatattaatcattggcctcattgttgaacatattatttgcaaagaatcttaaactctgtagtgccagaatgattctcatctgtgccatattttgcaattaaaagtaacacacccttagaagaatcaaataagagccatctacatcccaggaggatgcaccaagttgctcacagtggatcttttcctctaaaatgatcttttatgttctaaaaagtgaaatcccctttatctgtgtttatattctctacagcccataaaactgatgtgattgttatgttatactcatcagataatacttttcttacataaatctttcattgttgttctgacatctttcattacaaaatttattttcttaacaaaaaggaacataacccagcattccaagtgtctgtgttggctttaacattctctacatggtggtctagataagctaatttttttttttttttttttgtaaaatgtaatagctagaaaatgttatcttggcgcttgtttttgtaaatcatttagtataggctgttagctttactggtactttacgctttgattccaagaagccttgtgcagttgccttatcaaatggccagctaaattaaagatgctcttttgtgttgtgaatttcatagttctgtacagagcttgtttcaatttacaaaaataagtacattccacagaatgcctaaagtgtgtaattttctttaaataatagtaggtgagggagaaacataatggctctaggtcaatcccttatctaaagaccttgttcaacttcatagtccctttccttttaaagaggagaagagaaaaatcccccctggccaggcatggtggctcacatctgtaatcccagcactttgggaggctgaggtgggtggatcacctaaggtcaggagtttgagaccagcctggccaacatggtgaaaccctatctctactgcaaaatacaaaaattagccgggcttggtggcgggtgcctgtaatcccagctactcgggaggttgaggcaggagaatcacttgaacccaggaggcagaggttgcagtgggccaagattacggcattacattccatccagcctgggcgacaagagcaaaattccgtctcgaaaaatcaccaggtacatacctctcaagtttgataagtccatcttttgagttttcttttagctctttcaaaagattacgagggcaatacatattttttttttttttattctccagccccatatcatacttgggtatgcctgttggtaccataagcctaaactctccttcactgcaatgcctttgagtcagtagcaatagtaaagactagaaacaaagaaaattcagaatttggtatgtgatatgattgttcatacaatatgttataatagcaatattccaaacaatatgtccttcactgtctattgttggaaaactcatgcatcccagcatgaagtaactcctagttttaattttagttattttgagatatatttgagaattgcatctcttctcttgaatttcatttagaagagattaaccagccaaatatccaggaaagtttcaaaacattctagtgtttttcatcctttgctaggatgcactctgtacaaaacattcctctgaaaatctaatatttgcagtatctaagaattgatcatttctattttcattaaattctgtggaaaaaattaaatgaatgaaattcaacttcataattcagttcatcagcttttgtatcttgagaatctaaacacgtctttaaatctgaaagaaaccaagctggattttgcagtgcatatgtttgctagcttcccacatcctgaaccatgtcaaaatttggttttatttagttacatataatttaatgcaaagaaattctgttacttaatgttctgtttatttatgagtgcctatcaggaacactaataggaatgccattcaaccagtgtcttctgcccctctcccagctgttaaattagtacttcttcattggctttctgaaatgtcctgagtaaagtagaaaagcaacctttgtatggatgtggggatatttaatagtatgtatcttgtttcatttttttcctatgatgtattaatatttatttttctccaacccctgctccattttcttaaaatattttccagttaataactagttgctttatttcctagctgaagtgagaaaaccaacggaaaacaatacagatttgggcagaggagatagagttacatctttaaaggagtgagccagtcacccaggagaatcacatgtgtaactgatgtaggggtttaagtcttcatactttcactaaaatctgtctactaactctcccaccaacctttgcatcaaacacttaggtacctgcctgattaggggggcccctttaagggaaaaaacttttaaaaaattaaatgccttggttttgttttatcttctgggaaagaacacttttacttgattagcaagatgattatattatataacttgcccttaaaaacactccaaaatactgactccttttctccaattacaaatgagtgtgaagaaattctgttgtatgatttgaacactattaggtttgtatgtgtgtttaattggaagaattttatatagagtatctctgctgcttttgtttacctgggtaccacacaaccaaatacacattgagatttcaagaaatgatgatgaaagccagaaggccagaccacagctctgcagcctgtttcctacaaccagatataaaactctttctcgtcgccatgctgatagtcacactgaactagaactgtcccaacacattcttcctctctcataatggcttccatttaatacaggcaaagccctttaccttagcaaattctttatctttcaaaagtgaccaaaatgaggacttcaaccttggctgcacctcaataggagatgctgatcttgagttgtaatgagaaaagtgggcatataggagattttagtgactgcagtcagctgtctggcattcctttctcagtttgcatctaaaagactacatatgtcaagcttatctccacctgaatttgctgcctgctataaaaacatttcattaatatatcccattcttcctacctccatctctggtttgtcattagtggtattctgaaaagcttaagaaaaaagaatcattgagtagaaagtgaacattttaagttattttcctttttcattggcaattagttaacatgtaaaatcttttccattaaactgtataacttttaataactatatattatatatgggataaaatatatggactgaattgtgagaatataaatgcatcgaaagactctggtgtcatgaaagcacaagaataaggctggagatggtcccagatccaagatgtcccaaaagccttttgtatcagtttctctatttttggtattttgcataatgcatggatccttagttcaaatgagggacaaagtttctcagtcagccccacttcctttctttctaactcctacctttcccttgcagaggaggtagtagagattctggaattgtctatttttatgaattccattattttgtccatggcatctctaatgaaaacaggttctagaataaaggagttgattagtctgaacagtactaattaactacaaaataaacgttagtgatcagcctcttcctctataaacaatgaccaattagacgtttccgtaattccatgtattatgtatagtacactctataaatgtaaatgtaatgcttgtctaaaaagtgcaatttattgtacattgtcccaacaaatgtttacttttataatcgttatgaacttgaattggattagtatcttgtttttatgtgtgaatgaagccttgtgaaataaacaaatgcaactgagaaggtaacaaggtgactgtttttgtgagccagtgatgttttcaatgctttgtgttgcccctttggccccattaagcagtaataaacatttgttctgaagtccaaaaaaaaat

SEQ ID NO: 326757 - DNA, 9091 bp, Homo sapiens
agaggggcctggacgagcgcgcttccgacccgccgccaccgcctcctcccctccttctcggcccgccccctccctcgcctcttcctgccaggcggcccttctcccctcccctctcagttccctccgccctcctcgggctccagcggtggcggagcgaacgggaccggcccggcttcagagcgcgaggtggagggtggaacgcgggcgcctgaaggagttgttgtctcggcagcgcccgcggagacgtgaagaggtggttgtgggaagagaagtttgcagaactgaaatggaggtcagagcttcattacagaaggttagtggatcatctgattctgtggctacaatgaacagtgaagaatttgttttggttcctcagtatgcagatgataattctacaaaacatgaagaaaaacctcaactgaagatagtttctaatggtgatgaacaattggaaaaagccatggaagagattttgagagattccgagaaaaggccaagcagtcttcttgttgattgtcaaagttccagtgagatttcagaccattcgtttggagatattccagccagccaaacaaataagccatctcttcagttaattttggatccgtctaacacagaaatttctacacccagaccatcttctccaggtggactacctgaagaagatagtgttttatttaataaactgacctacttaggatgtatgaaggtttcttccccacgtaatgaagtagaggctttacgggcaatggcaaccatgaaatcttccagtcaatacccctttcctgttaccctgtatgtaccaaatgttccagaaggttctgtgagaattatagaccaatccagcaatgtggagatagcatcttttccaatctataaggtgttattctgtgcacgtggacatgacggaacaacagagagcaattgctttgcatttacagagagttcccatggttcggaagaatttcagatacatgttttctcctgtgaaattaaagaggcagtaagcagaattttgtacagtttctgtacagcattcaaacgttcttccagacaagtgtctgatgttaaagactcagttattcctacccccgacagtgatgtgtttaccttcagtgtctccttggaggtaaaagaagacgatggaaaaggaaactttagattattggtaattcctattccttttgaatatttcagccctgtgcctaaggatagagataaattttatttcaaattaaagcaaggaatagagaagaaggttgtgattacagtgcagcaactttctaacaaagaattagctattgaaagatgttttggaatgttattaagcccaggtcgaaacgtgaagaacagtgacatgcatttactggatatggaatccatgggaaagagctatgatgggagagcttatgtcatcactggcatgtggaaccccaatgcaccagtatttctggcacttaacgaggaaaccccaaaagataagcaagtatacatgactgtggcagtggatatggtagtcacagaggtggtggagcctgttcgctttctcctggagacagtagtccgtgtgtaccctgcaaatgagcgattttggtatttcagcagaaagactttcacagagactttcttcatgagattgaaacagtctgagggaaaaggccataccaatgctggagatgcaatatatgaggtggtgagtctacagcgagagtctgacaaggaggaaccagtcactcctactagtggagggggtccaatgtcaccccaggatgatgaagcagaagaggagagtgataatgaactctcaagtggaacaggtgatgtgtctaaggattgtcctgagaagatcctgtattcttggggagagttgctaggaaaatggcacagtaaccttggtgcacgaccgaaagggctgtctactctggtgaagagtggtgtccctgaagcattgagggcagaggtatggcagttattggcaggctgccatgacaaccaggcaatgctggatagataccgaattcttatcacaaaggactcagcccaggagagtgttattactcgagatattcatcgtacatttcccgcacatgattactttaaagatactggaggagatggtcaagaatcgctctataagatctgcaaggcctactctgtgtatgatgaagacattgggtactgtcaagggcagtcttttcttgctgctgtattactgctgcatatgccagaggaacaagcattctgtgttttggtgaaaatcatgtacgactatggtttgagagacctctacagaaacaacttcgaagatcttcattgcaaattctaccagttggagagactaatgcaggaacagctaccggacctgcatagccatttttctgatctgaacctggaagctcatatgtatgcatcccagtggtttctcactctttttactgccaagttcccactctgcatggtgttccacatcattgacttactgctttgtgagggtttgaacataatctttcatgtagctttggctctcctaaagacctcaaaggaagaccttctgcaggctgattttgaaggtgctttaaagttctttagagttcagcttccaaagagatacagggcagaggaaaatgcaagaagactgatggagcaggcttgcaatattaaagtaccaaccaagaagctgaagaaatatgagaaagaatatcagacaatgcgagagagtcagctgcaacaggaagacccaatggatagatacaagtttgtatatttgtaggtaactccagctgttgcatttatactgggaatcttcataagaagctgagagaaagagaggggaaaaagaaagtggctttctactttcaaaaatgaaacaaaaaggaaaaatggcaaagtactgttttagctgtgcatgtcatatccacaaagacttttagcaggtgaactgttccaagactgacacaaggatgtttcaaacttgcctctgtctgtagaaaatgttaaaaataccaactcacttggaaggaaaaataaaaatcacaaaggtatattgagcacaagggagaaccgaagattacaggaggccagcatgaggttggaacaagagaatgatgaccttgcccatgaactagtaacaagcaaaattgctctacggaatgacttggatcaggcagaagacaaggcagatgtgttgaataaagagctccttttgaccaaacagaggctggtggagactgaagaggagaagaggaagcaagaggaagagactgcccagctaaaagaagtcttcaggaaacagctagagaaggcagaatatgaaataaagaagactacagctatcattgctgagtataaacagatctgttcgcagttgagtaccaggctggagaaacagcaagcagccagcaaggaggagctggaagtggtaaagggtaagatgatggcatgcaaacactgcagtgacattttcagcaaggagggtgctttgaaactagcagccacaggcagagaggaccagggaattgaaacagatgatgagaaggactcacttaagaagcagctgagagagatggaactggaactggcacaaaccaaactgcagttggtggaggccaagtgtaaaattcaggaacttgaacatcagagaggagcccttatgaatgaaatccaagctgcgaaaaactcttggtttagcaaaaccctgaactctatcaaaacggccacgggcacccagccattgcagccagcaccggtcacccagccacccaaggagagcacatagttccagccttacccaagcacaagagcacaatgttcaaaccaatggaaatctgggaggattcttcctggtgtccctttgaaggaaagtcaaggaggccagaaaacaagccagaatttttcagtagctctcactctttcttgtatgacacttttcaaagggatgctatttaaactgacctgttctatgttgaatacctattttccagcttctggaaggccatgttcagatccatcatagtattacacattattttgtttgcctgatgtttagttggaaataagtaattcagaactaaatgcttttttatttagaattattcataattatttttatcttacataaaaatggagacatctgttattccaaggttgaagtgataagaagatctttgtcacaggaaaaaaaaaattgaaacctaaacatcttaagttttcaggatttattcagataaagcacactgtggggccaggcatgaccactctcaggtttcctcctgagcctgattcccagggaagtgttaatcctgtccaaaggaaagaaccaatcagcgatcattggtttactttcattttctgttcggtacatctggaaatgaagtgccaggaatagacgggctgttcagattatacgctaggtaaaaggaactgaaattttaataagtgtaggtcaggatcatttgggctgtggtattctaacagatccttttaagaatgccacataggacttgtgagttcctaagtacaccaaagtatggacacagatgtgacttctggcaattataaagttaaaggtggatattgcaccttacagacttagggagcctttaccagagacgcctaaaaagccccaggttcagccattgtgctgaatagagtggaatatagaaccagggacagagtatttcatttaacgttgatatatacttgctaaggaaacactaacaatactgtaactttgttaaaggacatagtattgaaatgggaaatagaggtcaggctcacatcatcttagtttaatgctgggcaactttttctgatttctgtagttccctgaaaatgtgtccttcgtacccataaagagatacaaatgcatttgtaacatttttgattgaatataaaacctttacagaaatacttatctcatggaaaggtaaagctattgtttaaaaattagtggaaatattttttcaattatatttaacatgcctataaaaatagtccttgcaggaaattatttgataagagcaaaactatttttattttataaactattttggaggcctctgatcctttcaaaccaaccaaactactattagatatgtacaataacatttgttgatattaatcattggcctcattgttgaacatattatttgcaaagaatcttaaactctgtagtgccagaatgattctcatctgtgccatattttgcaattaaaagtaacacacccttagaagaatcaaataagagccatctacatcccaggaggatgcaccaagttgctcacagtggatcttttcctctaaaatgatcttttatgttctaaaaagtgaaatcccctttatctgtgtttatattctctacagcccataaaactgatgtgattgttatgttatactcatcagataatacttttcttacataaatctttcattgttgttctgacatctttcattacaaaatttattttcttaacaaaaaggaacataacccagcattccaagtgtctgtgttggctttaacattctctacatggtggtctagataagctaatttttttttttttttttttgtaaaatgtaatagctagaaaatgttatcttggcgcttgtttttgtaaatcatttagtataggctgttagctttactggtactttacgctttgattccaagaagccttgtgcagttgccttatcaaatggccagctaaattaaagatgctcttttgtgttgtgaatttcatagttctgtacagagcttgtttcaatttacaaaaataagtacattccacagaatgcctaaagtgtgtaattttctttaaataatagtaggtgagggagaaacataatggctctaggtcaatcccttatctaaagaccttgttcaacttcatagtccctttccttttaaagaggagaagagaaaaatcccccctggccaggcatggtggctcacatctgtaatcccagcactttgggaggctgaggtgggtggatcacctaaggtcaggagtttgagaccagcctggccaacatggtgaaaccctatctctactgcaaaatacaaaaattagccgggcttggtggcgggtgcctgtaatcccagctactcgggaggttgaggcaggagaatcacttgaacccaggaggcagaggttgcagtgggccaagattacggcattacattccatccagcctgggcgacaagagcaaaattccgtctcgaaaaatcaccaggtacatacctctcaagtttgataagtccatcttttgagttttcttttagctctttcaaaagattacgagggcaatacatattttttttttttttattctccagccccatatcatacttgggtatgcctgttggtaccataagcctaaactctccttcactgcaatgcctttgagtcagtagcaatagtaaagactagaaacaaagaaaattcagaatttggtatgtgatatgattgttcatacaatatgttataatagcaatattccaaacaatatgtccttcactgtctattgttggaaaactcatgcatcccagcatgaagtaactcctagttttaattttagttattttgagatatatttgagaattgcatctcttctcttgaatttcatttagaagagattaaccagccaaatatccaggaaagtttcaaaacattctagtgtttttcatcctttgctaggatgcactctgtacaaaacattcctctgaaaatctaatatttgcagtatctaagaattgatcatttctattttcattaaattctgtggaaaaaattaaatgaatgaaattcaacttcataattcagttcatcagcttttgtatcttgagaatctaaacacgtctttaaatctgaaagaaaccaagctggattttgcagtgcatatgtttgctagcttcccacatcctgaaccatgtcaaaatttggttttatttagttacatataatttaatgcaaagaaattctgttacttaatgttctgtttatttatgagtgcctatcaggaacactaataggaatgccattcaaccagtgtcttctgcccctctcccagctgttaaattagtacttcttcattggctttctgaaatgtcctgagtaaagtagaaaagcaacctttgtatggatgtggggatatttaatagtatgtatcttgtttcatttttttcctatgatgtattaatatttatttttctccaacccctgctccattttcttaaaatattttccagttaataactagttgctttatttcctagctgaagtgagaaaaccaacggaaaacaatacagatttgggcagaggagatagagttacatctttaaaggagtgagccagtcacccaggagaatcacatgtgtaactgatgtaggggtttaagtcttcatactttcactaaaatctgtctactaactctcccaccaacctttgcatcaaacacttaggtacctgcctgattaggggggcccctttaagggaaaaaacttttaaaaaattaaatgccttggttttgttttatcttctgggaaagaacacttttacttgattagcaagatgattatattatataacttgcccttaaaaacactccaaaatactgactccttttctccaattacaaatgagtgtgaagaaattctgttgtatgatttgaacactattaggtttgtatgtgtgtttaattggaagaattttatatagagtatctctgctgcttttgtttacctgggtaccacacaaccaaatacacattgagatttcaagaaatgatgatgaaagccagaaggccagaccacagctctgcagcctgtttcctacaaccagatataaaactctttctcgtcgccatgctgatagtcacactgaactagaactgtcccaacacattcttcctctctcataatggcttccatttaatacaggcaaagccctttaccttagcaaattctttatctttcaaaagtgaccaaaatgaggacttcaaccttggctgcacctcaataggagatgctgatcttgagttgtaatgagaaaagtgggcatataggagattttagtgactgcagtcagctgtctggcattcctttctcagtttgcatctaaaagactacatatgtcaagcttatctccacctgaatttgctgcctgctataaaaacatttcattaatatatcccattcttcctacctccatctctggtttgtcattagtggtattctgaaaagcttaagaaaaaagaatcattgagtagaaagtgaacattttaagttattttcctttttcattggcaattagttaacatgtaaaatcttttccattaaactgtataacttttaataactatatattatatatgggataaaatatatggactgaattgtgagaatataaatgcatcgaaagactctggtgtcatgaaagcacaagaataaggctggagatggtcccagatccaagatgtcccaaaagccttttgtatcagtttctctatttttggtattttgcataatgcatggatccttagttcaaatgagggacaaagtttctcagtcagccccacttcctttctttctaactcctacctttcccttgcagaggaggtagtagagattctggaattgtctatttttatgaattccattattttgtccatggcatctctaatgaaaacaggttctagaataaaggagttgattagtctgaacagtactaattaactacaaaataaacgttagtgatcagcctcttcctctataaacaatgaccaattagacgtttccgtaattccatgtattatgtatagtacactctataaatgtaaatgtaatgcttgtctaaaaagtgcaatttattgtacattgtcccaacaaatgtttacttttataatcgttatgaacttgaattggattagtatcttgtttttatgtgtgaatgaagccttgtgaaataaacaaatgcaactgagaaggtaacaaggtgactgtttttgtgagccagtgatgttttcaatgctttgtgttgcccctttggccccattaagcagtaataaacatttgttctgaagtccaaaaaaaaat

SEQ ID NO: 326758 - DNA, 8704 bp, Homo sapiens
agaggggcctggacgagcgcgcttccgacccgccgccaccgcctcctcccctccttctcggcccgccccctccctcgcctcttcctgccaggcggcccttctcccctcccctctcagttccctccgccctcctcgggctccagcggtggcggagcgaacgggaccggcccggcttcagagcgcgaggtggagggtggaacgcgggcgcctgaaggagttgttgtctcggcagcgcccgcggagacgtgaagaggtggttgtgggaagagaagtttgcagaactgaaatggaggtcagagcttcattacagaaggttagtggatcatctgattctgtggctacaatgaacagtgaagaatttgttttggttcctcagtatgcagatgataattctacaaaacatgaagaaaaacctcaactgaagatagtttctaatggtgatgaacaattggaaaaagccatggaagagattttgagagattccgagcattcgtttggagatattccagccagccaaacaaataagccatctcttcagttaattttggatccgtctaacacagaaatttctacacccagaccatcttctccaggtggactacctgaagaagatagtgttttatttaataaactgacctacttaggatgtatgaaggtttcttccccacgtaatgaagtagaggctttacgggcaatggcaaccatgaaatcttccagtcaatacccctttcctgttaccctgtatgtaccaaatgttccagaaggttctgtgagaattatagaccaatccagcaatgtggagatagcatcttttccaatctataaggtgttattctgtgcacgtggacatgacggaacaacagagagcaattgctttgcatttacagagagttcccatggttcggaagaatttcagatacatgttttctcctgtgaaattaaagaggcagtaagcagaattttgtacagtttctgtacagcattcaaacgttcttccagacaagtgtctgatgttaaagactcagttattcctacccccgacagtgatgtgtttaccttcagtgtctccttggaggtaaaagaagacgatggaaaaggaaactttagccctgtgcctaaggatagagataaattttatttcaaattaaagcaaggaatagagaagaaggttgtgattacagtgcagcaactttctaacaaagaattagctattgaaagatgttttggaatgttattaagcccaggtcgaaacgtgaagaacagtgacatgcatttactggatatggaatccatgggaaagagctatgatgggagagcttatgtcatcactggcatgtggaaccccaatgcaccagtatttctggcacttaacgaggaaaccccaaaagataagcaagtatacatgactgtggcagtggatatggtagtcacagaggtggtggagcctgttcgctttctcctggagacagtagtccgtgtgtaccctgcaaatgagcgattttggtatttcagcagaaagactttcacagagactttcttcatgagattgaaacagtctgagggaaaaggccataccaatgctggagatgcaatatatgaggtggtgagtctacagcgagagtctgacaaggaggaaccagtcactcctactagtggagggggtccaatgtcaccccaggatgatgaagcagaagaggagagtgataatgaactctcaagtggaacaggtgatgtgtctaaggattgtcctgagaagatcctgtattcttggggagagttgctaggaaaatggcacagtaaccttggtgcacgaccgaaagggctgtctactctggtgaagagtggtgtccctgaagcattgagggcagaggtatggcagttattggcaggctgccatgacaaccaggcaatgctggatagataccgaattcttatcacaaaggactcagcccaggagagtgttattactcgagatattcatcgtacatttcccgcacatgattactttaaagatactggaggagatggtcaagaatcgctctataagatctgcaaggcctactctgtgtatgatgaagacattgggtactgtcaagggcagtcttttcttgctgctgtattactgctgcatatgccagaggaacaagcattctgtgttttggtgaaaatcatgtacgactatggtttgagagacctctacagaaacaacttcgaagatcttcattgcaaattctaccagttggagagactaatgcaggaacagctaccggacctgcatagccatttttctgatctgaacctggaagctcatatgtatgcatcccagtggtttctcactctttttactgccaagttcccactctgcatggtgttccacatcattgacttactgctttgtgagggtttgaacataatctttcatgtagctttggctctcctaaagacctcaaaggaagaccttctgcaggctgattttgaaggtgctttaaagttctttagagttcagcttccaaagagatacagggcagaggaaaatgcaagaagactgatggagcaggcttgcaatattaaagtaccaaccaagaagctgaagaaatatgagaaagaatatcagacaatgcgagagagtcagctgcaacaggaagacccaatggatagatacaagagggagaaccgaagattacaggaggccagcatgaggttggaacaagagaatgatgaccttgcccatgaactagtaacaagcaaaattgctctacggaatgacttggatcaggcagaagacaaggcagatgtgttgaataaagagctccttttgaccaaacagaggctggtggagactgaagaggagaagaggaagcaagaggaagagactgcccagctaaaagaagtcttcaggaaacagctagagaaggcagaatatgaaataaagaagactacagctatcattgctgagtataaacagatctgttcgcagttgagtaccaggctggagaaacagcaagcagccagcaaggaggagctggaagtggtaaagggtaagatgatggcatgcaaacactgcagtgacattttcagcaaggagggtgctttgaaactagcagccacaggcagagaggaccagggaattgaaacagatgatgagaaggactcacttaagaagcagctgagagagatggaactggaactggcacaaaccaaactgcagttggtggaggccaagtgtaaaattcaggaacttgaacatcagagaggagcccttatgaatgaaatccaagctgcgaaaaactcttggtttagcaaaaccctgaactctatcaaaacggccacgggcacccagccattgcagccagcaccggtcacccagccacccaaggagagcacatagttccagccttacccaagcacaagagcacaatgttcaaaccaatggaaatctgggaggattcttcctggtgtccctttgaaggaaagtcaaggaggccagaaaacaagccagaatttttcagtagctctcactctttcttgtatgacacttttcaaagggatgctatttaaactgacctgttctatgttgaatacctattttccagcttctggaaggccatgttcagatccatcatagtattacacattattttgtttgcctgatgtttagttggaaataagtaattcagaactaaatgcttttttatttagaattattcataattatttttatcttacataaaaatggagacatctgttattccaaggttgaagtgataagaagatctttgtcacaggaaaaaaaaaattgaaacctaaacatcttaagttttcaggatttattcagataaagcacactgtggggccaggcatgaccactctcaggtttcctcctgagcctgattcccagggaagtgttaatcctgtccaaaggaaagaaccaatcagcgatcattggtttactttcattttctgttcggtacatctggaaatgaagtgccaggaatagacgggctgttcagattatacgctaggtaaaaggaactgaaattttaataagtgtaggtcaggatcatttgggctgtggtattctaacagatccttttaagaatgccacataggacttgtgagttcctaagtacaccaaagtatggacacagatgtgacttctggcaattataaagttaaaggtggatattgcaccttacagacttagggagcctttaccagagacgcctaaaaagccccaggttcagccattgtgctgaatagagtggaatatagaaccagggacagagtatttcatttaacgttgatatatacttgctaaggaaacactaacaatactgtaactttgttaaaggacatagtattgaaatgggaaatagaggtcaggctcacatcatcttagtttaatgctgggcaactttttctgatttctgtagttccctgaaaatgtgtccttcgtacccataaagagatacaaatgcatttgtaacatttttgattgaatataaaacctttacagaaatacttatctcatggaaaggtaaagctattgtttaaaaattagtggaaatattttttcaattatatttaacatgcctataaaaatagtccttgcaggaaattatttgataagagcaaaactatttttattttataaactattttggaggcctctgatcctttcaaaccaaccaaactactattagatatgtacaataacatttgttgatattaatcattggcctcattgttgaacatattatttgcaaagaatcttaaactctgtagtgccagaatgattctcatctgtgccatattttgcaattaaaagtaacacacccttagaagaatcaaataagagccatctacatcccaggaggatgcaccaagttgctcacagtggatcttttcctctaaaatgatcttttatgttctaaaaagtgaaatcccctttatctgtgtttatattctctacagcccataaaactgatgtgattgttatgttatactcatcagataatacttttcttacataaatctttcattgttgttctgacatctttcattacaaaatttattttcttaacaaaaaggaacataacccagcattccaagtgtctgtgttggctttaacattctctacatggtggtctagataagctaatttttttttttttttttttgtaaaatgtaatagctagaaaatgttatcttggcgcttgtttttgtaaatcatttagtataggctgttagctttactggtactttacgctttgattccaagaagccttgtgcagttgccttatcaaatggccagctaaattaaagatgctcttttgtgttgtgaatttcatagttctgtacagagcttgtttcaatttacaaaaataagtacattccacagaatgcctaaagtgtgtaattttctttaaataatagtaggtgagggagaaacataatggctctaggtcaatcccttatctaaagaccttgttcaacttcatagtccctttccttttaaagaggagaagagaaaaatcccccctggccaggcatggtggctcacatctgtaatcccagcactttgggaggctgaggtgggtggatcacctaaggtcaggagtttgagaccagcctggccaacatggtgaaaccctatctctactgcaaaatacaaaaattagccgggcttggtggcgggtgcctgtaatcccagctactcgggaggttgaggcaggagaatcacttgaacccaggaggcagaggttgcagtgggccaagattacggcattacattccatccagcctgggcgacaagagcaaaattccgtctcgaaaaatcaccaggtacatacctctcaagtttgataagtccatcttttgagttttcttttagctctttcaaaagattacgagggcaatacatattttttttttttttattctccagccccatatcatacttgggtatgcctgttggtaccataagcctaaactctccttcactgcaatgcctttgagtcagtagcaatagtaaagactagaaacaaagaaaattcagaatttggtatgtgatatgattgttcatacaatatgttataatagcaatattccaaacaatatgtccttcactgtctattgttggaaaactcatgcatcccagcatgaagtaactcctagttttaattttagttattttgagatatatttgagaattgcatctcttctcttgaatttcatttagaagagattaaccagccaaatatccaggaaagtttcaaaacattctagtgtttttcatcctttgctaggatgcactctgtacaaaacattcctctgaaaatctaatatttgcagtatctaagaattgatcatttctattttcattaaattctgtggaaaaaattaaatgaatgaaattcaacttcataattcagttcatcagcttttgtatcttgagaatctaaacacgtctttaaatctgaaagaaaccaagctggattttgcagtgcatatgtttgctagcttcccacatcctgaaccatgtcaaaatttggttttatttagttacatataatttaatgcaaagaaattctgttacttaatgttctgtttatttatgagtgcctatcaggaacactaataggaatgccattcaaccagtgtcttctgcccctctcccagctgttaaattagtacttcttcattggctttctgaaatgtcctgagtaaagtagaaaagcaacctttgtatggatgtggggatatttaatagtatgtatcttgtttcatttttttcctatgatgtattaatatttatttttctccaacccctgctccattttcttaaaatattttccagttaataactagttgctttatttcctagctgaagtgagaaaaccaacggaaaacaatacagatttgggcagaggagatagagttacatctttaaaggagtgagccagtcacccaggagaatcacatgtgtaactgatgtaggggtttaagtcttcatactttcactaaaatctgtctactaactctcccaccaacctttgcatcaaacacttaggtacctgcctgattaggggggcccctttaagggaaaaaacttttaaaaaattaaatgccttggttttgttttatcttctgggaaagaacacttttacttgattagcaagatgattatattatataacttgcccttaaaaacactccaaaatactgactccttttctccaattacaaatgagtgtgaagaaattctgttgtatgatttgaacactattaggtttgtatgtgtgtttaattggaagaattttatatagagtatctctgctgcttttgtttacctgggtaccacacaaccaaatacacattgagatttcaagaaatgatgatgaaagccagaaggccagaccacagctctgcagcctgtttcctacaaccagatataaaactctttctcgtcgccatgctgatagtcacactgaactagaactgtcccaacacattcttcctctctcataatggcttccatttaatacaggcaaagccctttaccttagcaaattctttatctttcaaaagtgaccaaaatgaggacttcaaccttggctgcacctcaataggagatgctgatcttgagttgtaatgagaaaagtgggcatataggagattttagtgactgcagtcagctgtctggcattcctttctcagtttgcatctaaaagactacatatgtcaagcttatctccacctgaatttgctgcctgctataaaaacatttcattaatatatcccattcttcctacctccatctctggtttgtcattagtggtattctgaaaagcttaagaaaaaagaatcattgagtagaaagtgaacattttaagttattttcctttttcattggcaattagttaacatgtaaaatcttttccattaaactgtataacttttaataactatatattatatatgggataaaatatatggactgaattgtgagaatataaatgcatcgaaagactctggtgtcatgaaagcacaagaataaggctggagatggtcccagatccaagatgtcccaaaagccttttgtatcagtttctctatttttggtattttgcataatgcatggatccttagttcaaatgagggacaaagtttctcagtcagccccacttcctttctttctaactcctacctttcccttgcagaggaggtagtagagattctggaattgtctatttttatgaattccattattttgtccatggcatctctaatgaaaacaggttctagaataaaggagttgattagtctgaacagtactaattaactacaaaataaacgttagtgatcagcctcttcctctataaacaatgaccaattagacgtttccgtaattccatgtattatgtatagtacactctataaatgtaaatgtaatgcttgtctaaaaagtgcaatttattgtacattgtcccaacaaatgtttacttttataatcgttatgaacttgaattggattagtatcttgtttttatgtgtgaatgaagccttgtgaaataaacaaatgcaactgagaaggtaacaaggtgactgtttttgtgagccagtgatgttttcaatgctttgtgttgcccctttggccccattaagcagtaataaacatttgttctgaagtccaaaaaaaaat

SEQ ID NO: 326759 - DNA, 7306 bp, Homo sapiens
tgtctaaagagggaagtgaagccagtaggagactgagagattagaagaacagggcagtagaggatgaatttgcagtgaggttaaaggaacaatttattgggagaagggaatgtaggagggtagaagactttaaaattgaaaagaaataaaaggaggcagggatgtaaaacgagccataagtacaatgacaaatgggcattaaggaggaaaaagactatgtagaagaatctggtaaatatggatattaacagcaataagctcctttttaacgatttaattctaccaagtaaatatttgggattactcgctttttgccttttatttaccaaaaaattcatatattttcaaaggaacagctaccggacctgcatagccatttttctgatctgaacctggaagctcatatgtatgcatcccagtggtttctcactctttttactgccaagttcccactctgcatggtgttccacatcattgacttactgctttgtgagggtttgaacataatctttcatgtagctttggctctcctaaagacctcaaaggaagaccttctgcaggctgattttgaaggtgctttaaagttctttagagttcagcttccaaagagatacagggcagaggaaaatgcaagaagactgatggagcaggcttgcaatattaaagggtgtgtacactggcactgagctgcagtaggatttttccttggatagtctggtctggagctgggacagcagctgctgctgtggaaaggccagctggcaagatgatggaagaaatctccattatggtagcctatgacgcccatgttttcagccagctgcacgatgaagacttcctcactagtctggtggccatcagcaagcccaggtctatggtaccaaccaagaagctgaagaaatatgagaaagaatatcagacaatgcgagagagtcagctgcaacaggaagacccaatggatagatacaagtttgtatatttgtaggtaactccagctgttgcatttatactgggaatcttcataagaagctgagagaaagagaggggaaaaagaaagtggctttctactttcaaaaatgaaacaaaaaggaaaaatggcaaagtactgttttagctgtgcatgtcatatccacaaagacttttagcaggtgaactgttccaagactgacacaaggatgtttcaaacttgcctctgtctgtagaaaatgttaaaaataccaactcacttggaaggaaaaataaaaatcacaaaggtatattgagcacaagggagaaccgaagattacaggaggccagcatgaggttggaacaagagaatgatgaccttgcccatgaactagtaacaagcaaaattgctctacggaatgacttggatcaggcagaagacaaggcagatgtgttgaataaagagctccttttgaccaaacagaggctggtggagactgaagaggagaagaggaagcaagaggaagagactgcccagctaaaagaagtcttcaggaaacagctagagaaggcagaatatgaaataaagaagactacagctatcattgctgagtataaacagatctgttcgcagttgagtaccaggctggagaaacagcaagcagccagcaaggaggagctggaagtggtaaagggtaagatgatggcatgcaaacactgcagtgacattttcagcaaggagggtgctttgaaactagcagccacaggcagagaggaccagggaattgaaacagatgatgagaaggactcacttaagaagcagctgagagagatggaactggaactggcacaaaccaaactgcagttggtggaggccaagtgtaaaattcaggaacttgaacatcagagaggagcccttatgaatgaaatccaagctgcgaaaaactcttggtttagcaaaaccctgaactctatcaaaacggccacgggcacccagccattgcagccagcaccggtcacccagccacccaaggagagcacatagttccagccttacccaagcacaagagcacaatgttcaaaccaatggaaatctgggaggattcttcctggtgtccctttgaaggaaagtcaaggaggccagaaaacaagccagaatttttcagtagctctcactctttcttgtatgacacttttcaaagggatgctatttaaactgacctgttctatgttgaatacctattttccagcttctggaaggccatgttcagatccatcatagtattacacattattttgtttgcctgatgtttagttggaaataagtaattcagaactaaatgcttttttatttagaattattcataattatttttatcttacataaaaatggagacatctgttattccaaggttgaagtgataagaagatctttgtcacaggaaaaaaaaaattgaaacctaaacatcttaagttttcaggatttattcagataaagcacactgtggggccaggcatgaccactctcaggtttcctcctgagcctgattcccagggaagtgttaatcctgtccaaaggaaagaaccaatcagcgatcattggtttactttcattttctgttcggtacatctggaaatgaagtgccaggaatagacgggctgttcagattatacgctaggtaaaaggaactgaaattttaataagtgtaggtcaggatcatttgggctgtggtattctaacagatccttttaagaatgccacataggacttgtgagttcctaagtacaccaaagtatggacacagatgtgacttctggcaattataaagttaaaggtggatattgcaccttacagacttagggagcctttaccagagacgcctaaaaagccccaggttcagccattgtgctgaatagagtggaatatagaaccagggacagagtatttcatttaacgttgatatatacttgctaaggaaacactaacaatactgtaactttgttaaaggacatagtattgaaatgggaaatagaggtcaggctcacatcatcttagtttaatgctgggcaactttttctgatttctgtagttccctgaaaatgtgtccttcgtacccataaagagatacaaatgcatttgtaacatttttgattgaatataaaacctttacagaaatacttatctcatggaaaggtaaagctattgtttaaaaattagtggaaatattttttcaattatatttaacatgcctataaaaatagtccttgcaggaaattatttgataagagcaaaactatttttattttataaactattttggaggcctctgatcctttcaaaccaaccaaactactattagatatgtacaataacatttgttgatattaatcattggcctcattgttgaacatattatttgcaaagaatcttaaactctgtagtgccagaatgattctcatctgtgccatattttgcaattaaaagtaacacacccttagaagaatcaaataagagccatctacatcccaggaggatgcaccaagttgctcacagtggatcttttcctctaaaatgatcttttatgttctaaaaagtgaaatcccctttatctgtgtttatattctctacagcccataaaactgatgtgattgttatgttatactcatcagataatacttttcttacataaatctttcattgttgttctgacatctttcattacaaaatttattttcttaacaaaaaggaacataacccagcattccaagtgtctgtgttggctttaacattctctacatggtggtctagataagctaatttttttttttttttttttgtaaaatgtaatagctagaaaatgttatcttggcgcttgtttttgtaaatcatttagtataggctgttagctttactggtactttacgctttgattccaagaagccttgtgcagttgccttatcaaatggccagctaaattaaagatgctcttttgtgttgtgaatttcatagttctgtacagagcttgtttcaatttacaaaaataagtacattccacagaatgcctaaagtgtgtaattttctttaaataatagtaggtgagggagaaacataatggctctaggtcaatcccttatctaaagaccttgttcaacttcatagtccctttccttttaaagaggagaagagaaaaatcccccctggccaggcatggtggctcacatctgtaatcccagcactttgggaggctgaggtgggtggatcacctaaggtcaggagtttgagaccagcctggccaacatggtgaaaccctatctctactgcaaaatacaaaaattagccgggcttggtggcgggtgcctgtaatcccagctactcgggaggttgaggcaggagaatcacttgaacccaggaggcagaggttgcagtgggccaagattacggcattacattccatccagcctgggcgacaagagcaaaattccgtctcgaaaaatcaccaggtacatacctctcaagtttgataagtccatcttttgagttttcttttagctctttcaaaagattacgagggcaatacatattttttttttttttattctccagccccatatcatacttgggtatgcctgttggtaccataagcctaaactctccttcactgcaatgcctttgagtcagtagcaatagtaaagactagaaacaaagaaaattcagaatttggtatgtgatatgattgttcatacaatatgttataatagcaatattccaaacaatatgtccttcactgtctattgttggaaaactcatgcatcccagcatgaagtaactcctagttttaattttagttattttgagatatatttgagaattgcatctcttctcttgaatttcatttagaagagattaaccagccaaatatccaggaaagtttcaaaacattctagtgtttttcatcctttgctaggatgcactctgtacaaaacattcctctgaaaatctaatatttgcagtatctaagaattgatcatttctattttcattaaattctgtggaaaaaattaaatgaatgaaattcaacttcataattcagttcatcagcttttgtatcttgagaatctaaacacgtctttaaatctgaaagaaaccaagctggattttgcagtgcatatgtttgctagcttcccacatcctgaaccatgtcaaaatttggttttatttagttacatataatttaatgcaaagaaattctgttacttaatgttctgtttatttatgagtgcctatcaggaacactaataggaatgccattcaaccagtgtcttctgcccctctcccagctgttaaattagtacttcttcattggctttctgaaatgtcctgagtaaagtagaaaagcaacctttgtatggatgtggggatatttaatagtatgtatcttgtttcatttttttcctatgatgtattaatatttatttttctccaacccctgctccattttcttaaaatattttccagttaataactagttgctttatttcctagctgaagtgagaaaaccaacggaaaacaatacagatttgggcagaggagatagagttacatctttaaaggagtgagccagtcacccaggagaatcacatgtgtaactgatgtaggggtttaagtcttcatactttcactaaaatctgtctactaactctcccaccaacctttgcatcaaacacttaggtacctgcctgattaggggggcccctttaagggaaaaaacttttaaaaaattaaatgccttggttttgttttatcttctgggaaagaacacttttacttgattagcaagatgattatattatataacttgcccttaaaaacactccaaaatactgactccttttctccaattacaaatgagtgtgaagaaattctgttgtatgatttgaacactattaggtttgtatgtgtgtttaattggaagaattttatatagagtatctctgctgcttttgtttacctgggtaccacacaaccaaatacacattgagatttcaagaaatgatgatgaaagccagaaggccagaccacagctctgcagcctgtttcctacaaccagatataaaactctttctcgtcgccatgctgatagtcacactgaactagaactgtcccaacacattcttcctctctcataatggcttccatttaatacaggcaaagccctttaccttagcaaattctttatctttcaaaagtgaccaaaatgaggacttcaaccttggctgcacctcaataggagatgctgatcttgagttgtaatgagaaaagtgggcatataggagattttagtgactgcagtcagctgtctggcattcctttctcagtttgcatctaaaagactacatatgtcaagcttatctccacctgaatttgctgcctgctataaaaacatttcattaatatatcccattcttcctacctccatctctggtttgtcattagtggtattctgaaaagcttaagaaaaaagaatcattgagtagaaagtgaacattttaagttattttcctttttcattggcaattagttaacatgtaaaatcttttccattaaactgtataacttttaataactatatattatatatgggataaaatatatggactgaattgtgagaatataaatgcatcgaaagactctggtgtcatgaaagcacaagaataaggctggagatggtcccagatccaagatgtcccaaaagccttttgtatcagtttctctatttttggtattttgcataatgcatggatccttagttcaaatgagggacaaagtttctcagtcagccccacttcctttctttctaactcctacctttcccttgcagaggaggtagtagagattctggaattgtctatttttatgaattccattattttgtccatggcatctctaatgaaaacaggttctagaataaaggagttgattagtctgaacagtactaattaactacaaaataaacgttagtgatcagcctcttcctctataaacaatgaccaattagacgtttccgtaattccatgtattatgtatagtacactctataaatgtaaatgtaatgcttgtctaaaaagtgcaatttattgtacattgtcccaacaaatgtttacttttataatcgttatgaacttgaattggattagtatcttgtttttatgtgtgaatgaagccttgtgaaataaacaaatgcaactgagaaggtaacaaggtgactgtttttgtgagccagtgatgttttcaatgctttgtgttgcccctttggccccattaagcagtaataaacatttgttctgaagtccaaaaaaaaat

SEQ ID NO: 326760 - DNA, 6906 bp, Homo sapiens
ctgtaggcatttgaaaacttgaatatgatagctgtcaactcttttaaaagaggtatccaaaagaaaatatgtgagagttgagtgtgttgttgctaataaatttgcactgagtcttttaggaaaacattttctcctgacccttaaaagtctttaaaagcatgtgccaagaattcatcatagcagcagacaacacccaaaatattgagctagggtttataaagccgcctccctcctcgtcattttttcctttaaagcttagtttctttacttttaattaacagttcacatttctctggtttctcatcttgaaataaatgacgttcacaatcccttgaactgcttcacccagacttcagcccccaggtacacatgagatccaggatccatttttcttttgcattgccctgcccagcaatttcattcttttgtctgaagatgaactattttgcaagatttctgaccttgtcatataaggaagttccttccacccagctttaacaacacagtatcaacacctcacaccgtagttccttaatagtcccacatacagcattttagtcattcatgcaaactgtaaacagcaatgtggagagggaggagtttgaagatatgagtcttcctgagttgagacttgcccactggctacctcaagtatctttgttccattgaatgtttgcggtcacagagagaacttagagttatatgacactcaaaggaaaagcaaaagagcattaagaagtgtctgtttttgttattgccatttcataaatattttagtaggtgttcaatttcattggatattctttttttttaattgtctttgtacctatgattgaaaacagtagttggtctatgacttttgaggagagggagaaccgaagattacaggaggccagcatgaggttggaacaagagaatgatgaccttgcccatgaactagtaacaagcaaaattgctctacggaatgacttggatcaggcagaagacaaggcagatgtgttgaataaagagctccttttgaccaaacagaggctggtggagactgaagaggagaagaggaagcaagaggaagagactgcccagctaaaagaagtcttcaggaaacagctagagaaggcagaatatgaaataaagaagactacagctatcattgctgagtataaacagatctgttcgcagttgagtaccaggctggagaaacagcaagcagccagcaaggaggagctggaagtggtaaagggtaagatgatggcatgcaaacactgcagtgacattttcagcaaggagggtgctttgaaactagcagccacaggcagagaggaccagggaattgaaacagatgatgagaaggactcacttaagaagcagctgagagagatggaactggaactggcacaaaccaaactgcagttggtggaggccaagtgtaaaattcaggaacttgaacatcagagaggagcccttatgaatgaaatccaagctgcgaaaaactcttggtttagcaaaaccctgaactctatcaaaacggccacgggcacccagccattgcagccagcaccggtcacccagccacccaaggagagcacatagttccagccttacccaagcacaagagcacaatgttcaaaccaatggaaatctgggaggattcttcctggtgtccctttgaaggaaagtcaaggaggccagaaaacaagccagaatttttcagtagctctcactctttcttgtatgacacttttcaaagggatgctatttaaactgacctgttctatgttgaatacctattttccagcttctggaaggccatgttcagatccatcatagtattacacattattttgtttgcctgatgtttagttggaaataagtaattcagaactaaatgcttttttatttagaattattcataattatttttatcttacataaaaatggagacatctgttattccaaggttgaagtgataagaagatctttgtcacaggaaaaaaaaaattgaaacctaaacatcttaagttttcaggatttattcagataaagcacactgtggggccaggcatgaccactctcaggtttcctcctgagcctgattcccagggaagtgttaatcctgtccaaaggaaagaaccaatcagcgatcattggtttactttcattttctgttcggtacatctggaaatgaagtgccaggaatagacgggctgttcagattatacgctaggtaaaaggaactgaaattttaataagtgtaggtcaggatcatttgggctgtggtattctaacagatccttttaagaatgccacataggacttgtgagttcctaagtacaccaaagtatggacacagatgtgacttctggcaattataaagttaaaggtggatattgcaccttacagacttagggagcctttaccagagacgcctaaaaagccccaggttcagccattgtgctgaatagagtggaatatagaaccagggacagagtatttcatttaacgttgatatatacttgctaaggaaacactaacaatactgtaactttgttaaaggacatagtattgaaatgggaaatagaggtcaggctcacatcatcttagtttaatgctgggcaactttttctgatttctgtagttccctgaaaatgtgtccttcgtacccataaagagatacaaatgcatttgtaacatttttgattgaatataaaacctttacagaaatacttatctcatggaaaggtaaagctattgtttaaaaattagtggaaatattttttcaattatatttaacatgcctataaaaatagtccttgcaggaaattatttgataagagcaaaactatttttattttataaactattttggaggcctctgatcctttcaaaccaaccaaactactattagatatgtacaataacatttgttgatattaatcattggcctcattgttgaacatattatttgcaaagaatcttaaactctgtagtgccagaatgattctcatctgtgccatattttgcaattaaaagtaacacacccttagaagaatcaaataagagccatctacatcccaggaggatgcaccaagttgctcacagtggatcttttcctctaaaatgatcttttatgttctaaaaagtgaaatcccctttatctgtgtttatattctctacagcccataaaactgatgtgattgttatgttatactcatcagataatacttttcttacataaatctttcattgttgttctgacatctttcattacaaaatttattttcttaacaaaaaggaacataacccagcattccaagtgtctgtgttggctttaacattctctacatggtggtctagataagctaatttttttttttttttttttgtaaaatgtaatagctagaaaatgttatcttggcgcttgtttttgtaaatcatttagtataggctgttagctttactggtactttacgctttgattccaagaagccttgtgcagttgccttatcaaatggccagctaaattaaagatgctcttttgtgttgtgaatttcatagttctgtacagagcttgtttcaatttacaaaaataagtacattccacagaatgcctaaagtgtgtaattttctttaaataatagtaggtgagggagaaacataatggctctaggtcaatcccttatctaaagaccttgttcaacttcatagtccctttccttttaaagaggagaagagaaaaatcccccctggccaggcatggtggctcacatctgtaatcccagcactttgggaggctgaggtgggtggatcacctaaggtcaggagtttgagaccagcctggccaacatggtgaaaccctatctctactgcaaaatacaaaaattagccgggcttggtggcgggtgcctgtaatcccagctactcgggaggttgaggcaggagaatcacttgaacccaggaggcagaggttgcagtgggccaagattacggcattacattccatccagcctgggcgacaagagcaaaattccgtctcgaaaaatcaccaggtacatacctctcaagtttgataagtccatcttttgagttttcttttagctctttcaaaagattacgagggcaatacatattttttttttttttattctccagccccatatcatacttgggtatgcctgttggtaccataagcctaaactctccttcactgcaatgcctttgagtcagtagcaatagtaaagactagaaacaaagaaaattcagaatttggtatgtgatatgattgttcatacaatatgttataatagcaatattccaaacaatatgtccttcactgtctattgttggaaaactcatgcatcccagcatgaagtaactcctagttttaattttagttattttgagatatatttgagaattgcatctcttctcttgaatttcatttagaagagattaaccagccaaatatccaggaaagtttcaaaacattctagtgtttttcatcctttgctaggatgcactctgtacaaaacattcctctgaaaatctaatatttgcagtatctaagaattgatcatttctattttcattaaattctgtggaaaaaattaaatgaatgaaattcaacttcataattcagttcatcagcttttgtatcttgagaatctaaacacgtctttaaatctgaaagaaaccaagctggattttgcagtgcatatgtttgctagcttcccacatcctgaaccatgtcaaaatttggttttatttagttacatataatttaatgcaaagaaattctgttacttaatgttctgtttatttatgagtgcctatcaggaacactaataggaatgccattcaaccagtgtcttctgcccctctcccagctgttaaattagtacttcttcattggctttctgaaatgtcctgagtaaagtagaaaagcaacctttgtatggatgtggggatatttaatagtatgtatcttgtttcatttttttcctatgatgtattaatatttatttttctccaacccctgctccattttcttaaaatattttccagttaataactagttgctttatttcctagctgaagtgagaaaaccaacggaaaacaatacagatttgggcagaggagatagagttacatctttaaaggagtgagccagtcacccaggagaatcacatgtgtaactgatgtaggggtttaagtcttcatactttcactaaaatctgtctactaactctcccaccaacctttgcatcaaacacttaggtacctgcctgattaggggggcccctttaagggaaaaaacttttaaaaaattaaatgccttggttttgttttatcttctgggaaagaacacttttacttgattagcaagatgattatattatataacttgcccttaaaaacactccaaaatactgactccttttctccaattacaaatgagtgtgaagaaattctgttgtatgatttgaacactattaggtttgtatgtgtgtttaattggaagaattttatatagagtatctctgctgcttttgtttacctgggtaccacacaaccaaatacacattgagatttcaagaaatgatgatgaaagccagaaggccagaccacagctctgcagcctgtttcctacaaccagatataaaactctttctcgtcgccatgctgatagtcacactgaactagaactgtcccaacacattcttcctctctcataatggcttccatttaatacaggcaaagccctttaccttagcaaattctttatctttcaaaagtgaccaaaatgaggacttcaaccttggctgcacctcaataggagatgctgatcttgagttgtaatgagaaaagtgggcatataggagattttagtgactgcagtcagctgtctggcattcctttctcagtttgcatctaaaagactacatatgtcaagcttatctccacctgaatttgctgcctgctataaaaacatttcattaatatatcccattcttcctacctccatctctggtttgtcattagtggtattctgaaaagcttaagaaaaaagaatcattgagtagaaagtgaacattttaagttattttcctttttcattggcaattagttaacatgtaaaatcttttccattaaactgtataacttttaataactatatattatatatgggataaaatatatggactgaattgtgagaatataaatgcatcgaaagactctggtgtcatgaaagcacaagaataaggctggagatggtcccagatccaagatgtcccaaaagccttttgtatcagtttctctatttttggtattttgcataatgcatggatccttagttcaaatgagggacaaagtttctcagtcagccccacttcctttctttctaactcctacctttcccttgcagaggaggtagtagagattctggaattgtctatttttatgaattccattattttgtccatggcatctctaatgaaaacaggttctagaataaaggagttgattagtctgaacagtactaattaactacaaaataaacgttagtgatcagcctcttcctctataaacaatgaccaattagacgtttccgtaattccatgtattatgtatagtacactctataaatgtaaatgtaatgcttgtctaaaaagtgcaatttattgtacattgtcccaacaaatgtttacttttataatcgttatgaacttgaattggattagtatcttgtttttatgtgtgaatgaagccttgtgaaataaacaaatgcaactgagaaggtaacaaggtgactgtttttgtgagccagtgatgttttcaatgctttgtgttgcccctttggccccattaagcagtaataaacatttgttctgaagtccaaaaaaaaat

SEQ ID NO: 326761 - DNA, 3043 bp, Homo sapiens
  misc_feature (2)..(2): n is a, c, g, or t
  misc_feature (71)..(71): n is a, c, g, or t
anattcggaacgagggagttttgctcatgcagtggcacaatctcagctcactgcaatctctgcctcctggnggaagaatcacttgaacccaggaggcagaggttgcagtgggccaagattacggcattacattccatccagcctgggcgacaagagcaaaattccgtctcgaaaaatcaccaggtacatacctctcaagtttgataagtccatcttttgagttttcttttagctctttcaaaagattacgagggcaatacatattttttttttttttattctccagccccatatcatacttgggtatgcctgttggtaccataagcctaaactctccttcactgcaatgcctttgagtcagtagcaatagtaaagactagaaacaaagaaaattcagaatttggtatgtgatatgattgttcatacaatatgttataatagcaatattccaaacaatatgtccttcactgtctattgttggaaaactcatgcatcccagcatgaagtaactcctagttttaattttagttattttgagatatatttgagaattgcatctcttctcttgaatttcatttagaagagattaaccagccaaatatccaggaaagtttcaaaacattctagtgtttttcatcctttgctaggatgcactctgtacaaaacattcctctgaaaatctaatatttgcagtatctaagaattgatcatttctattttcattaaattctgtggaaaaaattaaatgaatgaaattcaacttcataattcagttcatcagcttttgtatcttgagaatctaaacacgtctttaaatctgaaagaaaccaagctggattttgcagtgcatatgtttgctagcttcccacatcctgaaccatgtcaaaatttggttttatttagttacatataatttaatgcaaagaaattctgttacttaatgttctgtttatttatgagtgcctatcaggaacactaataggaatgccattcaaccagtgtcttctgcccctctcccagctgttaaattagtacttcttcattggctttctgaaatgtcctgagtaaagtagaaaagcaacctttgtatggatgtggggatatttaatagtatgtatcttgtttcatttttttcctatgatgtattaatatttatttttctccaacccctgctccattttcttaaaatattttccagttaataactagttgctttatttcctagctgaagtgagaaaaccaacggaaaacaatacagatttgggcagaggagatagagttacatctttaaaggagtgagccagtcacccaggagaatcacatgtgtaactgatgtaggggtttaagtcttcatactttcactaaaatctgtctactaactctcccaccaacctttgcatcaaacacttaggtacctgcctgattaggggggcccctttaagggaaaaaacttttaaaaaattaaatgccttggttttgttttatcttctgggaaagaacacttttacttgattagcaagatgattatattatataacttgcccttaaaaacactccaaaatactgactccttttctccaattacaaatgagtgtgaagaaattctgttgtatgatttgaacactattaggtttgtatgtgtgtttaattggaagaattttatatagagtatctctgctgcttttgtttacctgggtaccacacaaccaaatacacattgagatttcaagaaatgatgatgaaagccagaaggccagaccacagctctgcagcctgtttcctacaaccagatataaaactctttctcgtcgccatgctgatagtcacactgaactagaactgtcccaacacattcttcctctctcataatggcttccatttaatacaggcaaagccctttaccttagcaaattctttatctttcaaaagtgaccaaaatgaggacttcaaccttggctgcacctcaataggagatgctgatcttgagttgtaatgagaaaagtgggcatataggagattttagtgactgcagtcagctgtctggcattcctttctcagtttgcatctaaaagactacatatgtcaagcttatctccacctgaatttgctgcctgctataaaaacatttcattaatatatcccattcttcctacctccatctctggtttgtcattagtggtattctgaaaagcttaagaaaaaagaatcattgagtagaaagtgaacattttaagttattttcctttttcattggcaattagttaacatgtaaaatcttttccattaaactgtataacttttaataactatatattatatatgggataaaatatatggactgaattgtgagaatataaatgcatcgaaagactctggtgtcatgaaagcacaagaataaggctggagatggtcccagatccaagatgtcccaaaagccttttgtatcagtttctctatttttggtattttgcataatgcatggatccttagttcaaatgagggacaaagtttctcagtcagccccacttcctttctttctaactcctacctttcccttgcagaggaggtagtagagattctggaattgtctatttttatgaattccattattttgtccatggcatctctaatgaaaacaggttctagaataaaggagttgattagtctgaacagtactaattaactacaaaataaacgttagtgatcagcctcttcctctataaacaatgaccaattagacgtttccgtaattccatgtattatgtatagtacactctataaatgtaaatgtaatgcttgtctaaaaagtgcaatttattgtacattgtcccaacaaatgtttacttttataatcgttatgaacttgaattggattagtatcttgtttttatgtgtgaatgaagccttgtgaaataaacaaatgcaactgagaaggtaacaaggtgactgtttttgtgagccagtgatgttttcaatgctttgtgttgcccctttggccccattaagcagtaataaacatttgttctgaagtccaaaaaaaaat

SEQ ID NO: 326762 - DNA, 5434 bp, Homo sapiens
agaggggcctggacgagcgcgcttccgacccgccgccaccgcctcctcccctccttctcggcccgccccctccctcgcctcttcctgccaggcggcccttctcccctcccctctcagttccctccgccctcctcgggctccagcggtggcggagcgaacgggaccggcccggcttcagagcgcgaggtggagggtggaacgcgggcgcctgaaggagttgttgtctcggcagcgcccgcggagacgtgaagaggtggttgtgggaagagaagtttgcagaactgaaatggaggtcagagcttcattacagaaggttagtggatcatctgattctgtggctacaatgaacagtgaagaatttgttttggttcctcagtatgcagatgataattctacaaaacatgaagaaaaacctcaactgaagatagtttctaatggtgatgaacaattggaaaaagccatggaagagattttgagagattccgagaaaaggccaagcagtcttcttgttgattgtcaaagttccagtgagatttcagaccattcgtttggagatattccagccagccaaacaaataagccatctcttcagttaattttggatccgtctaacacagaaatttctacacccagaccatcttctccaggtggactacctgaagaagatagtgttttatttaataaactgacctacttaggatgtatgaaggtttcttccccacgtaatgaagtagaggctttacgggcaatggcaaccatgaaatcttccagtcaatacccctttcctgttaccctgtatgtaccaaatgttccagaaggttctgtgagaattatagaccaatccagcaatgtggagatagcatcttttccaatctataaggtgttattctgtgcacgtggacatgacggaacaacagagagcaattgctttgcatttacagagagttcccatggttcggaagaatttcagatacatgttttctcctgtgaaattaaagaggcagtaagcagaattttgtacagtttctgtacagcattcaaacgttcttccagacaagtgtctgatgttaaagactcagttattcctacccccgacagtgatgtgtttaccttcagtgtctccttggaggtaaaagaagacgatggaaaaggaaactttagattattggtaattcctattccttttgaatatttcagccctgtgcctaaggatagagataaattttatttcaaattaaagcaaggaatagagaagaaggttgtgattacagtgcagcaactttctaacaaagaattagctattgaaagatgttttggaatgttattaagcccaggtcgaaacgtgaagaacagtgacatgcatttactggatatggaatccatgggaaagagctatgatgggagagcttatgtcatcactggcatgtggaaccccaatgcaccagtatttctggcacttaacgaggaaaccccaaaagataagcaagtatacatgactgtggcagtggatatggtagtcacagaggtggtggagcctgttcgctttctcctggagacagtagtccgtgtgtaccctgcaaatgagcgattttggtatttcagcagaaagactttcacagagactttcttcatgagattgaaacagtctgagggaaaaggccataccaatgctggagatgcaatatatgaggtggtgagtctacagcgagagtctgacaaggaggaaccagtcactcctactagtggagggggtccaatgtcaccccaggatgatgaagcagaagaggagagtgataatgaactctcaagtggaacaggtgatgtgtctaaggattgtcctgagaagatcctgtattcttggggagagttgctaggaaaatggcacagtaaccttggtgcacgaccgaaagggctgtctactctggtgaagagtggtgtccctgaagcattgagggcagaggtatggcagttattggcaggctgccatgacaaccaggcaatgctggatagataccgaattcttatcacaaaggactcagcccaggagagtgttattactcgagatattcatcgtacatttcccgcacatgattactttaaagatactggaggagatggtcaagaatcgctctataagatctgcaaggcctactctgtgtatgatgaagacattgggtactgtcaagggcagtcttttcttgctgctgtattactgctgcatatgccagaggaacaagcattctgtgttttggtgaaaatcatgtacgactatggtttgagagacctctacagaaacaacttcgaagatcttcattgcaaattctaccagttggagagactaatgcaggaacagctaccggacctgcatagccatttttctgatctgaacctggaagctcatatgtatgcatcccagtggtttctcactctttttactgccaagttcccactctgcatggtgttccacatcattgacttactgctttgtgagggtttgaacataatctttcatgtagctttggctctcctaaagacctcaaaggaagaccttctgcaggctgattttgaaggtgctttaaagttctttagagttcagcttccaaagagatacagggcagaggaaaatgcaagaagactgatggagcaggcttgcaatattaaagtaccaaccaagaagctgaagaaatatgagaaagaatatcagacaatgcgagagagtcagctgcaacaggaagacccaatggatagatacaagagggagaaccgaagattacaggaggccagcatgaggttggaacaagagaatgatgaccttgcccatgaactagtaacaagcaaaattgctctacggaatgacttggatcaggcagaagacaaggcagatgtgttgaataaagagctccttttgaccaaacagaggctggtggagactgaagaggagaagaggaagcaagaggaagagactgcccagctaaaagaagtcttcaggaaacagctagagaaggcagaatatgaaataaagaagactacagctatcattgctgagtataaacagatctgttcgcagttgagtaccaggctggagaaacagcaagcagccagcaaggaggagctggaagtggtaaagggtaagatgatggcatgcaaacactgcagtgacattttcagcaaggagggtgctttgaaactagcagccacaggcagagaggaccagggaattgaaacagatgatgagaaggactcacttaagaagcagctgagagagatggaactggaactggcacaaaccaaactgcagttggtggaggccaagtgtaaaattcaggaacttgaacatcagagaggagcccttatgaatgaaatccaagctgcgaaaaactcttggtttagcaaaaccctgaactctatcaaaacggccacgggcacccagccattgcagccagcaccggtcacccagccacccaaggagagcacatagttccagccttacccaagcacaagagcacaatgttcaaaccaatggaaatctgggaggattcttcctggtgtccctttgaaggaaagtcaaggaggccagaaaacaagccagaatttttcagtagctctcactctttcttgtatgacacttttcaaagggatgctatttaaactgacctgttctatgttgaatacctattttccagcttctggaaggccatgttcagatccatcatagtattacacattattttgtttgcctgatgtttagttggaaataagtaattcagaactaaatgcttttttatttagaattattcataattatttttatcttacataaaaatggagacatctgttattccaaggttgaagtgataagaagatctttgtcacaggaaaaaaaaaattgaaacctaaacatcttaagttttcaggatttattcagataaagcacactgtggggccaggcatgaccactctcaggtttcctcctgagcctgattcccagggaagtgttaatcctgtccaaaggaaagaaccaatcagcgatcattggtttactttcattttctgttcggtacatctggaaatgaagtgccaggaatagacgggctgttcagattatacgctaggtaaaaggaactgaaattttaataagtgtaggtcaggatcatttgggctgtggtattctaacagatccttttaagaatgccacataggacttgtgagttcctaagtacaccaaagtatggacacagatgtgacttctggcaattataaagttaaaggtggatattgcaccttacagacttagggagcctttaccagagacgcctaaaaagccccaggttcagccattgtgctgaatagagtggaatatagaaccagggacagagtatttcatttaacgttgatatatacttgctaaggaaacactaacaatactgtaactttgttaaaggacatagtattgaaatgggaaatagaggtcaggctcacatcatcttagtttaatgctgggcaactttttctgatttctgtagttccctgaaaatgtgtccttcgtacccataaagagatacaaatgcatttgtaacatttttgattgaatataaaacctttacagaaatacttatctcatggaaaggtaaagctattgtttaaaaattagtggaaatattttttcaattatatttaacatgcctataaaaatagtccttgcaggaaattatttgataagagcaaaactatttttattttataaactattttggaggcctctgatcctttcaaaccaaccaaactactattagatatgtacaataacatttgttgatattaatcattggcctcattgttgaacatattatttgcaaagaatcttaaactctgtagtgccagaatgattctcatctgtgccatattttgcaattaaaagtaacacacccttagaagaatcaaataagagccatctacatcccaggaggatgcaccaagttgctcacagtggatcttttcctctaaaatgatcttttatgttctaaaaagtgaaatcccctttatctgtgtttatattctctacagcccataaaactgatgtgattgttatgttatactcatcagataatacttttcttacataaatctttcattgttgttctgacatctttcattacaaaatttattttcttaacaaaaaggaacataacccagcattccaagtgtctgtgttggctttaacattctctacatggtggtctagataagctaatttttttttttttttttttgtaaaatgtaatagctagaaaatgttatcttggcgcttgtttttgtaaatcatttagtataggctgttagctttactggtactttacgctttgattccaagaagccttgtgcagttgccttatcaaatggccagctaaattaaagatgctcttttgtgttgtga

SEQ ID NO: 326763 - DNA, 1507 bp, Homo sapiens
  misc_feature (26)..(26): n is a, c, g, or t
  misc_feature (32)..(32): n is a, c, g, or t
ttagagcataaactattacagcatanactatnaagcataaactattacgcataaactgtgaagaaattctgttgtatgatttgaacactattaggtttgtatgtgtgtttaattggaagaattttatatagagtatctctgctgcttttgtttacctgggtaccacacaaccaaatacacattgagatttcaagaaatgatgatgaaagccagaaggccagaccacagctctgcagcctgtttcctacaaccagatataaaactctttctcgtcgccatgctgatagtcacactgaactagaactgtcccaacacattcttcctctctcataatggcttccatttaatacaggcaaagccctttaccttagcaaattctttatctttcaaaagtgaccaaaatgaggacttcaaccttggctgcacctcaataggagatgctgatcttgagttgtaatgagaaaagtgggcatataggagattttagtgactgcagtcagctgtctggcattcctttctcagtttgcatctaaaagactacatatgtcaagcttatctccacctgaatttgctgcctgctataaaaacatttcattaatatatcccattcttcctacctccatctctggtttgtcattagtggtattctgaaaagcttaagaaaaaagaatcattgagtagaaagtgaacattttaagttattttcctttttcattggcaattagttaacatgtaaaatcttttccattaaactgtataacttttaataactatatattatatatgggataaaatatatggactgaattgtgagaatataaatgcatcgaaagactctggtgtcatgaaagcacaagaataaggctggagatggtcccagatccaagatgtcccaaaagccttttgtatcagtttctctatttttggtattttgcataatgcatggatccttagttcaaatgagggacaaagtttctcagtcagccccacttcctttctttctaactcctacctttcccttgcagaggaggtagtagagattctggaattgtctatttttatgaattccattattttgtccatggcatctctaatgaaaacaggttctagaataaaggagttgattagtctgaacagtactaattaactacaaaataaacgttagtgatcagcctcttcctctataaacaatgaccaattagacgtttccgtaattccatgtattatgtatagtacactctataaatgtaaatgtaatgcttgtctaaaaagtgcaatttattgtacattgtcccaacaaatgtttacttttataatcgttatgaacttgaattggattagtatcttgtttttatgtgtgaatgaagccttgtgaaataaacaaatgcaactgagaaggtaacaaggtgactgtttttgtgagccagtgatgttttcaatgctttgtgttgcccctttggccccattaagcagtaataaacatttgttctgaagtccaaaaaaaaat

SEQ ID NO: 326764 - DNA, 3118 bp, Homo sapiens
agaggggcctggacgagcgcgcttccgacccgccgccaccgcctcctcccctccttctcggcccgccccctccctcgcctcttcctgccaggcggcccttctcccctcccctctcagttccctccgccctcctcgggctccagcggtggcggagcgaacgggaccggcccggcttcagagcgcgaggtggagggtggaacgcgggcgcctgaaggagttgttgtctcggcagcgcccgcggagacgtgaagaggtggttgtgggaagagaagtttgcagaactgaaatggaggtcagagcttcattacagaaggttagtggatcatctgattctgtggctacaatgaacagtgaagaatttgttttggttcctcagtatgcagatgataattctacaaaacatgaagaaaaacctcaactgaagatagtttctaatggtgatgaacaattggaaaaagccatggaagagattttgagagattccgagaaaaggccaagcagtcttcttgttgattgtcaaagttccagtgagatttcagaccattcgtttggagatattccagccagccaaacaaataagccatctcttcagttaattttggatccgtctaacacagaaatttctacacccagaccatcttctccaggtggactacctgaagaagatagtgttttatttaataaactgacctacttaggatgtatgaaggtttcttccccacgtaatgaagtagaggctttacgggcaatggcaaccatgaaatcttccagtcaatacccctttcctgttaccctgtatgtaccaaatgttccagaaggttctgtgagaattatagaccaatccagcaatgtggagatagcatcttttccaatctataaggtgttattctgtgcacgtggacatgacggaacaacagagagcaattgctttgcatttacagagagttcccatggttcggaagaatttcagatacatgttttctcctgtgaaattaaagaggcagtaagcagaattttgtacagtttctgtacagcattcaaacgttcttccagacaagtgtctgatgttaaagactcagttattcctacccccgacagtgatgtgtttaccttcagtgtctccttggaggtaaaagaagacgatggaaaaggaaactttagattattggtaattcctattccttttgaatatttcagccctgtgcctaaggatagagataaattttatttcaaattaaagcaaggaatagagaagaaggttgtgattacagtgcagcaactttctaacaaagaattagctattgaaagatgttttggaatgttattaagcccaggtcgaaacgtgaagaacagtgacatgcatttactggatatggaatccatgggaaagagctatgatgggagagcttatgtcatcactggcatgtggaaccccaatgcaccagtatttctggcacttaacgaggaaaccccaaaagataagcaagtatacatgactgtggcagtggatatggtagtcacagaggtggtggagcctgttcgctttctcctggagacagtagtccgtgtgtaccctgcaaatgagcgattttggtatttcagcagaaagactttcacagagactttcttcatgagattgaaacagtctgagggaaaaggccataccaatgctggagatgcaatatatgaggtggtgagtctacagcgagagtctgacaaggaggaaccagtcactcctactagtggagggggtccaatgtcaccccaggatgatgaagcagaagaggagagtgataatgaactctcaagtggaacaggtgatgtgtctaaggattgtcctgagaagatcctgtattcttggggagagttgctaggaaaatggcacagtaaccttggtgcacgaccgaaagggctgtctactctggtgaagagtggtgtccctgaagcattgagggcagaggtatggcagttattggcaggctgccatgacaaccaggcaatgctggatagataccgaattcttatcacaaaggactcagcccaggagagtgttattactcgagatattcatcgtacatttcccgcacatgattactttaaagatactggaggagatggtcaagaatcgctctataagatctgcaaggcctactctgtgtatgatgaagacattgggtactgtcaagggcagtcttttcttgctgctgtattactgctgcatatgccagaggaacaagcattctgtgttttggtgaaaatcatgtacgactatggtttgagagacctctacagaaacaacttcgaagatcttcattgcaaattctaccagttggagagactaatgcaggaacagctaccggacctgcatagccatttttctgatctgaacctggaagctcatatgtatgcatcccagtggtttctcactctttttactgccaagttcccactctgcatggtgttccacatcattgacttactgctttgtgagggtttgaacataatctttcatgtagctttggctctcctaaagacctcaaaggaagaccttctgcaggctgattttgaaggtgctttaaagttctttagagttcagcttccaaagagatacagggcagaggaaaatgcaagaagactgatggagcaggcttgcaatattaaagtaccaaccaagaagctgaagaaatatgagaaagaatatcagacaatgcgagagagtcagctgcaacaggaagacccaatggatagatacaagtttgtatatttgtaggtaactccagctgttgcatttatactgggaatcttcataagaagctgagagaaagagaggggaaaaagaaagtggctttctactttcaaaaatgaaacaaaaaggaaaaatggcaaagtactgttttagctgtgcatgtcatatccacaaagacttttagcaggtgaactgttccaagactgacacaaggatgtttcaaacttgcctctgtctgtagaaaatgttaaaaataccaactcacttggaaggaaaaataaaaatcacaaaggtatattgagcacaaaaaaaaaaaatccacacacacccccaccccccccctcccccctacccctgcttccccgcccgccc

SEQ ID NO: 326765 - DNA, 3880 bp, Homo sapiens
agaggggcctggacgagcgcgcttccgacccgccgccaccgcctcctcccctccttctcggcccgccccctccctcgcctcttcctgccaggcggcccttctcccctcccctctcagttccctccgccctcctcgggctccagcggtggcggagcgaacgggaccggcccggcttcagagcgcgaggtggagggtggaacgcgggcgcctgaaggagttgttgtctcggcagcgcccgcggagacgtgaagaggtggttgtgggaagagaagtttgcagaactgaaatggaggtcagagcttcattacagaaggttagtggatcatctgattctgtggctacaatgaacagtgaagaatttgttttggttcctcagtatgcagatgataattctacaaaacatgaagaaaaacctcaactgaagatagtttctaatggtgatgaacaattggaaaaagccatggaagagattttgagagattccgagaaaaggccaagcagtcttcttgttgattgtcaaagttccagtgagatttcagaccattcgtttggagatattccagccagccaaacaaataagccatctcttcagttaattttggatccgtctaacacagaaatttctacacccagaccatcttctccaggtggactacctgaagaagatagtgttttatttaataaactgacctacttaggatgtatgaaggtttcttccccacgtaatgaagtagaggctttacgggcaatggcaaccatgaaatcttccagtcaatacccctttcctgttaccctgtatgtaccaaatgttccagaaggttctgtgagaattatagaccaatccagcaatgtggagatagcatcttttccaatctataaggtgttattctgtgcacgtggacatgacggaacaacagagagcaattgctttgcatttacagagagttcccatggttcggaagaatttcagatacatgttttctcctgtgaaattaaagaggcagtaagcagaattttgtacagtttctgtacagcattcaaacgttcttccagacaagtgtctgatgttaaagactcagttattcctacccccgacagtgatgtgtttaccttcagtgtctccttggaggtaaaagaagacgatggaaaaggaaactttagattattggtaattcctattccttttgaatatttcagccctgtgcctaaggatagagataaattttatttcaaattaaagcaaggaatagagaagaaggttgtgattacagtgcagcaactttctaacaaagaattagctattgaaagatgttttggaatgttattaagcccaggtcgaaacgtgaagaacagtgacatgcatttactggatatggaatccatgggaaagagctatgatgggagagcttatgtcatcactggcatgtggaaccccaatgcaccagtatttctggcacttaacgaggaaaccccaaaagataagcaagtatacatgactgtggcagtggatatggtagtcacagaggtggtggagcctgttcgctttctcctggagacagtagtccgtgtgtaccctgcaaatgagcgattttggtatttcagcagaaagactttcacagagactttcttcatgagattgaaacagtctgagggaaaaggccataccaatgctggagatgcaatatatgaggtggtgagtctacagcgagagtctgacaaggaggaaccagtcactcctactagtggagggggtccaatgtcaccccaggatgatgaagcagaagaggagagtgataatgaactctcaagtggaacaggtgatgtgtctaaggattgtcctgagaagatcctgtattcttggggagagttgctaggaaaatggcacagtaaccttggtgcacgaccgaaagggctgtctactctggtgaagagtggtgtccctgaagcattgagggcagaggtatggcagttattggcaggctgccatgacaaccaggcaatgctggatagataccgaattcttatcacaaaggactcagcccaggagagtgttattactcgagatattcatcgtacatttcccgcacatgattactttaaagatactggaggagatggtcaagaatcgctctataagatctgcaaggcctactctgtgtatgatgaagacattgggtactgtcaagggcagtcttttcttgctgctgtattactgctgcatatgccagaggaacaagcattctgtgttttggtgaaaatcatgtacgactatggtttgagagacctctacagaaacaacttcgaagatcttcattgcaaattctaccagttggagagactaatgcaggaacagctaccggacctgcatagccatttttctgatctgaacctggaagctcatatgtatgcatcccagtggtttctcactctttttactgccaagttcccactctgcatggtgttccacatcattgacttactgctttgtgagggtttgaacataatctttcatgtagctttggctctcctaaagacctcaaaggaagaccttctgcaggctgattttgaaggtgctttaaagttctttagagttcagcttccaaagagatacagggcagaggaaaatgcaagaagactgatggagcaggcttgcaatattaaagtaccaaccaagaagctgaagaaatatgagaaagaatatcagacaatgcgagagagtcagctgcaacaggaagacccaatggatagatacaagtttgtatatttgtaggtaactccagctgttgcatttatactgggaatcttcataagaagctgagagaaagagaggggaaaaagaaagtggctttctactttcaaaaatgaaacaaaaaggaaaaatggcaaagtactgttttagctgtgcatgtcatatccacaaagacttttagcaggtgaactgttccaagactgacacaaggatgtttcaaacttgcctctgtctgtagaaaatgttaaaaataccaactcacttggaaggaaaaataaaaatcacaaaggtatattgagcacaagggagaaccgaagattacaggaggccagcatgaggttggaacaagagaatgatgaccttgcccatgaactagtaacaagcaaaattgctctacggaatgacttggatcaggcagaagacaaggcagatgtgttgaataaagagctccttttgaccaaacagaggctggtggagactgaagaggagaagaggaagcaagaggaagagactgcccagctaaaagaagtcttcaggaaacagctagagaaggcagaatatgaaataaagaagactacagctatcattgctgagtataaacagatctgttcgcagttgagtaccaggctggagaaacagcaagcagccagcaaggaggagctggaagtggtaaaggtaaggagtgaaatcgtgctgtgataaaatttatttcaaagtcacacaggcttgtaagtacctgaaagaaccccaaacaccaccattttgtattaaaggatttattaataggaattatggagactaggatacctctcttctgaccaggtgtgattgtcttccctaccaggtgaaaggttatgatgctcccataaatcatatggactgtcagaggcagctaacatgaaaggaagtaggatttgacattgtcacaagaagccccagagcttgagatgagagtggtatgaacctgagaaccctcagcagcccacatctgactgagcctgcattgatgtggcttcagtatgggactcagtaggatcatcccatcactctctttataagtaaacaccatgggcaatatagaacttagctggaaaaacatgtgttgggtaactgattcttgcactaagtttt

SEQ ID NO: 326766 - DNA, 2657 bp, Homo sapiens
agaggggcctggacgagcgcgcttccgacccgccgccaccgcctcctcccctccttctcggcccgccccctccctcgcctcttcctgccaggcggcccttctcccctcccctctcagttccctccgccctcctcgggctccagcggtggcggagcgaacgggaccggcccggcttcagagcgcgaggtggagggtggaacgcgggcgcctgaaggagttgttgtctcggcagcgcccgcggagacgtgaagaggtggttgtgggaagagaagtttgcagaactgaaatggaggtcagagcttcattacagaaggttagtggatcatctgattctgtggctacaatgaacagtgaagaatttgttttggttcctcagtatgcagatgataattctacaaaacatgaagaaaaacctcaactgaagatagtttctaatggtgatgaacaattggaaaaagccatggaagagattttgagagattccgagaaaaggccaagcagtcttcttgttgattgtcaaagttccagtgagatttcagaccattcgtttggagatattccagccagccaaacaaataagccatctcttcagttaattttggatccgtctaacacagaaatttctacacccagaccatcttctccaggtggactacctgaagaagatagtgttttatttaataaactgacctacttaggatgtatgaaggtttcttccccacgtaatgaagtagaggctttacgggcaatggcaaccatgaaatcttccagtcaatacccctttcctgttaccctgtatgtaccaaatgttccagaaggttctgtgagaattatagaccaatccagcaatgtggagatagcatcttttccaatctataaggtgttattctgtgcacgtggacatgacggaacaacagagagcaattgctttgcatttacagagagttcccatggttcggaagaatttcagatacatgttttctcctgtgaaattaaagaggcagtaagcagaattttgtacagtttctgtacagcattcaaacgttcttccagacaagtgtctgatgttaaagactcagttattcctacccccgacagtgatgtgtttaccttcagtgtctccttggaggtaaaagaagacgatggaaaaggaaactttagattattggtaattcctattccttttgaatatttcagccctgtgcctaaggatagagataaattttatttcaaattaaagcaaggaatagagaagaaggttgtgattacagtgcagcaactttctaacaaagaattagctattgaaagatgttttggaatgttattaagcccaggtcgaaacgtgaagaacagtgacatgcatttactggatatggaatccatgggaaagagctatgatgggagagcttatgtcatcactggcatgtggaaccccaatgcaccagtatttctggcacttaacgaggaaaccccaaaagataagcaagtatacatgactgtggcagtggatatggtagtcacagaggtggtggagcctgttcgctttctcctggagacagtagtccgtgtgtaccctgcaaatgagcgattttggtatttcagcagaaagactttcacagagactttcttcatgagattgaaacagtctgagggaaaaggccataccaatgctggagatgcaatatatgaggtggtgagtctacagcgagagtctgacaaggaggaaccagtcactcctactagtggagggggtccaatgtcaccccaggatgatgaagcagaagaggagagtgataatgaactctcaagtggaacaggtgatgtgtctaaggattgtcctgagaagatcctgtattcttggggagagttgctaggaaaatggcacagtaaccttggtgcacgaccgaaagggctgtctactctggtgaagagtggtgtccctgaagcattgagggcagaggtatggcagttattggcaggctgccatgacaaccaggcaatgctggatagataccgaattcttatcacaaaggactcagcccaggagagtgttattactcgagatattcatcgtacatttcccgcacatgattactttaaagatactggaggagatggtcaagaatcgctctataagatctgcaaggcctactctgtgtatgatgaagacattgggtactgtcaagggcagtcttttcttgctgctgtattactgctgcatatgccagaggaacaagcattctgtgttttggtgaaaatcatgtacgactatggtttgagagacctctacagaaacaacttcgaagatcttcattgcaaattctaccagttggagagactaatgcaggaacagctaccggacctgcatagccatttttctgatctgaacctggaagctcatatgtatgcatcccagtggtttctcactctttttactgccaagttcccactctgcatggtgttccacatcattgacttactgctttgtgagggtttgaacataatctttcatgtagctttggctctcctaaagacctcaaaggaagaccttctgcaggctgattttgaaggtgctttaaagttctttagagttcagcttccaaagagatacagggcagaggtcgacgcggccgcgaatttagtagtagtagtcgacc

SEQ ID NO: 326767 - DNA, 2197 bp, Homo sapiens
agaggggcctggacgagcgcgcttccgacccgccgccaccgcctcctcccctccttctcggcccgccccctccctcgcctcttcctgccaggcggcccttctcccctcccctctcagttccctccgccctcctcgggctccagcggtggcggagcgaacgggaccggcccggcttcagagcgcgaggtggagggtggaacgcgggcgcctgaaggagttgttgtctcggcagcgcccgcggagacgtgaagaggtggttgtgggaagagaagtttgcagaactgaaatggaggtcagagcttcattacagaaggttagtggatcatctgattctgtggctacaatgaacagtgaagaatttgttttggttcctcagtatgcagatgataattctacaaaacatgaagaaaaacctcaactgaagatagtttctaatggtgatgaacaattggaaaaagccatggaagagattttgagagattccgagaaaaggccaagcagtcttcttgttgattgtcaaagttccagtgagatttcagaccattcgtttggagatattccagccagccaaacaaataagccatctcttcagttaattttggatccgtctaacacagaaatttctacacccagaccatcttctccaggtggactacctgaagaagatagtgttttatttaataaactgacctacttaggatgtatgaaggtttcttccccacgtaatgaagtagaggctttacgggcaatggcaaccatgaaatcttccagtcaatacccctttcctgttaccctgtatgtaccaaatgttccagaaggttctgtgagaattatagaccaatccagcaatgtggagatagcatcttttccaatctataaggtgttattctgtgcacgtggacatgacggaacaacagagagcaattgctttgcatttacagagagttcccatggttcggaagaatttcagatacatgttttctcctgtgaaattaaagaggcagtaagcagaattttgtacagtttctgtacagcattcaaacgttcttccagacaagtgtctgatgttaaagactcagttattcctacccccgacagtgatgtgtttaccttcagtgtctccttggaggtaaaagaagacgatggaaaaggaaactttagattattggtaattcctattccttttgaatatttcagccctgtgcctaaggatagagataaattttatttcaaattaaagcaaggaatagagaagaaggttgtgattacagtgcagcaactttctaacaaagaattagctattgaaagatgttttggaatgttattaagcccaggtcgaaacgtgaagaacagtgacatgcatttactggatatggaatccatgggaaagagctatgatgggagagcttatgtcatcactggcatgtggaaccccaatgcaccagtatttctggcacttaacgaggaaaccccaaaagataagcaagtatacatgactgtggcagtggatatggtagtcacagaggtggtggagcctgttcgctttctcctggagacagtagtccgtgtgtaccctgcaaatgagcgattttggtatttcagcagaaagactttcacagagactttcttcatgagattgaaacagtctgagggaaaaggccataccaatgctggagatgcaatatatgaggtggtgagtctacagcgagagtctgacaaggaggaaccagtcactcctactagtggagggggtccaatgtcaccccaggatgatgaagcagaagaggagagtgataatgaactctcaagtggaacaggtgatgtgtctaaggattgtcctgagaagatcctgtattcttggggagagttgctaggaaaatggcacagtaaccttggtgcacgaccgaaagggctgtctactctggtgaagagtggtgtccctgaagcattgagggcagaggtatggcagttattggcaggctgccatgacaaccaggcaatgctggatagataccgaattcttatcacaaaggactcagcccaggagagtgttattactcgagatattcatcgtacatttcccgcacatgattactttaaagatactggaggagctgctacagtctcgctggagtagcggatcacgacctaatcctcaggatcagctatgatctagtgtttacgcatcgcagccgcc

SEQ ID NO: 326768 - DNA, 365 bp, Homo sapiens
agaacctcagacatgctgtagatcaaacacaacacgccattcttcattgcagctcttttgaatgcattatttaaatactatctttcaatgtttccttcagatttctaatacttaaatatactgttatatttttctcagtctgagggaaaaggccataccaatgctggagatgcaatatatgaggtggtgagtctacagcgagagtctgacaaggaggaaccagtcactcctactagtggagggggtccaatgtcaccccaggatgatgaagcagaagagggtaagaagttggacttactcagtttattctgtctgtatagctgctttacttacaatcttcagaggaggtgtgtgtgttgtgggta

SEQ ID NO: 326769 - DNA, 303 bp, Homo sapiens
cttaaagcagcagttgtggcaagttcaattccctctgttcttccttgattgatttagatgctctctgatcatgctaactgtccaggtatgttttcatttcaggagactcccaaatagccaaccataatatttcttttctttcagtttgtatatttgtaggtaactccagctgttgcatttatactgggaatcttcataagaagctgagagaaagagaggggaaaaagaaagtggctttctactttcaaaaatgaaacaaaaaggaaaaatggcaaagtactgttttagctgtgcatgtcatat

SEQ ID NO: 326770 - DNA, 254 bp, Homo sapiens
acagcaatcctgccttcctgtgccacttgcgccttctcctttttacacctttgaaagttcactttgttgcttgtttttcctcaccagttctgttcgtttctgtatgtccagacactaatgcccacctctggctattgttcttctgcagagggagaaccgaagattacaggaggccagcatgaggttggaacaagagaatgatgaccttgcccatgaactagtaacaagcaaaattgctctacggaatgacttgg

SEQ ID NO: 326771 - DNA, 6950 bp, Homo sapiens
  misc_feature (6931)..(6931): n is a, c, g, or t
  misc_feature (6933)..(6933): n is a, c, g, or t
  misc_feature (6937)..(6937): n is a, c, g, or t
  misc_feature (6939)..(6939): n is a, c, g, or t
agaggggcctggacgagcgcgcttccgacccgccgccaccgcctcctcccctccttctcggcccgccccctccctcgcctcttcctgccaggcggcccttctcccctcccctctcagttccctccgccctcctcgggctccagcggtggcggagcgaacgggaccggcccggcttcagagcgcgaggtggagggtggaacgcgggcgcctgaaggagttgttgtctcggcagcgcccgcggagacgtgaagaggtggttgtgggaagagaagtttgcagaactgaaatggaggtcagagcttcattacagaaggttagtggatcatctgattctgtggctacaatgaacagtgaagaatttgttttggttcctcagtatgcagatgataattctacaaaacatgaagaaaaacctcaactgaagatagtttctaatggtgatgaacaattggaaaaagccatggaagagattttgagagattccgagaaaaggccaagcagtcttcttgttgattgtcaaagttccagtgagatttcagaccattcgtttggagatattccagccagccaaacaaataagccatctcttcagttaattttggatccgtctaacacagaaatttctacacccagaccatcttctccaggtggactacctgaagaagatagtgttttatttaataaactgacctacttaggatgtatgaaggtttcttccccacgtaatgaagtagaggctttacgggcaatggcaaccatgaaatcttccagtcaatacccctttcctgttaccctgtatgtaccaaatgttccagaaggttctgtgagaattatagaccaatccagcaatgtggagatagcatcttttccaatctataaggtgttattctgtgcacgtggacatgacggaacaacagagagcaattgctttgcatttacagagagttcccatggttcggaagaatttcagatacatgttttctcctgtgaaattaaagaggcagtaagcagaattttgtacagtttctgtacagcattcaaacgttcttccagacaagtgtctgatgttaaagactcagttattcctacccccgacagtgatgtgtttaccttcagtgtctccttggaggtaaaagaagacgatggaaaaggaaactttagattattggtaattcctattccttttgaatatttcagccctgtgcctaaggatagagataaattttatttcaaattaaagcaaggaatagagaagaaggttgtgattacagtgcagcaactttctaacaaagaattagctattgaaagatgttttggaatgttattaagcccaggtcgaaacgtgaagaacagtgacatgcatttactggatatggaatccatgggaaagagctatgatgggagagcttatgtcatcactggcatgtggaaccccaatgcaccagtatttctggcacttaacgaggaaaccccaaaagataagcaagtatacatgactgtggcagtggatatggtagtcacagaggtggtggagcctgttcgctttctcctggagacagtagtccgtgtgtaccctgcaaatgagcgattttggtatttcagcagaaagactttcacagagactttcttcatgagattgaaacagtctgagggaaaaggccataccaatgctggagatgcaatatatgaggtggtgagtctacagcgagagtctgacaaggaggaaccagtcactcctactagtggagggggtccaatgtcaccccaggatgatgaagcagaagaggagagtgataatgaactctcaagtggaacaggtgatgtgtctaaggattgtcctgagaagatcctgtattcttggggagagttgctaggaaaatggcacagtaaccttggtgcacgaccgaaagggctgtctactctggtgaagagtggtgtccctgaagcattgagggcagaggtatggcagttattggcaggctgccatgacaaccaggcaatgctggatagataccgaattcttatcacaaaggactcagcccaggagagtgttattactcgagatattcatcgtacatttcccgcacatgattactttaaagatactggaggagatggtcaagaatcgctctataagatctgcaaggcctactctgtgtatgatgaagacattgggtactgtcaagggcagtcttttcttgctgctgtattactgctgcatatgccagaggaacaagcattctgtgttttggtgaaaatcatgtacgactatggtttgagagacctctacagaaacaacttcgaagatcttcattgcaaattctaccagttggagagactaatgcaggaacagctaccggacctgcatagccatttttctgatctgaacctggaagctcatatgtatgcatcccagtggtttctcactctttttactgccaagttcccactctgcatggtgttccacatcattgacttactgctttgtgagggtttgaacataatctttcatgtagctttggctctcctaaagacctcaaaggaagaccttctgcaggctgattttgaaggtgctttaaagttctttagagttcagcttccaaagagatacagggcagaggaaaatgcaagaagactgatggagcaggcttgcaatattaaagtaccaaccaagaagctgaagaaatatgagaaagaatatcagacaatgcgagagagtcagctgcaacaggaagacccaatggatagatacaagagggagaaccgaagattacaggaggccagcatgaggttggaacaagagaatgatgaccttgcccatgaactagtaacaagcaaaattgctctacggaatgacttggatcaggcagaagacaaggcagatgtgttgaataaagagctccttttgaccaaacagaggctggtggagactgaagaggagaagaggaagcaagaggaagagactgcccagctaaaagaagtcttcaggaaacagctagagaaggcagaatatgaaataaagaagactacagctatcattgctgagtataaacagatctgttcgcagttgagtaccaggctggagaaacagcaagcagccagcaaggaggagctggaagtggtaaagggtaagatgatggcatgcaaacactgcagtgacattttcagcaaggagggtgctttgaaactagcagccacaggcagagaggaccagggaattgaaacagatgatgagaaggactcacttaagaagcagctgagagagatggaactggaactggcacaaaccaaactgcagttggtggaggccaagtgtaaaattcaggaacttgaacatcagagaggagcccttatgaatgaaatccaagctgcgaaaaactcttggtttagcaaaaccctgaactctatcaaaacggccacgggcacccagccattgcagccagcaccggtcacccagccacccaaggagagcacatagttccagccttacccaagcacaagagcacaatgttcaaaccaatggaaatctgggaggattcttcctggtgtccctttgaaggaaagtcaaggaggccagaaaacaagccagaatttttcagtagctctcactctttcttgtatgacacttttcaaagggatgctatttaaactgacctgttctatgttgaatacctattttccagcttctggaaggccatgttcagatccatcatagtattacacattattttgtttgcctgatgtttagttggaaataagtaattcagaactaaatgcttttttatttagaattattcataattatttttatcttacataaaaatggagacatctgttattccaaggttgaagtgataagaagatctttgtcacaggaaaaaaaaaattgaaacctaaacatcttaagttttcaggatttattcagataaagcacactgtggggccaggcatgaccactctcaggtttcctcctgagcctgattcccagggaagtgttaatcctgtccaaaggaaagaaccaatcagcgatcattggtttactttcattttctgttcggtacatctggaaatgaagtgccaggaatagacgggctgttcagattatacgctaggtaaaaggaactgaaattttaataagtgtaggtcaggatcatttgggctgtggtattctaacagatccttttaagaatgccacataggacttgtgagttcctaagtacaccaaagtatggacacagatgtgacttctggcaattataaagttaaaggtggatattgcaccttacagacttagggagcctttaccagagacgcctaaaaagccccaggttcagccattgtgctgaatagagtggaatatagaaccagggacagagtatttcatttaacgttgatatatacttgctaaggaaacactaacaatactgtaactttgttaaaggacatagtattgaaatgggaaatagaggtcaggctcacatcatcttagtttaatgctgggcaactttttctgatttctgtagttccctgaaaatgtgtccttcgtacccataaagagatacaaatgcatttgtaacatttttgattgaatataaaacctttacagaaatacttatctcatggaaaggtaaagctattgtttaaaaattagtggaaatattttttcaattatatttaacatgcctataaaaatagtccttgcaggaaattatttgataagagcaaaactatttttattttataaactattttggaggcctctgatcctttcaaaccaaccaaactactattagatatgtacaataacatttgttgatattaatcattggcctcattgttgaacatattatttgcaaagaatcttaaactctgtagtgccagaatgattctcatctgtgccatattttgcaattaaaagtaacacacccttagaagaatcaaataagagccatctacatcccaggaggatgcaccaagttgctcacagtggatcttttcctctaaaatgatcttttatgttctaaaaagtgaaatcccctttatctgtgtttatattctctacagcccataaaactgatgtgattgttatgttatactcatcagataatacttttcttacataaatctttcattgttgttctgacatctttcattacaaaatttattttcttaacaaaaaggaacataacccagcattccaagtgtctgtgttggctttaacattctctacatggtggtctagataagctaatttttttttttttttttttgtaaaatgtaatagctagaaaatgttatcttggcgcttgtttttgtaaatcatttagtataggctgttagctttactggtactttacgctttgattccaagaagccttgtgcagttgccttatcaaatggccagctaaattaaagatgctcttttgtgttgtgaatttcatagttctgtacagagcttgtttcaatttacaaaaataagtacattccacagaatgcctaaagtgtgtaattttctttaaataatagtaggtgagggagaaacataatggctctaggtcaatcccttatctaaagaccttgttcaacttcatagtccctttccttttaaagaggagaagagaaaaatcccccctggccaggcatggtggctcacatctgtaatcccagcactttgggaggctgaggtgggtggatcacctaaggtcaggagtttgagaccagcctggccaacatggtgaaaccctatctctactgcaaaatacaaaaattagccgggcttggtggcgggtgcctgtaatcccagctactcgggaggttgaggcaggagaatcacttgaacccaggaggcagaggttgcagtgggccaagattacggcattacattccatccagcctgggcgacaagagcaaaattccgtctcgaaaaatcaccaggtacatacctctcaagtttgataagtccatcttttgagttttcttttagctctttcaaaagattacgagggcaatacatattttttttttttttattctccagccccatatcatacttgggtatgcctgttggtaccataagcctaaactctccttcactgcaatgcctttgagtcagtagcaatagtaaagactagaaacaaagaaaattcagaatttggtatgtgatatgattgttcatacaatatgttataatagcaatattccaaacaatatgtccttcactgtctattgttggaaaactcatgcatcccagcatgaagtaactcctagttttaattttagttattttgagatatatttgagaattgcatctcttctcttgaatttcatttagaagagattaaccagccaaatatccaggaaagtttcaaaacattctagtgtttttcatcctttgctaggatgcactctgtacaaaacattcctctgaaaatctaatatttgcagtatctaagaattgatcatttctattttcattaaattctgtggaaaaaattaaatgaatgaaattcaacttcataattcagttcatcagcttttgtatcttgagaatctaaacacgtctttaaatctgaaagaaaccaagctggattttgcagtgcatatgtttgctagcttcccacatcctgaaccatgtcaaaatttggttttatttagttacatataatttaatgcaaagaaattctgttacttaatgttctgtttatttatgagtgcctatcaggaacactaataggaatgccattcaaccagtgtcttctgcccctctcccagctgttaaattagtacttcttcattggctttctgaaatgtcctgagtaaagtagaaaagcaacctttgtatggatgtggggatatttaatagtatgtatcttgtttcatttttttcctatgatgtattaatatttatttttctccaacccctgctggtacnanctcnantctatctgtat

SEQ ID NO: 326772 - DNA, 3052 bp, Homo sapiens
agaggggcctggacgagcgcgcttccgacccgccgccaccgcctcctcccctccttctcggcccgccccctccctcgcctcttcctgccaggcggcccttctcccctcccctctcagttccctccgccctcctcgggctccagcggtggcggagcgaacgggaccggcccggcttcagagcgcgaggtggagggtggaacgcgggcgcctgaaggagttgttgtctcggcagcgcccgcggagacgtgaagaggtggttgtgggaagagaagtttgcagaactgaaatggaggtcagagcttcattacagaaggttagtggatcatctgattctgtggctacaatgaacagtgaagaatttgttttggttcctcagtatgcagatgataattctacaaaacatgaagaaaaacctcaactgaagatagtttctaatggtgatgaacaattggaaaaagccatggaagagattttgagagattccgagaaaaggccaagcagtcttcttgttgattgtcaaagttccagtgagatttcagaccattcgtttggagatattccagccagccaaacaaataagccatctcttcagttaattttggatccgtctaacacagaaatttctacacccagaccatcttctccaggtggactacctgaagaagatagtgttttatttaataaactgacctacttaggatgtatgaaggtttcttccccacgtaatgaagtagaggctttacgggcaatggcaaccatgaaatcttccagtcaatacccctttcctgttaccctgtatgtaccaaatgttccagaaggttctgtgagaattatagaccaatccagcaatgtggagatagcatcttttccaatctataaggtgttattctgtgcacgtggacatgacggaacaacagagagcaattgctttgcatttacagagagttcccatggttcggaagaatttcagatacatgttttctcctgtgaaattaaagaggcagtaagcagaattttgtacagtttctgtacagcattcaaacgttcttccagacaagtgtctgatgttaaagactcagttattcctacccccgacagtgatgtgtttaccttcagtgtctccttggaggtaaaagaagacgatggaaaaggaaactttagattattggtaattcctattccttttgaatatttcagccctgtgcctaaggatagagataaattttatttcaaattaaagcaaggaatagagaagaaggttgtgattacagtgcagcaactttctaacaaagaattagctattgaaagatgttttggaatgttattaagcccaggtcgaaacgtgaagaacagtgacatgcatttactggatatggaatccatgggaaagagctatgatgggagagcttatgtcatcactggcatgtggaaccccaatgcaccagtatttctggcacttaacgaggaaaccccaaaagataagcaagtatacatgactgtggcagtggatatggtagtcacagaggtggtggagcctgttcgctttctcctggagacagtagtccgtgtgtaccctgcaaatgagcgattttggtatttcagcagaaagactttcacagagactttcttcatgagattgaaacagtctgagggaaaaggccataccaatgctggagatgcaatatatgaggtggtgagtctacagcgagagtctgacaaggaggaaccagtcactcctactagtggagggggtccaatgtcaccccaggatgatgaagcagaagaggagagtgataatgaactctcaagtggaacaggtgatgtgtctaaggattgtcctgagaagatcctgtattcttggggagagttgctaggaaaatggcacagtaaccttggtgcacgaccgaaagggctgtctactctggtgaagagtggtgtccctgaagcattgagggcagaggtatggcagttattggcaggctgccatgacaaccaggcaatgctggatagataccgaattcttatcacaaaggactcagcccaggagagtgttattactcgagatattcatcgtacatttcccgcacatgattactttaaagatactggaggagatggtcaagaatcgctctataagatctgcaaggcctactctgtgtatgatgaagacattgggtactgtcaagggcagtcttttcttgctgctgtattactgctgcatatgccagaggaacaagcattctgtgttttggtgaaaatcatgtacgactatggtttgagagacctctacagaaacaacttcgaagatcttcattgcaaattctaccagttggagagactaatgcaggaacagctaccggacctgcatagccatttttctgatctgaacctggaagctcatatgtatgcatcccagtggtttctcactctttttactgccaagttcccactctgcatggtgttccacatcattgacttactgctttgtgagggtttgaacataatctttcatgtagctttggctctcctaaagacctcaaaggaagaccttctgcaggctgattttgaaggtgctttaaagttctttagagttcagcttccaaagagatacagggcagaggaaaatgcaagaagactgatggagcaggcttgcaatattaaagtaccaaccaagaagctgaagaaatatgagaaagaatatcagacaatgcgagagagtcagctgcaacaggaagacccaatggatagatacaagtttgtatatttgtaggtaactccagctgttgcatttatactgggaatcttcataagaagctgagagaaagagaggggaaaaagaaagtggctttctactttcaaaaatgaaacaaaaaggaaaaatggcaaagtactgttttagctgtgcatgtcatatccacaaagacttttagcaggtgaactgttccaagactgacacaaggatgtttcaaacttgcctctgtctgtagaaaatgttaaaaataccaactcacttggaaggaaaaataaaaatcacaaaggtatattgagcaca

SEQ ID NO: 326773 - DNA, 3038 bp, Homo sapiens
agaggggcctggacgagcgcgcttccgacccgccgccaccgcctcctcccctccttctcggcccgccccctccctcgcctcttcctgccaggcggcccttctcccctcccctctcagttccctccgccctcctcgggctccagcggtggcggagcgaacgggaccggcccggcttcagagcgcgaggtggagggtggaacgcgggcgcctgaaggagttgttgtctcggcagcgcccgcggagacgtgaagaggtggttgtgggaagagaagtttgcagaactgaaatggaggtcagagcttcattacagaaggttagtggatcatctgattctgtggctacaatgaacagtgaagaatttgttttggttcctcagtatgcagatgataattctacaaaacatgaagaaaaacctcaactgaagatagtttctaatggtgatgaacaattggaaaaagccatggaagagattttgagagattccgagaaaaggccaagcagtcttcttgttgattgtcaaagttccagtgagatttcagaccattcgtttggagatattccagccagccaaacaaataagccatctcttcagttaattttggatccgtctaacacagaaatttctacacccagaccatcttctccaggtggactacctgaagaagatagtgttttatttaataaactgacctacttaggatgtatgaaggtttcttccccacgtaatgaagtagaggctttacgggcaatggcaaccatgaaatcttccagtcaatacccctttcctgttaccctgtatgtaccaaatgttccagaaggttctgtgagaattatagaccaatccagcaatgtggagatagcatcttttccaatctataaggtgttattctgtgcacgtggacatgacggaacaacagagagcaattgctttgcatttacagagagttcccatggttcggaagaatttcagatacatgttttctcctgtgaaattaaagaggcagtaagcagaattttgtacagtttctgtacagcattcaaacgttcttccagacaagtgtctgatgttaaagactcagttattcctacccccgacagtgatgtgtttaccttcagtgtctccttggaggtaaaagaagacgatggaaaaggaaactttagattattggtaattcctattccttttgaatatttcagccctgtgcctaaggatagagataaattttatttcaaattaaagcaaggaatagagaagaaggttgtgattacagtgcagcaactttctaacaaagaattagctattgaaagatgttttggaatgttattaagcccaggtcgaaacgtgaagaacagtgacatgcatttactggatatggaatccatgggaaagagctatgatgggagagcttatgtcatcactggcatgtggaaccccaatgcaccagtatttctggcacttaacgaggaaaccccaaaagataagcaagtatacatgactgtggcagtggatatggtagtcacagaggtggtggagcctgttcgctttctcctggagacagtagtccgtgtgtaccctgcaaatgagcgattttggtatttcagcagaaagactttcacagagactttcttcatgagattgaaacagtctgagggaaaaggccataccaatgctggagatgcaatatatgaggtggtgagtctacagcgagagtctgacaaggaggaaccagtcactcctactagtggagggggtccaatgtcaccccaggatgatgaagcagaagaggagagtgataatgaactctcaagtggaacaggtgatgtgtctaaggattgtcctgagaagatcctgtattcttggggagagttgctaggaaaatggcacagtaaccttggtgcacgaccgaaagggctgtctactctggtgaagagtggtgtccctgaagcattgagggcagaggtatggcagttattggcaggctgccatgacaaccaggcaatgctggatagataccgaattcttatcacaaaggactcagcccaggagagtgttattactcgagatattcatcgtacatttcccgcacatgattactttaaagatactggaggagatggtcaagaatcgctctataagatctgcaaggcctactctgtgtatgatgaagacattgggtactgtcaagggcagtcttttcttgctgctgtattactgctgcatatgccagaggaacaagcattctgtgttttggtgaaaatcatgtacgactatggtttgagagacctctacagaaacaacttcgaagatcttcattgcaaattctaccagttggagagactaatgcaggaacagctaccggacctgcatagccatttttctgatctgaacctggaagctcatatgtatgcatcccagtggtttctcactctttttactgccaagttcccactctgcatggtgttccacatcattgacttactgctttgtgagagtggtatctctgcccttcagttcactgggatggtgactttctaaagtgtctgcccgaatgttggcacccgtggcatcggaacattgtccatgggttttctggaacctagattcaaattttatcttgaagatacatgaatttctaatgtcagttaagaaaactagcaacatttgtgctacagaaaagataaataaatttattagccttcccgtcacttgtcaactgtgacttacaatcagtgtttgaaaggtcataatgttcattaatattaataagaacatcatagatattacctttcctccccttaaacctgtactctatagctgtttaaggaagttggaaaacttttcaaaacatagattgtaatcatagcatcatgatgttcggggaagtaaatggtaacatcctttaccattaaaattgcttttcagaataatctattggaaacaatattgtagtgtgcctcaggatatttattctttccactaactcatctttgtcaagaattattttacaaaggaaatttttgaataaacttttacttcc

SEQ ID NO: 326774 - DNA, 3053 bp, Homo sapiens
  misc_feature (3000)..(3000): n is a, c, g, or t
agaggggcctggacgagcgcgcttccgacccgccgccaccgcctcctcccctccttctcggcccgccccctccctcgcctcttcctgccaggcggcccttctcccctcccctctcagttccctccgccctcctcgggctccagcggtggcggagcgaacgggaccggcccggcttcagagcgcgaggtggagggtggaacgcgggcgcctgaaggagttgttgtctcggcagcgcccgcggagacgtgaagaggtggttgtgggaagagaagtttgcagaactgaaatggaggtcagagcttcattacagaaggttagtggatcatctgattctgtggctacaatgaacagtgaagaatttgttttggttcctcagtatgcagatgataattctacaaaacatgaagaaaaacctcaactgaagatagtttctaatggtgatgaacaattggaaaaagccatggaagagattttgagagattccgagaaaaggccaagcagtcttcttgttgattgtcaaagttccagtgagatttcagaccattcgtttggagatattccagccagccaaacaaataagccatctcttcagttaattttggatccgtctaacacagaaatttctacacccagaccatcttctccaggtggactacctgaagaagatagtgttttatttaataaactgacctacttaggatgtatgaaggtttcttccccacgtaatgaagtagaggctttacgggcaatggcaaccatgaaatcttccagtcaatacccctttcctgttaccctgtatgtaccaaatgttccagaaggttctgtgagaattatagaccaatccagcaatgtggagatagcatcttttccaatctataaggtgttattctgtgcacgtggacatgacggaacaacagagagcaattgctttgcatttacagagagttcccatggttcggaagaatttcagatacatgttttctcctgtgaaattaaagaggcagtaagcagaattttgtacagtttctgtacagcattcaaacgttcttccagacaagtgtctgatgttaaagactcagttattcctacccccgacagtgatgtgtttaccttcagtgtctccttggaggtaaaagaagacgatggaaaaggaaactttagccctgtgcctaaggatagagataaattttatttcaaattaaagcaaggaatagagaagaaggttgtgattacagtgcagcaactttctaacaaagaattagctattgaaagatgttttggaatgttattaagcccaggtcgaaacgtgaagaacagtgacatgcatttactggatatggaatccatgggaaagagctatgatgggagagcttatgtcatcactggcatgtggaaccccaatgcaccagtatttctggcacttaacgaggaaaccccaaaagataagcaagtatacatgactgtggcagtggatatggtagtcacagaggtggtggagcctgttcgctttctcctggagacagtagtccgtgtgtaccctgcaaatgagcgattttggtatttcagcagaaagactttcacagagactttcttcatgagattgaaacagtctgagggaaaaggccataccaatgctggagatgcaatatatgaggtggtgagtctacagcgagagtctgacaaggaggaaccagtcactcctactagtggagggggtccaatgtcaccccaggatgatgaagcagaagaggagagtgataatgaactctcaagtggaacaggtgatgtgtctaaggattgtcctgagaagatcctgtattcttggggagagttgctaggaaaatggcacagtaaccttggtgcacgaccgaaagggctgtctactctggtgaagagtggtgtccctgaagcattgagggcagaggtatggcagttattggcaggctgccatgacaaccaggcaatgctggatagataccgaattcttatcacaaaggtctgttggagtttgctggaggtccactccagaccctgtttgcctgggtatcaccagtggaagctgcagaacagcaaatattgcagaatggcaaatgttgctgcctgatccttcctctggaagcttcatctcagaagggcacctggctgtatgaggtgtcggttggcccctcctgggaggtgtctcccaattagactactcaggtgtcagggacccacttgaggaggcagtctgtccattctcaggtcccaaactacatgctgggagaaccactactctcttcaaagctgtcagacagggacatttaagtctgcagaagtttctgctgccgtttgttcaactatgccctgcccccagtactggagtccaggaaggcaggcaggcctccttgagctttggtgggctccacccagttcagtcttcccggctgctttgtttacctactcaagcttcagcaatggcggatgcccctccctcagccttgctgacacttgcggcttgatctcagactgctgtgttagcagtgagtgaggctccgtgggtgtgggactctccgagccaggtgcgggatataatctcctggtgttccgtttgctaagaccattggaaaagcgcagtattagggtgggagggtcccgattttccaggtactatctgtcatggcttcccttggctaggaaagggaattccccaaccccttgcacttcccaggtgagcaatgccccacgctgctccttgggctgcacccactgtgtgacaagccccagtgagatgaacccggtacctctgttggaaatgcagaaatcacctgtcttctgcgtcgctcacgctgggagctgtagactggagctgttcctttttggccatcttggaacctcggttcaaacctgagttgtaatactcactcttcctgttgctgcctatgtaattttgtagaagttacctaattgcttccaagcttctgttggattttttgagaactgaatgacatagtacattttgantgcttaatgtattgctttgtgcatggtattatttaataaatattagctttggt

SEQ ID NO: 326775 - DNA, 462 bp, Homo sapiens
ctacaataccttctatttctagggtatttctagagatacttcaggaaaaaggagcacccgtcttggatagttgggttcgggctaatgattttgattgcagcacaagaaaaataattaaccttcagaaatgggcctgcatctatgacaataagcagcatctaaaaaagtcataaattgtttcagaaggtgatttagcctatggaatagtttgatgttggttatctcttttggatactttagggtaagatgatggcatgcaaacactgcagtgacattttcagcaaggagggtgctttgaaactagcagccacaggcagagaggaccagggaattgaaacagatgatgagaaggactcacttaagaagcagctgagagagatggaactggaactggcacaaaccaaactgcagttggtggaggccaagtgtaaaattcaggttggtgatttgataaaagaacaa

SEQ ID NO: 326776 - DNA, 6345 bp, Homo sapiens
agcggtaacataaatttaaatatttttaacacgaattccgaattcgggtttgactaactttttgtagctttggctctcctaaagacctcaaaggaagaccttctgcaggctgattttgaaggtgctttaaagttctttagagttcagcttccaaagagatacagggcagaggaaaatgcaagaagactgatggagcaggcttgcaatattaaagtaccaaccaagaagctgaagaaatatgagaaagaatatcagacaatgcgagagagtcagctgcaacaggaagacccaatggatagatacaagagggagaaccgaagattacaggaggccagcatgaggttggaacaagagaatgatgaccttgcccatgaactagtaacaagcaaaattgctctacggaatgacttggatcaggcagaagacaaggcagatgtgttgaataaagagctccttttgaccaaacagaggctggtggagactgaagaggagaagaggaagcaagaggaagagactgcccagctaaaagaagtcttcaggaaacagctagagaaggcagaatatgaaataaagaagactacagctatcattgctgagtataaacagatctgttcgcagttgagtaccaggctggagaaacagcaagcagccagcaaggaggagctggaagtggtaaagggtaagatgatggcatgcaaacactgcagtgacattttcagcaaggagggtgctttgaaactagcagccacaggcagagaggaccagggaattgaaacagatgatgagaaggactcacttaagaagcagctgagagagatggaactggaactggcacaaaccaaactgcagttggtggaggccaagtgtaaaattcaggaacttgaacatcagagaggagcccttatgaatgaaatccaagctgcgaaaaactcttggtttagcaaaaccctgaactctatcaaaacggccacgggcacccagccattgcagccagcaccggtcacccagccacccaaggagagcacatagttccagccttacccaagcacaagagcacaatgttcaaaccaatggaaatctgggaggattcttcctggtgtccctttgaaggaaagtcaaggaggccagaaaacaagccagaatttttcagtagctctcactctttcttgtatgacacttttcaaagggatgctatttaaactgacctgttctatgttgaatacctattttccagcttctggaaggccatgttcagatccatcatagtattacacattattttgtttgcctgatgtttagttggaaataagtaattcagaactaaatgcttttttatttagaattattcataattatttttatcttacataaaaatggagacatctgttattccaaggttgaagtgataagaagatctttgtcacaggaaaaaaaaaattgaaacctaaacatcttaagttttcaggatttattcagataaagcacactgtggggccaggcatgaccactctcaggtttcctcctgagcctgattcccagggaagtgttaatcctgtccaaaggaaagaaccaatcagcgatcattggtttactttcattttctgttcggtacatctggaaatgaagtgccaggaatagacgggctgttcagattatacgctaggtaaaaggaactgaaattttaataagtgtaggtcaggatcatttgggctgtggtattctaacagatccttttaagaatgccacataggacttgtgagttcctaagtacaccaaagtatggacacagatgtgacttctggcaattataaagttaaaggtggatattgcaccttacagacttagggagcctttaccagagacgcctaaaaagccccaggttcagccattgtgctgaatagagtggaatatagaaccagggacagagtatttcatttaacgttgatatatacttgctaaggaaacactaacaatactgtaactttgttaaaggacatagtattgaaatgggaaatagaggtcaggctcacatcatcttagtttaatgctgggcaactttttctgatttctgtagttccctgaaaatgtgtccttcgtacccataaagagatacaaatgcatttgtaacatttttgattgaatataaaacctttacagaaatacttatctcatggaaaggtaaagctattgtttaaaaattagtggaaatattttttcaattatatttaacatgcctataaaaatagtccttgcaggaaattatttgataagagcaaaactatttttattttataaactattttggaggcctctgatcctttcaaaccaaccaaactactattagatatgtacaataacatttgttgatattaatcattggcctcattgttgaacatattatttgcaaagaatcttaaactctgtagtgccagaatgattctcatctgtgccatattttgcaattaaaagtaacacacccttagaagaatcaaataagagccatctacatcccaggaggatgcaccaagttgctcacagtggatcttttcctctaaaatgatcttttatgttctaaaaagtgaaatcccctttatctgtgtttatattctctacagcccataaaactgatgtgattgttatgttatactcatcagataatacttttcttacataaatctttcattgttgttctgacatctttcattacaaaatttattttcttaacaaaaaggaacataacccagcattccaagtgtctgtgttggctttaacattctctacatggtggtctagataagctaatttttttttttttttttttgtaaaatgtaatagctagaaaatgttatcttggcgcttgtttttgtaaatcatttagtataggctgttagctttactggtactttacgctttgattccaagaagccttgtgcagttgccttatcaaatggccagctaaattaaagatgctcttttgtgttgtgaatttcatagttctgtacagagcttgtttcaatttacaaaaataagtacattccacagaatgcctaaagtgtgtaattttctttaaataatagtaggtgagggagaaacataatggctctaggtcaatcccttatctaaagaccttgttcaacttcatagtccctttccttttaaagaggagaagagaaaaatcccccctggccaggcatggtggctcacatctgtaatcccagcactttgggaggctgaggtgggtggatcacctaaggtcaggagtttgagaccagcctggccaacatggtgaaaccctatctctactgcaaaatacaaaaattagccgggcttggtggcgggtgcctgtaatcccagctactcgggaggttgaggcaggagaatcacttgaacccaggaggcagaggttgcagtgggccaagattacggcattacattccatccagcctgggcgacaagagcaaaattccgtctcgaaaaatcaccaggtacatacctctcaagtttgataagtccatcttttgagttttcttttagctctttcaaaagattacgagggcaatacatattttttttttttttattctccagccccatatcatacttgggtatgcctgttggtaccataagcctaaactctccttcactgcaatgcctttgagtcagtagcaatagtaaagactagaaacaaagaaaattcagaatttggtatgtgatatgattgttcatacaatatgttataatagcaatattccaaacaatatgtccttcactgtctattgttggaaaactcatgcatcccagcatgaagtaactcctagttttaattttagttattttgagatatatttgagaattgcatctcttctcttgaatttcatttagaagagattaaccagccaaatatccaggaaagtttcaaaacattctagtgtttttcatcctttgctaggatgcactctgtacaaaacattcctctgaaaatctaatatttgcagtatctaagaattgatcatttctattttcattaaattctgtggaaaaaattaaatgaatgaaattcaacttcataattcagttcatcagcttttgtatcttgagaatctaaacacgtctttaaatctgaaagaaaccaagctggattttgcagtgcatatgtttgctagcttcccacatcctgaaccatgtcaaaatttggttttatttagttacatataatttaatgcaaagaaattctgttacttaatgttctgtttatttatgagtgcctatcaggaacactaataggaatgccattcaaccagtgtcttctgcccctctcccagctgttaaattagtacttcttcattggctttctgaaatgtcctgagtaaagtagaaaagcaacctttgtatggatgtggggatatttaatagtatgtatcttgtttcatttttttcctatgatgtattaatatttatttttctccaacccctgctccattttcttaaaatattttccagttaataactagttgctttatttcctagctgaagtgagaaaaccaacggaaaacaatacagatttgggcagaggagatagagttacatctttaaaggagtgagccagtcacccaggagaatcacatgtgtaactgatgtaggggtttaagtcttcatactttcactaaaatctgtctactaactctcccaccaacctttgcatcaaacacttaggtacctgcctgattaggggggcccctttaagggaaaaaacttttaaaaaattaaatgccttggttttgttttatcttctgggaaagaacacttttacttgattagcaagatgattatattatataacttgcccttaaaaacactccaaaatactgactccttttctccaattacaaatgagtgtgaagaaattctgttgtatgatttgaacactattaggtttgtatgtgtgtttaattggaagaattttatatagagtatctctgctgcttttgtttacctgggtaccacacaaccaaatacacattgagatttcaagaaatgatgatgaaagccagaaggccagaccacagctctgcagcctgtttcctacaaccagatataaaactctttctcgtcgccatgctgatagtcacactgaactagaactgtcccaacacattcttcctctctcataatggcttccatttaatacaggcaaagccctttaccttagcaaattctttatctttcaaaagtgaccaaaatgaggacttcaaccttggctgcacctcaataggagatgctgatcttgagttgtaatgagaaaagtgggcatataggagattttagtgactgcagtcagctgtctggcattcctttctcagtttgcatctaaaagactacatatgtcaagcttatctccacctgaatttgctgcctgctataaaaacatttcattaatatatcccattcttcctacctccatctctggtttgtcattagtggtattctgaaaagcttaagaaaaaagaatcattgagtagaaagtgaacattttaagttattttcctttttcattggcaattagttaacatgtaaaatcttttccattaaactgtataacttttaataactatatattatatatgggataaaatatatggactgaattgtgagaatataaatgcatcgaaagactctggtgtcatgaaagcacaagaataaggctggagatggtcccagatccaagatgtcccaaaagccttttgtatcagtttctctatttttggtattttgcataatgcatggatccttagttcaaatgagggacaaagtttctcagtcagccccacttcctttctttctaactcctacctttcccttgcagaggaggtagtagagattctggaattgtctatttttatgaattccattattttgtccatggcatctctaatgaaaacaggttctagaataaaggagttgattagtctgaacagtactaattaactacaaaataaacgttagtgatcagcctcttcctctataaacaatgaccaattagacgtttccgtaattccatgtattatgtatagtacactctataaatgtaaatgtaatgcttgtctaaaaagtgcaatttattgtacattgtcccaacaaatgtttacttttataatcgttatgaacttgaattggattagtatcttgtttttatgtgtgaatgaagccttgtgaaataaacaaatgcaactgagaaggtaacaaggtgactgtttttgtgagccagtgatgttttcaatgctttgtgttgcccctttggccccattaagcagtaataaacatttgttctgaagtccaaaaaaaaat

SEQ ID NO: 326777 - DNA, 8647 bp, Homo sapiens
agaggggcctggacgagcgcgcttccgacccgccgccaccgcctcctcccctccttctcggcccgccccctccctcgcctcttcctgccaggcggcccttctcccctcccctctcagttccctccgccctcctcgggctccagcggtggcggagcgaacgggaccggcccggcttcagagcgcgaggtggagggtggaacgcgggcgcctgaaggagttgttgtctcggcagcgcccgcggagacgtgaagaggtggttgtgggaagagaagtttgcagaactgaaatggaggtcagagcttcattacagaagatagtttctaatggtgatgaacaattggaaaaagccatggaagagattttgagagattccgagaaaaggccaagcagtcttcttgttgattgtcaaagttccagtgagatttcagaccattcgtttggagatattccagccagccaaacaaataagccatctcttcagttaattttggatccgtctaacacagaaatttctacacccagaccatcttctccaggtggactacctgaagaagatagtgttttatttaataaactgacctacttaggatgtatgaaggtttcttccccacgtaatgaagtagaggctttacgggcaatggcaaccatgaaatcttccagtcaatacccctttcctgttaccctgtatgtaccaaatgttccagaaggttctgtgagaattatagaccaatccagcaatgtggagatagcatcttttccaatctataaggtgttattctgtgcacgtggacatgacggaacaacagagagcaattgctttgcatttacagagagttcccatggttcggaagaatttcagatacatgttttctcctgtgaaattaaagaggcagtaagcagaattttgtacagtttctgtacagcattcaaacgttcttccagacaagtgtctgatgttaaagactcagttattcctacccccgacagtgatgtgtttaccttcagtgtctccttggaggtaaaagaagacgatggaaaaggaaactttagccctgtgcctaaggatagagataaattttatttcaaattaaagcaaggaatagagaagaaggttgtgattacagtgcagcaactttctaacaaagaattagctattgaaagatgttttggaatgttattaagcccaggtcgaaacgtgaagaacagtgacatgcatttactggatatggaatccatgggaaagagctatgatgggagagcttatgtcatcactggcatgtggaaccccaatgcaccagtatttctggcacttaacgaggaaaccccaaaagataagcaagtatacatgactgtggcagtggatatggtagtcacagaggtggtggagcctgttcgctttctcctggagacagtagtccgtgtgtaccctgcaaatgagcgattttggtatttcagcagaaagactttcacagagactttcttcatgagattgaaacagtctgagggaaaaggccataccaatgctggagatgcaatatatgaggtggtgagtctacagcgagagtctgacaaggaggaaccagtcactcctactagtggagggggtccaatgtcaccccaggatgatgaagcagaagaggagagtgataatgaactctcaagtggaacaggtgatgtgtctaaggattgtcctgagaagatcctgtattcttggggagagttgctaggaaaatggcacagtaaccttggtgcacgaccgaaagggctgtctactctggtgaagagtggtgtccctgaagcattgagggcagaggtatggcagttattggcaggctgccatgacaaccaggcaatgctggatagataccgaattcttatcacaaaggactcagcccaggagagtgttattactcgagatattcatcgtacatttcccgcacatgattactttaaagatactggaggagatggtcaagaatcgctctataagatctgcaaggcctactctgtgtatgatgaagacattgggtactgtcaagggcagtcttttcttgctgctgtattactgctgcatatgccagaggaacaagcattctgtgttttggtgaaaatcatgtacgactatggtttgagagacctctacagaaacaacttcgaagatcttcattgcaaattctaccagttggagagactaatgcaggaacagctaccggacctgcatagccatttttctgatctgaacctggaagctcatatgtatgcatcccagtggtttctcactctttttactgccaagttcccactctgcatggtgttccacatcattgacttactgctttgtgagggtttgaacataatctttcatgtagctttggctctcctaaagacctcaaaggaagaccttctgcaggctgattttgaaggtgctttaaagttctttagagttcagcttccaaagagatacagggcagaggaaaatgcaagaagactgatggagcaggcttgcaatattaaagtaccaaccaagaagctgaagaaatatgagaaagaatatcagacaatgcgagagagtcagctgcaacaggaagacccaatggatagatacaagagggagaaccgaagattacaggaggccagcatgaggttggaacaagagaatgatgaccttgcccatgaactagtaacaagcaaaattgctctacggaatgacttggatcaggcagaagacaaggcagatgtgttgaataaagagctccttttgaccaaacagaggctggtggagactgaagaggagaagaggaagcaagaggaagagactgcccagctaaaagaagtcttcaggaaacagctagagaaggcagaatatgaaataaagaagactacagctatcattgctgagtataaacagatctgttcgcagttgagtaccaggctggagaaacagcaagcagccagcaaggaggagctggaagtggtaaagggtaagatgatggcatgcaaacactgcagtgacattttcagcaaggagggtgctttgaaactagcagccacaggcagagaggaccagggaattgaaacagatgatgagaaggactcacttaagaagcagctgagagagatggaactggaactggcacaaaccaaactgcagttggtggaggccaagtgtaaaattcaggaacttgaacatcagagaggagcccttatgaatgaaatccaagctgcgaaaaactcttggtttagcaaaaccctgaactctatcaaaacggccacgggcacccagccattgcagccagcaccggtcacccagccacccaaggagagcacatagttccagccttacccaagcacaagagcacaatgttcaaaccaatggaaatctgggaggattcttcctggtgtccctttgaaggaaagtcaaggaggccagaaaacaagccagaatttttcagtagctctcactctttcttgtatgacacttttcaaagggatgctatttaaactgacctgttctatgttgaatacctattttccagcttctggaaggccatgttcagatccatcatagtattacacattattttgtttgcctgatgtttagttggaaataagtaattcagaactaaatgcttttttatttagaattattcataattatttttatcttacataaaaatggagacatctgttattccaaggttgaagtgataagaagatctttgtcacaggaaaaaaaaaattgaaacctaaacatcttaagttttcaggatttattcagataaagcacactgtggggccaggcatgaccactctcaggtttcctcctgagcctgattcccagggaagtgttaatcctgtccaaaggaaagaaccaatcagcgatcattggtttactttcattttctgttcggtacatctggaaatgaagtgccaggaatagacgggctgttcagattatacgctaggtaaaaggaactgaaattttaataagtgtaggtcaggatcatttgggctgtggtattctaacagatccttttaagaatgccacataggacttgtgagttcctaagtacaccaaagtatggacacagatgtgacttctggcaattataaagttaaaggtggatattgcaccttacagacttagggagcctttaccagagacgcctaaaaagccccaggttcagccattgtgctgaatagagtggaatatagaaccagggacagagtatttcatttaacgttgatatatacttgctaaggaaacactaacaatactgtaactttgttaaaggacatagtattgaaatgggaaatagaggtcaggctcacatcatcttagtttaatgctgggcaactttttctgatttctgtagttccctgaaaatgtgtccttcgtacccataaagagatacaaatgcatttgtaacatttttgattgaatataaaacctttacagaaatacttatctcatggaaaggtaaagctattgtttaaaaattagtggaaatattttttcaattatatttaacatgcctataaaaatagtccttgcaggaaattatttgataagagcaaaactatttttattttataaactattttggaggcctctgatcctttcaaaccaaccaaactactattagatatgtacaataacatttgttgatattaatcattggcctcattgttgaacatattatttgcaaagaatcttaaactctgtagtgccagaatgattctcatctgtgccatattttgcaattaaaagtaacacacccttagaagaatcaaataagagccatctacatcccaggaggatgcaccaagttgctcacagtggatcttttcctctaaaatgatcttttatgttctaaaaagtgaaatcccctttatctgtgtttatattctctacagcccataaaactgatgtgattgttatgttatactcatcagataatacttttcttacataaatctttcattgttgttctgacatctttcattacaaaatttattttcttaacaaaaaggaacataacccagcattccaagtgtctgtgttggctttaacattctctacatggtggtctagataagctaatttttttttttttttttttgtaaaatgtaatagctagaaaatgttatcttggcgcttgtttttgtaaatcatttagtataggctgttagctttactggtactttacgctttgattccaagaagccttgtgcagttgccttatcaaatggccagctaaattaaagatgctcttttgtgttgtgaatttcatagttctgtacagagcttgtttcaatttacaaaaataagtacattccacagaatgcctaaagtgtgtaattttctttaaataatagtaggtgagggagaaacataatggctctaggtcaatcccttatctaaagaccttgttcaacttcatagtccctttccttttaaagaggagaagagaaaaatcccccctggccaggcatggtggctcacatctgtaatcccagcactttgggaggctgaggtgggtggatcacctaaggtcaggagtttgagaccagcctggccaacatggtgaaaccctatctctactgcaaaatacaaaaattagccgggcttggtggcgggtgcctgtaatcccagctactcgggaggttgaggcaggagaatcacttgaacccaggaggcagaggttgcagtgggccaagattacggcattacattccatccagcctgggcgacaagagcaaaattccgtctcgaaaaatcaccaggtacatacctctcaagtttgataagtccatcttttgagttttcttttagctctttcaaaagattacgagggcaatacatattttttttttttttattctccagccccatatcatacttgggtatgcctgttggtaccataagcctaaactctccttcactgcaatgcctttgagtcagtagcaatagtaaagactagaaacaaagaaaattcagaatttggtatgtgatatgattgttcatacaatatgttataatagcaatattccaaacaatatgtccttcactgtctattgttggaaaactcatgcatcccagcatgaagtaactcctagttttaattttagttattttgagatatatttgagaattgcatctcttctcttgaatttcatttagaagagattaaccagccaaatatccaggaaagtttcaaaacattctagtgtttttcatcctttgctaggatgcactctgtacaaaacattcctctgaaaatctaatatttgcagtatctaagaattgatcatttctattttcattaaattctgtggaaaaaattaaatgaatgaaattcaacttcataattcagttcatcagcttttgtatcttgagaatctaaacacgtctttaaatctgaaagaaaccaagctggattttgcagtgcatatgtttgctagcttcccacatcctgaaccatgtcaaaatttggttttatttagttacatataatttaatgcaaagaaattctgttacttaatgttctgtttatttatgagtgcctatcaggaacactaataggaatgccattcaaccagtgtcttctgcccctctcccagctgttaaattagtacttcttcattggctttctgaaatgtcctgagtaaagtagaaaagcaacctttgtatggatgtggggatatttaatagtatgtatcttgtttcatttttttcctatgatgtattaatatttatttttctccaacccctgctccattttcttaaaatattttccagttaataactagttgctttatttcctagctgaagtgagaaaaccaacggaaaacaatacagatttgggcagaggagatagagttacatctttaaaggagtgagccagtcacccaggagaatcacatgtgtaactgatgtaggggtttaagtcttcatactttcactaaaatctgtctactaactctcccaccaacctttgcatcaaacacttaggtacctgcctgattaggggggcccctttaagggaaaaaacttttaaaaaattaaatgccttggttttgttttatcttctgggaaagaacacttttacttgattagcaagatgattatattatataacttgcccttaaaaacactccaaaatactgactccttttctccaattacaaatgagtgtgaagaaattctgttgtatgatttgaacactattaggtttgtatgtgtgtttaattggaagaattttatatagagtatctctgctgcttttgtttacctgggtaccacacaaccaaatacacattgagatttcaagaaatgatgatgaaagccagaaggccagaccacagctctgcagcctgtttcctacaaccagatataaaactctttctcgtcgccatgctgatagtcacactgaactagaactgtcccaacacattcttcctctctcataatggcttccatttaatacaggcaaagccctttaccttagcaaattctttatctttcaaaagtgaccaaaatgaggacttcaaccttggctgcacctcaataggagatgctgatcttgagttgtaatgagaaaagtgggcatataggagattttagtgactgcagtcagctgtctggcattcctttctcagtttgcatctaaaagactacatatgtcaagcttatctccacctgaatttgctgcctgctataaaaacatttcattaatatatcccattcttcctacctccatctctggtttgtcattagtggtattctgaaaagcttaagaaaaaagaatcattgagtagaaagtgaacattttaagttattttcctttttcattggcaattagttaacatgtaaaatcttttccattaaactgtataacttttaataactatatattatatatgggataaaatatatggactgaattgtgagaatataaatgcatcgaaagactctggtgtcatgaaagcacaagaataaggctggagatggtcccagatccaagatgtcccaaaagccttttgtatcagtttctctatttttggtattttgcataatgcatggatccttagttcaaatgagggacaaagtttctcagtcagccccacttcctttctttctaactcctacctttcccttgcagaggaggtagtagagattctggaattgtctatttttatgaattccattattttgtccatggcatctctaatgaaaacaggttctagaataaaggagttgattagtctgaacagtactaattaactacaaaataaacgttagtgatcagcctcttcctctataaacaatgaccaattagacgtttccgtaattccatgtattatgtatagtacactctataaatgtaaatgtaatgcttgtctaaaaagtgcaatttattgtacattgtcccaacaaatgtttacttttataatcgttatgaacttgaattggattagtatcttgtttttatgtgtgaatgaagccttgtgaaataaacaaatgcaactgagaaggtaacaaggtgactgtttttgtgagccagtgatgttttcaatgctttgtgttgcccctttggccccattaagcagtaataaacatttgttctgaagtccaaaaaaaaat

SEQ ID NO: 326778 - DNA, 7086 bp, Homo sapiens
  misc_feature (151)..(151): n is a, c, g, or t
  misc_feature (363)..(363): n is a, c, g, or t
aaaatatttttatgtgcttcttttaaaaaatacacaaatgggcacaggtggtatttatttgttcttagattagtggaataagggttagcattctgaaattcaaacaaacaaaaagaaaacctttatatacaggatcaaacatgttgatttntactttccttcccccacttccgtggcttttagcatctgaaaatggttagtaagaaaagaataattagttggtgagcctttccaaacaccaaaagacaggacccatatattatatttggttaacgctcatggacacttttagtattttttaaaaaatcaaatgaagtgatgttttgttctaaagcgtcattctcaaaatttttgtaaaaggtnacgtttctgatcattcccattcccagaaatagaagtgcagcgtagctcatgtaagttatggctcttcacctgcaaaaacaaattctgaataaattctgcatacttaacctcagcaaacaaagacctgaaagattcaaaagatgagaatcttgctcgtgccgaattcggcacgagggcacatttggctatttttcaaagagagcatgtagttcaagaaatggcttattttgttttttattcttctttttgtggtctatttaggaaaacaaaatgaaggaacagctaccggacctgcatagccatttttctgatctgaacctggaagctcatatgtatgcatcccagtggtttctcactctttttactgccaagttcccactctgcatggtgttccacatcattgacttactgctttgtgagggtttgaacataatctttcatgtagctttggctctcctaaagacctcaaaggaagaccttctgcaggctgattttgaaggtgctttaaagttctttagagttcagcttccaaagagatacagggcagaggaaaatgcaagaagactgatggagcaggcttgcaatattaaagtaccaaccaagaagctgaagaaatatgagaaagaatatcagacaatgcgagagagtcagctgcaacaggaagacccaatggatagatacaagagggagaaccgaagattacaggaggccagcatgaggttggaacaagagaatgatgaccttgcccatgaactagtaacaagcaaaattgctctacggaatgacttggatcaggcagaagacaaggcagatgtgttgaataaagagctccttttgaccaaacagaggctggtggagactgaagaggagaagaggaagcaagaggaagagactgcccagctaaaagaagtcttcaggaaacagctagagaaggcagaatatgaaataaagaagactacagctatcattgctgagtataaacagatctgttcgcagttgagtaccaggctggagaaacagcaagcagccagcaaggaggagctggaagtggtaaagggtaagatgatggcatgcaaacactgcagtgacattttcagcaaggagggtgctttgaaactagcagccacaggcagagaggaccagggaattgaaacagatgatgagaaggactcacttaagaagcagctgagagagatggaactggaactggcacaaaccaaactgcagttggtggaggccaagtgtaaaattcaggaacttgaacatcagagaggagcccttatgaatgaaatccaagctgcgaaaaactcttggtttagcaaaaccctgaactctatcaaaacggccacgggcacccagccattgcagccagcaccggtcacccagccacccaaggagagcacatagttccagccttacccaagcacaagagcacaatgttcaaaccaatggaaatctgggaggattcttcctggtgtccctttgaaggaaagtcaaggaggccagaaaacaagccagaatttttcagtagctctcactctttcttgtatgacacttttcaaagggatgctatttaaactgacctgttctatgttgaatacctattttccagcttctggaaggccatgttcagatccatcatagtattacacattattttgtttgcctgatgtttagttggaaataagtaattcagaactaaatgcttttttatttagaattattcataattatttttatcttacataaaaatggagacatctgttattccaaggttgaagtgataagaagatctttgtcacaggaaaaaaaaaattgaaacctaaacatcttaagttttcaggatttattcagataaagcacactgtggggccaggcatgaccactctcaggtttcctcctgagcctgattcccagggaagtgttaatcctgtccaaaggaaagaaccaatcagcgatcattggtttactttcattttctgttcggtacatctggaaatgaagtgccaggaatagacgggctgttcagattatacgctaggtaaaaggaactgaaattttaataagtgtaggtcaggatcatttgggctgtggtattctaacagatccttttaagaatgccacataggacttgtgagttcctaagtacaccaaagtatggacacagatgtgacttctggcaattataaagttaaaggtggatattgcaccttacagacttagggagcctttaccagagacgcctaaaaagccccaggttcagccattgtgctgaatagagtggaatatagaaccagggacagagtatttcatttaacgttgatatatacttgctaaggaaacactaacaatactgtaactttgttaaaggacatagtattgaaatgggaaatagaggtcaggctcacatcatcttagtttaatgctgggcaactttttctgatttctgtagttccctgaaaatgtgtccttcgtacccataaagagatacaaatgcatttgtaacatttttgattgaatataaaacctttacagaaatacttatctcatggaaaggtaaagctattgtttaaaaattagtggaaatattttttcaattatatttaacatgcctataaaaatagtccttgcaggaaattatttgataagagcaaaactatttttattttataaactattttggaggcctctgatcctttcaaaccaaccaaactactattagatatgtacaataacatttgttgatattaatcattggcctcattgttgaacatattatttgcaaagaatcttaaactctgtagtgccagaatgattctcatctgtgccatattttgcaattaaaagtaacacacccttagaagaatcaaataagagccatctacatcccaggaggatgcaccaagttgctcacagtggatcttttcctctaaaatgatcttttatgttctaaaaagtgaaatcccctttatctgtgtttatattctctacagcccataaaactgatgtgattgttatgttatactcatcagataatacttttcttacataaatctttcattgttgttctgacatctttcattacaaaatttattttcttaacaaaaaggaacataacccagcattccaagtgtctgtgttggctttaacattctctacatggtggtctagataagctaatttttttttttttttttttgtaaaatgtaatagctagaaaatgttatcttggcgcttgtttttgtaaatcatttagtataggctgttagctttactggtactttacgctttgattccaagaagccttgtgcagttgccttatcaaatggccagctaaattaaagatgctcttttgtgttgtgaatttcatagttctgtacagagcttgtttcaatttacaaaaataagtacattccacagaatgcctaaagtgtgtaattttctttaaataatagtaggtgagggagaaacataatggctctaggtcaatcccttatctaaagaccttgttcaacttcatagtccctttccttttaaagaggagaagagaaaaatcccccctggccaggcatggtggctcacatctgtaatcccagcactttgggaggctgaggtgggtggatcacctaaggtcaggagtttgagaccagcctggccaacatggtgaaaccctatctctactgcaaaatacaaaaattagccgggcttggtggcgggtgcctgtaatcccagctactcgggaggttgaggcaggagaatcacttgaacccaggaggcagaggttgcagtgggccaagattacggcattacattccatccagcctgggcgacaagagcaaaattccgtctcgaaaaatcaccaggtacatacctctcaagtttgataagtccatcttttgagttttcttttagctctttcaaaagattacgagggcaatacatattttttttttttttattctccagccccatatcatacttgggtatgcctgttggtaccataagcctaaactctccttcactgcaatgcctttgagtcagtagcaatagtaaagactagaaacaaagaaaattcagaatttggtatgtgatatgattgttcatacaatatgttataatagcaatattccaaacaatatgtccttcactgtctattgttggaaaactcatgcatcccagcatgaagtaactcctagttttaattttagttattttgagatatatttgagaattgcatctcttctcttgaatttcatttagaagagattaaccagccaaatatccaggaaagtttcaaaacattctagtgtttttcatcctttgctaggatgcactctgtacaaaacattcctctgaaaatctaatatttgcagtatctaagaattgatcatttctattttcattaaattctgtggaaaaaattaaatgaatgaaattcaacttcataattcagttcatcagcttttgtatcttgagaatctaaacacgtctttaaatctgaaagaaaccaagctggattttgcagtgcatatgtttgctagcttcccacatcctgaaccatgtcaaaatttggttttatttagttacatataatttaatgcaaagaaattctgttacttaatgttctgtttatttatgagtgcctatcaggaacactaataggaatgccattcaaccagtgtcttctgcccctctcccagctgttaaattagtacttcttcattggctttctgaaatgtcctgagtaaagtagaaaagcaacctttgtatggatgtggggatatttaatagtatgtatcttgtttcatttttttcctatgatgtattaatatttatttttctccaacccctgctccattttcttaaaatattttccagttaataactagttgctttatttcctagctgaagtgagaaaaccaacggaaaacaatacagatttgggcagaggagatagagttacatctttaaaggagtgagccagtcacccaggagaatcacatgtgtaactgatgtaggggtttaagtcttcatactttcactaaaatctgtctactaactctcccaccaacctttgcatcaaacacttaggtacctgcctgattaggggggcccctttaagggaaaaaacttttaaaaaattaaatgccttggttttgttttatcttctgggaaagaacacttttacttgattagcaagatgattatattatataacttgcccttaaaaacactccaaaatactgactccttttctccaattacaaatgagtgtgaagaaattctgttgtatgatttgaacactattaggtttgtatgtgtgtttaattggaagaattttatatagagtatctctgctgcttttgtttacctgggtaccacacaaccaaatacacattgagatttcaagaaatgatgatgaaagccagaaggccagaccacagctctgcagcctgtttcctacaaccagatataaaactctttctcgtcgccatgctgatagtcacactgaactagaactgtcccaacacattcttcctctctcataatggcttccatttaatacaggcaaagccctttaccttagcaaattctttatctttcaaaagtgaccaaaatgaggacttcaaccttggctgcacctcaataggagatgctgatcttgagttgtaatgagaaaagtgggcatataggagattttagtgactgcagtcagctgtctggcattcctttctcagtttgcatctaaaagactacatatgtcaagcttatctccacctgaatttgctgcctgctataaaaacatttcattaatatatcccattcttcctacctccatctctggtttgtcattagtggtattctgaaaagcttaagaaaaaagaatcattgagtagaaagtgaacattttaagttattttcctttttcattggcaattagttaacatgtaaaatcttttccattaaactgtataacttttaataactatatattatatatgggataaaatatatggactgaattgtgagaatataaatgcatcgaaagactctggtgtcatgaaagcacaagaataaggctggagatggtcccagatccaagatgtcccaaaagccttttgtatcagtttctctatttttggtattttgcataatgcatggatccttagttcaaatgagggacaaagtttctcagtcagccccacttcctttctttctaactcctacctttcccttgcagaggaggtagtagagattctggaattgtctatttttatgaattccattattttgtccatggcatctctaatgaaaacaggttctagaataaaggagttgattagtctgaacagtactaattaactacaaaataaacgttagtgatcagcctcttcctctataaacaatgaccaattagacgtttccgtaattccatgtattatgtatagtacactctataaatgtaaatgtaatgcttgtctaaaaagtgcaatttattgtacattgtcccaacaaatgtttacttttataatcgttatgaacttgaattggattagtatcttgtttttatgtgtgaatgaagccttgtgaaataaacaaatgcaactgagaaggtaacaaggtgactgtttttgtgagccagtgatgttttcaatgctttgtgttgcccctttggccccattaagcagtaataaacatttgttctgaagtccaaaaaaaaat

SEQ ID NO: 326779 - DNA, 8794 bp, Homo sapiens
agaggggcctggacgagcgcgcttccgacccgccgccaccgcctcctcccctccttctcggcccgccccctccctcgcctcttcctgccaggcggcccttctcccctcccctctcagttccctccgccctcctcgggctccagcggtggcggagcgaacgggaccggcccggcttcagagcgcgaggtggagggtggaacgcgggcgcctgaaggagttgttgtctcggcagcgcccgcggagacgtgaagaggtggttgtgggaagagaagtttgcagaactgaaatggaggtcagagcttcattacagaaggttagtggatcatctgattctgtggctacaatgaacagtgaagaatttgttttggttcctcagtatgcagatgataattctacaaaacatgaagaaaaacctcaactgaagatagtttctaatggtgatgaacaattggaaaaagccatggaagagattttgagagattccgagaaaaggccaagcagtcttcttgttgattgtcaaagttccagtgagatttcagaccattcgtttggagatattccagccagccaaacaaataagccatctcttcagttaattttggatccgtctaacacagaaatttctacacccagaccatcttctccaggtggactacctgaagaagatagtgttttatttaataaactgacctacttaggatgtatgaaggtttcttccccacgtaatgaagtagaggctttacgggcaatggcaaccatgaaatcttccagtcaatacccctttcctgttaccctgtatgtaccaaatgttccagaaggttctgtgagaattatagaccaatccagcaatgtggagatagcatcttttccaatctataaggtgttattctgtgcacgtggacatgacggaacaacagagagcaattgctttgcatttacagagagttcccatggttcggaagaatttcagatacatgttttctcctgtgaaattaaagaggcagtaagcagaattttgtacagtttctgtacagcattcaaacgttcttccagacaagtgtctgatgttaaagactcagttattcctacccccgacagtgatgtgtttaccttcagtgtctccttggaggtaaaagaagacgatggaaaaggaaactttagattattggtaattcctattccttttgaatatttcagccctgtgcctaaggatagagataaattttatttcaaattaaagcaaggaatagagaagaaggttgtgattacagtgcagcaactttctaacaaagaattagctattgaaagatgttttggaatgttattaagcccaggtcgaaacgtgaagaacagtgacatgcatttactggatatggaatccatgggaaagagctatgatgggagagcttatgtcatcactggcatgtggaaccccaatgcaccagtatttctggcacttaacgaggaaaccccaaaagataagcaagtatacatgactgtggcagtggatatggtagtcacagaggtggtggagcctgttcgctttctcctggagacagtagtccgtgtgtaccctgcaaatgagcgattttggtatttcagcagaaagactttcacagagactttcttcatgagattgaaacagtctgagggaaaaggccataccaatgctggagatgcaatatatgaggtggtgagtctacagcgagagtctgacaaggaggaaccagtcactcctactagtggagggggtccaatgtcaccccaggatgatgaagcagaagaggagagtgataatgaactctcaagtggaacaggtgatgtgtctaaggattgtcctgagaagatcctgtattcttggggagagttgctaggaaaatggcacagtaaccttggtgcacgaccgaaagggctgtctactctggtgaagagtggtgtccctgaagcattgagggcagaggtatggcagttattggcaggctgccatgacaaccaggcaatgctggatagataccgaattcttatcacaaaggactcagcccaggagagtgttattactcgagatattcatcgtacatttcccgcacatgattactttaaagatactggaggagatggtcaagaatcgctctataagatctgcaaggcctactctgtgtatgatgaagacattgggtactgtcaagggcagtcttttcttgctgctgtattactgctgcatatgccagaggaacaagcattctgtgttttggtgaaaatcatgtacgactatggtttgagagacctctacagaaacaacttcgaagatcttcattgcaaattctaccagttggagagactaatgcaggaacagctaccggacctgcatagccatttttctgatctgaacctggaagctcatatgtatgcatcccagtggtttctcactctttttactgccaagttcccactctgcatggtgttccacatcattgacttactgctttgtgagggtttgaacataatctttcatgtagctttggctctcctaaagacctcaaaggaagaccttctgcaggctgattttgaaggtgctttaaagttctttagagttcagcttccaaagagatacagggcagaggaaaatgcaagaagactgatggagcaggcttgcaatattaaagtaccaaccaagaagctgaagaaatatgagaaagaatatcagacaatgcgagagagtcagctgcaacaggaagacccaatggatagatacaagagggagaaccgaagattacaggaggccagcatgaggttggaacaagagaatgatgaccttgcccatgaactagtaacaagcaaaattgctctacggaatgacttggatcaggcagaagacaaggcagatgtgttgaataaagagctccttttgaccaaacagaggctggtggagactgaagaggagaagaggaagcaagaggaagagactgcccagctaaaagaagtcttcaggaaacagctagagaaggcagaatatgaaataaagaagactacagctatcattgctgagtataaacagatctgttcgcagttgagtaccaggctggagaaacagcaagcagccagcaaggaggagctggaagtggtaaagggtaagatgatggcatgcaaacactgcagtgacattttcagcaaggagggtgctttgaaactagcagccacaggcagagaggaccagggaattgaaacagatgatgagaaggactcacttaagaagcagctgagagagatggaactggaactggcacaaaccaaactgcagttggtggaggccaagtgtaaaattcaggaacttgaacatcagagaggagcccttatgaatgaaatccaagctgcgaaaaactcttggtttagcaaaaccctgaactctatcaaaacggccacgggcacccagccattgcagccagcaccggtcacccagccacccaaggagagcacatagttccagccttacccaagcacaagagcacaatgttcaaaccaatggaaatctgggaggattcttcctggtgtccctttgaaggaaagtcaaggaggccagaaaacaagccagaatttttcagtagctctcactctttcttgtatgacacttttcaaagggatgctatttaaactgacctgttctatgttgaatacctattttccagcttctggaaggccatgttcagatccatcatagtattacacattattttgtttgcctgatgtttagttggaaataagtaattcagaactaaatgcttttttatttagaattattcataattatttttatcttacataaaaatggagacatctgttattccaaggttgaagtgataagaagatctttgtcacaggaaaaaaaaaattgaaacctaaacatcttaagttttcaggatttattcagataaagcacactgtggggccaggcatgaccactctcaggtttcctcctgagcctgattcccagggaagtgttaatcctgtccaaaggaaagaaccaatcagcgatcattggtttactttcattttctgttcggtacatctggaaatgaagtgccaggaatagacgggctgttcagattatacgctaggtaaaaggaactgaaattttaataagtgtaggtcaggatcatttgggctgtggtattctaacagatccttttaagaatgccacataggacttgtgagttcctaagtacaccaaagtatggacacagatgtgacttctggcaattataaagttaaaggtggatattgcaccttacagacttagggagcctttaccagagacgcctaaaaagccccaggttcagccattgtgctgaatagagtggaatatagaaccagggacagagtatttcatttaacgttgatatatacttgctaaggaaacactaacaatactgtaactttgttaaaggacatagtattgaaatgggaaatagaggtcaggctcacatcatcttagtttaatgctgggcaactttttctgatttctgtagttccctgaaaatgtgtccttcgtacccataaagagatacaaatgcatttgtaacatttttgattgaatataaaacctttacagaaatacttatctcatggaaaggtaaagctattgtttaaaaattagtggaaatattttttcaattatatttaacatgcctataaaaatagtccttgcaggaaattatttgataagagcaaaactatttttattttataaactattttggaggcctctgatcctttcaaaccaaccaaactactattagatatgtacaataacatttgttgatattaatcattggcctcattgttgaacatattatttgcaaagaatcttaaactctgtagtgccagaatgattctcatctgtgccatattttgcaattaaaagtaacacacccttagaagaatcaaataagagccatctacatcccaggaggatgcaccaagttgctcacagtggatcttttcctctaaaatgatcttttatgttctaaaaagtgaaatcccctttatctgtgtttatattctctacagcccataaaactgatgtgattgttatgttatactcatcagataatacttttcttacataaatctttcattgttgttctgacatctttcattacaaaatttattttcttaacaaaaaggaacataacccagcattccaagtgtctgtgttggctttaacattctctacatggtggtctagataagctaatttttttttttttttttttgtaaaatgtaatagctagaaaatgttatcttggcgcttgtttttgtaaatcatttagtataggctgttagctttactggtactttacgctttgattccaagaagccttgtgcagttgccttatcaaatggccagctaaattaaagatgctcttttgtgttgtgaatttcatagttctgtacagagcttgtttcaatttacaaaaataagtacattccacagaatgcctaaagtgtgtaattttctttaaataatagtaggtgagggagaaacataatggctctaggtcaatcccttatctaaagaccttgttcaacttcatagtccctttccttttaaagaggagaagagaaaaatcccccctggccaggcatggtggctcacatctgtaatcccagcactttgggaggctgaggtgggtggatcacctaaggtcaggagtttgagaccagcctggccaacatggtgaaaccctatctctactgcaaaatacaaaaattagccgggcttggtggcgggtgcctgtaatcccagctactcgggaggttgaggcaggagaatcacttgaacccaggaggcagaggttgcagtgggccaagattacggcattacattccatccagcctgggcgacaagagcaaaattccgtctcgaaaaatcaccaggtacatacctctcaagtttgataagtccatcttttgagttttcttttagctctttcaaaagattacgagggcaatacatattttttttttttttattctccagccccatatcatacttgggtatgcctgttggtaccataagcctaaactctccttcactgcaatgcctttgagtcagtagcaatagtaaagactagaaacaaagaaaattcagaatttggtatgtgatatgattgttcatacaatatgttataatagcaatattccaaacaatatgtccttcactgtctattgttggaaaactcatgcatcccagcatgaagtaactcctagttttaattttagttattttgagatatatttgagaattgcatctcttctcttgaatttcatttagaagagattaaccagccaaatatccaggaaagtttcaaaacattctagtgtttttcatcctttgctaggatgcactctgtacaaaacattcctctgaaaatctaatatttgcagtatctaagaattgatcatttctattttcattaaattctgtggaaaaaattaaatgaatgaaattcaacttcataattcagttcatcagcttttgtatcttgagaatctaaacacgtctttaaatctgaaagaaaccaagctggattttgcagtgcatatgtttgctagcttcccacatcctgaaccatgtcaaaatttggttttatttagttacatataatttaatgcaaagaaattctgttacttaatgttctgtttatttatgagtgcctatcaggaacactaataggaatgccattcaaccagtgtcttctgcccctctcccagctgttaaattagtacttcttcattggctttctgaaatgtcctgagtaaagtagaaaagcaacctttgtatggatgtggggatatttaatagtatgtatcttgtttcatttttttcctatgatgtattaatatttatttttctccaacccctgctccattttcttaaaatattttccagttaataactagttgctttatttcctagctgaagtgagaaaaccaacggaaaacaatacagatttgggcagaggagatagagttacatctttaaaggagtgagccagtcacccaggagaatcacatgtgtaactgatgtaggggtttaagtcttcatactttcactaaaatctgtctactaactctcccaccaacctttgcatcaaacacttaggtacctgcctgattaggggggcccctttaagggaaaaaacttttaaaaaattaaatgccttggttttgttttatcttctgggaaagaacacttttacttgattagcaagatgattatattatataacttgcccttaaaaacactccaaaatactgactccttttctccaattacaaatgagtgtgaagaaattctgttgtatgatttgaacactattaggtttgtatgtgtgtttaattggaagaattttatatagagtatctctgctgcttttgtttacctgggtaccacacaaccaaatacacattgagatttcaagaaatgatgatgaaagccagaaggccagaccacagctctgcagcctgtttcctacaaccagatataaaactctttctcgtcgccatgctgatagtcacactgaactagaactgtcccaacacattcttcctctctcataatggcttccatttaatacaggcaaagccctttaccttagcaaattctttatctttcaaaagtgaccaaaatgaggacttcaaccttggctgcacctcaataggagatgctgatcttgagttgtaatgagaaaagtgggcatataggagattttagtgactgcagtcagctgtctggcattcctttctcagtttgcatctaaaagactacatatgtcaagcttatctccacctgaatttgctgcctgctataaaaacatttcattaatatatcccattcttcctacctccatctctggtttgtcattagtggtattctgaaaagcttaagaaaaaagaatcattgagtagaaagtgaacattttaagttattttcctttttcattggcaattagttaacatgtaaaatcttttccattaaactgtataacttttaataactatatattatatatgggataaaatatatggactgaattgtgagaatataaatgcatcgaaagactctggtgtcatgaaagcacaagaataaggctggagatggtcccagatccaagatgtcccaaaagccttttgtatcagtttctctatttttggtattttgcataatgcatggatccttagttcaaatgagggacaaagtttctcagtcagccccacttcctttctttctaactcctacctttcccttgcagaggaggtagtagagattctggaattgtctatttttatgaattccattattttgtccatggcatctctaatgaaaacaggttctagaataaaggagttgattagtctgaacagtactaattaactacaaaataaacgttagtgatcagcctcttcctctataaacaatgaccaattagacgtttccgtaattccatgtattatgtatagtacactctataaatgtaaatgtaatgcttgtctaaaaagtgcaatttattgtacattgtcccaacaaatgtttacttttataatcgttatgaacttgaattggattagtatcttgtttttatgtgtgaatgaagccttgtgaaataaacaaatgcaactgagaaggtaacaaggtgactgtttttgtgagccagtgatgttttcaatgctttgtgttgcccctttggccccattaagcagtaataaacatttgttctgaagtccaaaaaaaaat

SEQ ID NO: 326780 - DNA, 6976 bp, Homo sapiens
gcagcagcagcagtagcagcagcagcagcaacaacagcgctgcttgtcacgaatcgaggattgcaatgagctcatcgttttctccttgcagcttcacaactgccctggcttcctggctactgctgctgctgtcttctcacacatagacacgcacacacaccctttctcgcacacacacacacacacacacacactctcacacattctcacatgctagacccttctaagcagcttgtccgtttttacacatgtatctgaactctcctgcatcactcttggccattttctcgcattcgattgcttttgccgttttttatttagatcagtacttgatttcattttcattttccagtctactttggggttctcgcagtggataatttagccaaaatgtttttcttgtggagacattagctgacaattcccaccacagactggcttgtacgtcctcccagggagacctaaacctggctcccctcccaccgcagttcttaatattgtggataagagatccatctttctcattctggatacctacttagtgctcatggaagaaggggtgccctgcccagccccagctgctaagctcacacctcctgtcaaaaagtcccaggacatgcacgacgagaggagcaagctggtgaatgagtatgcgtgtcgagtgctggaacttctggggatggggcatcgtctgtttgtgcctcggcttctggcgacctcaaaggaagaccttctgcaggctgattttgaaggtgctttaaagttctttagagttcagcttccaaagagatacagggcagaggaaaatgcaagaagactgatggagcaggcttgcaatattaaagtaccaaccaagaagctgaagaaatatgagaaagaatatcagacaatgcgagagagtcagctgcaacaggaagacccaatggatagatacaagagggagaaccgaagattacaggaggccagcatgaggttggaacaagagaatgatgaccttgcccatgaactagtaacaagcaaaattgctctacggaatgacttggatcaggcagaagacaaggcagatgtgttgaataaagagctccttttgaccaaacagaggctggtggagactgaagaggagaagaggaagcaagaggaagagactgcccagctaaaagaagtcttcaggaaacagctagagaaggcagaatatgaaataaagaagactacagctatcattgctgagtataaacagatctgttcgcagttgagtaccaggctggagaaacagcaagcagccagcaaggaggagctggaagtggtaaagggtaagatgatggcatgcaaacactgcagtgacattttcagcaaggagggtgctttgaaactagcagccacaggcagagaggaccagggaattgaaacagatgatgagaaggactcacttaagaagcagctgagagagatggaactggaactggcacaaaccaaactgcagttggtggaggccaagtgtaaaattcaggaacttgaacatcagagaggagcccttatgaatgaaatccaagctgcgaaaaactcttggtttagcaaaaccctgaactctatcaaaacggccacgggcacccagccattgcagccagcaccggtcacccagccacccaaggagagcacatagttccagccttacccaagcacaagagcacaatgttcaaaccaatggaaatctgggaggattcttcctggtgtccctttgaaggaaagtcaaggaggccagaaaacaagccagaatttttcagtagctctcactctttcttgtatgacacttttcaaagggatgctatttaaactgacctgttctatgttgaatacctattttccagcttctggaaggccatgttcagatccatcatagtattacacattattttgtttgcctgatgtttagttggaaataagtaattcagaactaaatgcttttttatttagaattattcataattatttttatcttacataaaaatggagacatctgttattccaaggttgaagtgataagaagatctttgtcacaggaaaaaaaaaattgaaacctaaacatcttaagttttcaggatttattcagataaagcacactgtggggccaggcatgaccactctcaggtttcctcctgagcctgattcccagggaagtgttaatcctgtccaaaggaaagaaccaatcagcgatcattggtttactttcattttctgttcggtacatctggaaatgaagtgccaggaatagacgggctgttcagattatacgctaggtaaaaggaactgaaattttaataagtgtaggtcaggatcatttgggctgtggtattctaacagatccttttaagaatgccacataggacttgtgagttcctaagtacaccaaagtatggacacagatgtgacttctggcaattataaagttaaaggtggatattgcaccttacagacttagggagcctttaccagagacgcctaaaaagccccaggttcagccattgtgctgaatagagtggaatatagaaccagggacagagtatttcatttaacgttgatatatacttgctaaggaaacactaacaatactgtaactttgttaaaggacatagtattgaaatgggaaatagaggtcaggctcacatcatcttagtttaatgctgggcaactttttctgatttctgtagttccctgaaaatgtgtccttcgtacccataaagagatacaaatgcatttgtaacatttttgattgaatataaaacctttacagaaatacttatctcatggaaaggtaaagctattgtttaaaaattagtggaaatattttttcaattatatttaacatgcctataaaaatagtccttgcaggaaattatttgataagagcaaaactatttttattttataaactattttggaggcctctgatcctttcaaaccaaccaaactactattagatatgtacaataacatttgttgatattaatcattggcctcattgttgaacatattatttgcaaagaatcttaaactctgtagtgccagaatgattctcatctgtgccatattttgcaattaaaagtaacacacccttagaagaatcaaataagagccatctacatcccaggaggatgcaccaagttgctcacagtggatcttttcctctaaaatgatcttttatgttctaaaaagtgaaatcccctttatctgtgtttatattctctacagcccataaaactgatgtgattgttatgttatactcatcagataatacttttcttacataaatctttcattgttgttctgacatctttcattacaaaatttattttcttaacaaaaaggaacataacccagcattccaagtgtctgtgttggctttaacattctctacatggtggtctagataagctaatttttttttttttttttttgtaaaatgtaatagctagaaaatgttatcttggcgcttgtttttgtaaatcatttagtataggctgttagctttactggtactttacgctttgattccaagaagccttgtgcagttgccttatcaaatggccagctaaattaaagatgctcttttgtgttgtgaatttcatagttctgtacagagcttgtttcaatttacaaaaataagtacattccacagaatgcctaaagtgtgtaattttctttaaataatagtaggtgagggagaaacataatggctctaggtcaatcccttatctaaagaccttgttcaacttcatagtccctttccttttaaagaggagaagagaaaaatcccccctggccaggcatggtggctcacatctgtaatcccagcactttgggaggctgaggtgggtggatcacctaaggtcaggagtttgagaccagcctggccaacatggtgaaaccctatctctactgcaaaatacaaaaattagccgggcttggtggcgggtgcctgtaatcccagctactcgggaggttgaggcaggagaatcacttgaacccaggaggcagaggttgcagtgggccaagattacggcattacattccatccagcctgggcgacaagagcaaaattccgtctcgaaaaatcaccaggtacatacctctcaagtttgataagtccatcttttgagttttcttttagctctttcaaaagattacgagggcaatacatattttttttttttttattctccagccccatatcatacttgggtatgcctgttggtaccataagcctaaactctccttcactgcaatgcctttgagtcagtagcaatagtaaagactagaaacaaagaaaattcagaatttggtatgtgatatgattgttcatacaatatgttataatagcaatattccaaacaatatgtccttcactgtctattgttggaaaactcatgcatcccagcatgaagtaactcctagttttaattttagttattttgagatatatttgagaattgcatctcttctcttgaatttcatttagaagagattaaccagccaaatatccaggaaagtttcaaaacattctagtgtttttcatcctttgctaggatgcactctgtacaaaacattcctctgaaaatctaatatttgcagtatctaagaattgatcatttctattttcattaaattctgtggaaaaaattaaatgaatgaaattcaacttcataattcagttcatcagcttttgtatcttgagaatctaaacacgtctttaaatctgaaagaaaccaagctggattttgcagtgcatatgtttgctagcttcccacatcctgaaccatgtcaaaatttggttttatttagttacatataatttaatgcaaagaaattctgttacttaatgttctgtttatttatgagtgcctatcaggaacactaataggaatgccattcaaccagtgtcttctgcccctctcccagctgttaaattagtacttcttcattggctttctgaaatgtcctgagtaaagtagaaaagcaacctttgtatggatgtggggatatttaatagtatgtatcttgtttcatttttttcctatgatgtattaatatttatttttctccaacccctgctccattttcttaaaatattttccagttaataactagttgctttatttcctagctgaagtgagaaaaccaacggaaaacaatacagatttgggcagaggagatagagttacatctttaaaggagtgagccagtcacccaggagaatcacatgtgtaactgatgtaggggtttaagtcttcatactttcactaaaatctgtctactaactctcccaccaacctttgcatcaaacacttaggtacctgcctgattaggggggcccctttaagggaaaaaacttttaaaaaattaaatgccttggttttgttttatcttctgggaaagaacacttttacttgattagcaagatgattatattatataacttgcccttaaaaacactccaaaatactgactccttttctccaattacaaatgagtgtgaagaaattctgttgtatgatttgaacactattaggtttgtatgtgtgtttaattggaagaattttatatagagtatctctgctgcttttgtttacctgggtaccacacaaccaaatacacattgagatttcaagaaatgatgatgaaagccagaaggccagaccacagctctgcagcctgtttcctacaaccagatataaaactctttctcgtcgccatgctgatagtcacactgaactagaactgtcccaacacattcttcctctctcataatggcttccatttaatacaggcaaagccctttaccttagcaaattctttatctttcaaaagtgaccaaaatgaggacttcaaccttggctgcacctcaataggagatgctgatcttgagttgtaatgagaaaagtgggcatataggagattttagtgactgcagtcagctgtctggcattcctttctcagtttgcatctaaaagactacatatgtcaagcttatctccacctgaatttgctgcctgctataaaaacatttcattaatatatcccattcttcctacctccatctctggtttgtcattagtggtattctgaaaagcttaagaaaaaagaatcattgagtagaaagtgaacattttaagttattttcctttttcattggcaattagttaacatgtaaaatcttttccattaaactgtataacttttaataactatatattatatatgggataaaatatatggactgaattgtgagaatataaatgcatcgaaagactctggtgtcatgaaagcacaagaataaggctggagatggtcccagatccaagatgtcccaaaagccttttgtatcagtttctctatttttggtattttgcataatgcatggatccttagttcaaatgagggacaaagtttctcagtcagccccacttcctttctttctaactcctacctttcccttgcagaggaggtagtagagattctggaattgtctatttttatgaattccattattttgtccatggcatctctaatgaaaacaggttctagaataaaggagttgattagtctgaacagtactaattaactacaaaataaacgttagtgatcagcctcttcctctataaacaatgaccaattagacgtttccgtaattccatgtattatgtatagtacactctataaatgtaaatgtaatgcttgtctaaaaagtgcaatttattgtacattgtcccaacaaatgtttacttttataatcgttatgaacttgaattggattagtatcttgtttttatgtgtgaatgaagccttgtgaaataaacaaatgcaactgagaaggtaacaaggtgactgtttttgtgagccagtgatgttttcaatgctttgtgttgcccctttggccccattaagcagtaataaacatttgttctgaagtccaaaaaaaaat

SEQ ID NO: 326781 - DNA, 2336 bp, Homo sapiens
  misc_feature (1329)..(1329): n is a, c, g, or t
  misc_feature (1739)..(1739): n is a, c, g, or t
gtagatgtgagagtagtatctccaaataacttaacaactgtgtctctaaactgtattgtctacattttaactgtaaaagtgttcatgatacatgctttgtacatatgaacttttttccacagtagaaataatttggcttataattttgccttccccccaccttgaaatatacaatacaaagtaattcatgaaacaactttctcgttgaaattttgtaacttgtgtttaaacgataccatttcctatccacaagtgatcactggaaagttgtttgagccgtcgcgccatggcagagtagaaaggatggcccaagatattctctcatgtccagctggttgcctttttgaggtctcttgttgcatcaagtgctacaaggaggattacccagccactggcgaggaccaatacctaatccccaggtcgagtgcagagccttgcgtcatgtgccatgtgccgtagtggcctcagagaaggctgtgcgggcgggctcctggggatgcagtcaccttgcagacatgtggacaacaggcaagatgaggatactggagacagtcaaaacacacaaggaaggctcagcaatcaagagaagttataaccctgcatatgcaccacacaaaggcaacttgatgattggagatgtcagaagtagacatggggaatgaagtagaaaatattagcaggtaaaggagacagaagaaagcaaatagaatgtagagcccacagctggactagcatcagccatgttttggagctacaaagtcactccagcagaagttccacatgaggaagtgatatttcctgatccttccaagacatttccctgtagacttaagtggatcataactcccagtattcctcattttactgagtgctgattttcctatttattataacactattatgacagggatatgcatacatgatatactgaatatgctgtgttgatgggcagtacactcaataattaaagagtgttaacgaaattaattttttaaatattaaaaagtattttctgtctttttaaaataccatctatacctttaaacagtttataaagcacatgtgaagcagccaccatgttgcgttagacgtgtaatttacagaggtaacaagcagagaagagtccttagcattgtgaaatggctgggtttcacagacagctctgcccgctatgggaacactaagccaagcataaattctcatggcgtgggagttagtggaagaatccgatggctctgaaagtcagtagagtttgaatttggtgttaaaggaaatagaacattgaaggctttgagtggaagaatctttaagatggggtaatctggctgnggtgagcagagtggattgggttgggagacaagccagggaactggtgtagtaatccagatggtggtcgggtctagagctcaactagagtagtggtcgatggggttttgaaaatggaaagctacaccaggtttgggagcctgaatatatcgcgtaatggagaaggctgaagggcctgttcactagtagtgtctgtgaccaggtgccttagagagcaggatagccagtaagaagtcactggagctcaggggcgagttagcaccaagactcgaacctcctttttagacccagtgctgggaagcagagccaagtgctgtcttggtggctggaccccattgctagagcgcatcctcacagccagtgaggacaaaatcagagggaaaatgcctgtgctgagccaaggcagagacaantggcgagctcgctcagcatgctcttttgaaggcaagaaggaagatgtctcgggcaccatcttaccctgagtggacctgtttcctttcttgtggcatactgttagctttgatttctctggaagcttttgctttttctgaacctccacgtcccttgctctggtggctgattggactcttcccccacacagggtcatcctcatccttgaacaccacgctgccttcaactagtgcctggtcatccattcgtgcctccaactacaacgttcccctcagcagtacagcacaaagcacttcaggtgggcctcgccttcgctcaggaagggagggttggtcacagccagagccgcggctgttgttttaatgccctcttctttcgtccagtcttctcagggaattaggagattctgtttgtgagcctgggaaattatttttaacatcccttactcctttttaaacttactgtacccagcagtcatctactaaaatcagttttcactgaacagctctcatctcatctcagagccacagcagctctgtaattaaatgtaatttaatccaaactagttctcagactatctgcagcggaggatctttaaa

SEQ ID NO: 326782 - DNA, 1029 bp, Homo sapiens
tgcctaacaatcagagtattaactctaaagtgagtggtggttctacccatggtacctggggaagccttcaggaaacttgtgaatctgaagtaagtggtacacagaaggtttcattcagtggtcaacctcaaaatattaccactgaaatgactggaccaaataacactactaactttatgacctctagtttaccaaactccggttcagtgcagaataatgagctgcctagtagtaacacaggggcctggcgtgtgagcacaatgaatcatcctcagatgcaggctccatcaggtatgaatggcacttccctttctcaccttagcaatggagagtcaaaaagtggaggctcttatggtactacatggggtgcctatggttctaattactctggagacaaatgttcaggccctaatggccaagctaatggtgacactgtgaatgcaactctaatgcagcctggcgtaaatggtcctatgggcactaactttcaagttaacacaaacaaaggaggtggtgtgtgggaatctggtgcagcaaactcccagagtacatcatggggaagtggaaatggcgcaaattctggaggaagtcgaagaggatggggaacccctgcacaaaacactggcactaatttacccagcgttgagtggaacaaactgcctagcaatcagcattccaatgatagtgcaaatggcaatggtaagacgtttacaaatggatggaaatctactgaggaagaggatcagggttctgccacatctcagacaaatgagcaaagcagtgtgtgggccaaaacaggaggtacagtggagagcgatggtagtcttggactagtgttggctgcgtgaggaatggaaagtatagggtgcacgatctacaagattccctaggtaaaatgcacaggtcttggttatcaattggaggtgtcaggaaggaactgtggtgttttgagtatacatctcaagatggtagataatgatgacagttttagcagtggtacgagatatgagaatgtcctgtgaatccgag

SEQ ID NO: 326783 - DNA, 229 bp, Homo sapiens
cacacacacaagtacgtatgtgtatatgttacgtgtgtgtgtgggtatgtatattcacattcagtgagatgatttcagttgtaaaaacttgcaagtaatttataaagaatagcttctataatactaattgtattaactgaaccatcctcttagagtattagtgtaaattggaaagtatttgagagttgcataggattcaggaataaaggttttggatatttattaatgg

SEQ ID NO: 326784 - DNA, 6790 bp, Homo sapiens
tgcctaacaatcagagtattaactctaaagtgagtggtggttctacccatggtacctggggaagccttcaggaaacttgtgaatctgaagtaagtggtacacagaaggtttcattcagtggtcaacctcaaaatattaccactgaaatgactggaccaaataacactactaactttatgacctctagtttaccaaactccggttcagtgcagaataatgagctgcctagtagtaacacaggggcctggcgtgtgagcacaatgaatcatcctcagatgcaggctccatcaggtatgaatggcacttccctttctcaccttagcaatggagagtcaaaaagtggaggctcttatggtactacatggggtgcctatggttctaattactctggagacaaatgttcaggccctaatggccaagctaatggtgacactgtgaatgcaactctaatgcagcctggcgtaaatggtcctatgggcactaactttcaagttaacacaaacaaaggaggtggtgtgtgggaatctggtgcagcaaactcccagagtacatcatggggaagtggaaatggcgcaaattctggaggaagtcgaagaggatggggaacccctgcacaaaacactggcactaatttacccagcgttgagtggaacaaactgcctagcaatcagcattccaatgatagtgcaaatggcaatggtaagacgtttacaaatggatggaaatctactgaggaagaggatcagggttctgccacatctcagacaaatgagcaaagcagtgtgtgggccaaaacaggaggtacagtggagagcgatggtagtacagaaagcactggacgccttgaggaaaaaggaactggggaaagtcagagtagagacagaagaaaaattgatcagcacacattactccaaagcattgtaaacagaactgacttagatccacgtgtcctgtccaactctggttggggacagactcctattaagcagaatactgcctgggatacagaaacatcacctagaggggaacgaaagactgacaatgggacagaggcctggggaagctctgcaacacagacttttaactcaggggcatgtatagataagactagccctaatggtaatgatacctcatctgtatcagggtggggcgatcccaaacctgctctgaggtggggagattccaaaggctcaaactgccagggggggtgggaagatgattctgctgctacaggaatggtcaagagcaatcagtgggggaattgcaaagaggagaaggctgcatggaatgactcgcaaaagaataaacagggatggggtgatggacaaaaatcaagccaagggtggtctgtttctgccagtgataactggggagaaacttcaaggaataaccattggggtgaggccaataagaaatccagctcaggaggtagtgacagtgacaggtccgtttccggttggaacgaacttggtaaaactagttctttcacttggggaaacaacataaatccaaataattcatcaggatgggatgaatcttctaaacctactccttcccagggatggggagaccctccaaagtctaatcagtctctaggttggggagattcgtcaaagccagtcagctctccagactggaacaagcaacaagacattgttggatcttggggaatcccaccagctacaggcaaacctcctggtacaggctggctggggggacctataccagccccagcaaaagaagaagaacccacaggctgggaggaaccatccccagaatctatacgtcgcaaaatggagattgatgatggaacttcagcttggggagatccaagcaaatacaactacaaaaatgtgaacatgtggaacaaaaacgtcccaaatggcaacagccgttcagaccagcaagcacaggtacatcagctgctaacgcctgcaagtgccatctcaaacaaagaggcaagcagtggctctgggccaaaatctatgcaagatggctggtgtggtgatgatatgccattgcctggaaatcgccccactggctgggaagaggaagaggatgtggagattggaatgtggaatagtaattcatctcaagagcttaactcatctttaaattggccaccatatacaaagaaaatgtcatcgaagggtctgagtggcaaaaaaaggagaagggaaaggggaatgatgaaaggtggaaacaaacaagaagaagcgtggataaatccatttgttaaacagttttcaaacatcagtttttcgagagactcaccagaggaaaatgtacaaagcaataagatggacctttctggaggaatgttacaagacaaacgaatggagatagataaacatagcctaaatattggtgattacaatcgaacggtcgggaaaggccctggttctcggcctcagatttccaaagagtcttccatggagcgcaatccttattttgataagaatggcaatcccagtatgtttggtgttggaaacacagcagcacaaccccggggcatgcagcagcctccagcacaacctcttagttcatctcagcctaatctccgtgctcaagtgcctcctccattactctcccctcaggttccagtttcattgctgaagtatgcaccaaacaacggtggcctgaatccactctttggccctcaacaggtagccatgctgaaccagctatcccagctaaaccagctttctcagatctcccagttacagcgattgttagcgcagcagcaaagggcgcagagtcagagaagcgtgccttctgggaaccggccgcagcaagaccagcagggtcgacctcttagtgtgcagcagcaaatgatgcaacaatctcgtcaacttgatccaaacctgttggtgaagcagcagactccaccatctcagcagcagccactccatcagccagccatgaagtctttccttgacaatgtcatgccccacactacacctgagctgcaaaaagggccatcaccaataaatgctttcagcaacttccctataggcttgaactcaaacttgaatgtaaatatggatatgaacagtattaaagagccacagtcaagactaaggaagtggacgacagtggacagcatttctgtgaacacatctttggatcaaaactccagcaaacatggtgctatttcaagtggtttcaggctggaagagtctccatttgttccctatgactttatgaacagcagtacttcaccagccagtcctccaggttcaataggagatggctggccacgtgccaaatcgcctaacggctctagcagtgttaattggccaccagaatttcgtcctggtgagccatggaaaggttatccaaacattgaccctgaaactgacccttacgtcactcctggcagtgtcataaacaatctttcaattaatactgtgcgggaagttgaccacctcagggacaggaacagtgggtcatcctcatccttgaacaccacgctgccttcaactagtgcctggtcatccattcgtgcctccaactacaacgttcccctcagcagtacagcacaaagcacttcagccagaaatagtgattccaaattgacatggtctcctggttcagttacaaacacctctctggctcatgagctgtggaaggtccctttgccacctaaaaacatcactgctccgtcccgcccacctccgggactgactggtcagaagccacccttgtctacgtgggataattctccccttcgtataggtggaggatggggaaattctgacgccagatataccccaggttccagctggggtgagagcagctcagggagaataacaaattggcttgttctaaaaaaccttacacctcagatcgatggctcaactctgcgcactctgtgcatgcagcacggcccgctgatcacattccacctgaacctccctcacggaaatgctctggtccgctacagttcaaaagaagaggtagtgaaggcacaaaagtctctgcacatgtgtgtactggggaacactactattcttgctgagtttgccagtgaagaggagatcagtcgtttctttgcacaaagccagtctctgaccccttctcccggctggcagtctctcgggtccagccagagccggctgggctccctcgactgttcccactcattctccagccggaccgatctcaatcactggaatggtgctgggctgtcgggaactaactgtggagaccttcacggcacttcactctgggggaccccgcattattccacaagcctgtggggtcccccaagcagcagcgacccccgaggaattagcagcccatctcccattaacgcttttctttctgttgaccacctgggtgggggtggagagtccatgtaacagtgtagatgcagactcaccgaccgggacctcagacgcgagggaaaggagcactaagtggggctcgccgcctgcagccaggggccgcctgtgggaacagctattctctgcacattttccactttgttttccccaaaacatatcagtttgaatacttgaatcatgcaggccaatattataatgtgaaaaggtatctactctatttacactcccaaatagcgccatacatgctaaaccgtagagaatgagctcgcttgtgtctattcatcatgtttagcctttggattcttttttttttttccttctattcctccccaacccccccccccgcccctttttttctctcttgcaaaaccattttttgggctgataacgtatgagcttttccctttgcactgaatgatgttctctccgtctcatcggcagtatggggggcagctgtcccagtgtcaatgtttactcaagggtgttcttaggaggcgtgcgctctctactatgccttgatgttgcctaccttattgtggtatcgtggagtttaaaagatcaagttaggatgctgacttaggattattaatgaaagtgttgcaccagttttttcatgttgtaaaactaaagaatttcgctctgcagtttgaaaaactgtggccacagctgtgacttgcagcccacctgccacccaggacgggccctgcactttgaataggctttccattttgttttggaggttctcactttgaaccttcttgtttacagatttttttgtttgttttttgagaaaaaaaaatgtttactcttccatcatttaaaaaaaatgtaaaagacaaaaaaaaaatggaggatgatttaaaagatgctttctatctctgggaaaaaggagcagcatttggccatgttcttttgtttttctattcctgtcccaaatcaaagagcatggttctcaggaaaaccagttccccagtttaaaaaaaaaaaaaaaaattccttgtagtttcttagaggaaaaaaagaaaaaccccaacttttagcactgatactacatattgctctgttaaagaattttctctgccaaaaaaaaagaaaaaacaaaaaaacgcttaaagctggagtttgacattctgctttcagatgctgtctttttattagtgagtgatgatggtttgctaataatcaataggtaataattttttgtaatcccatcaagtggctccatatgtttctgctctctcgtgactgtgttaatgtttaactgttgtaccttaaagccgaaatcagtaactatgcatactgtaaccaaggtattgggcttacagagttgtttgttgtataaagaaaattttaaatgttgttgcaaactaacgagttacaccattttaaactttctttcctcccccctttttttgcccacaaatggtattataatgcttgcttagtcaaagaagagagactaaacaagggtaaaaattttaacagtacagaatttgccatcatatcattgccttgattctaactgtttgtgtcctaagatgcaaaagaagtcagtggcttttaactgtttacaaatagaatgtgattgtaaaatgtacagtttggttgtgtttgaattatgaaatttcttcagatataataaaccatgactttttggctgctcaacattaattgtctcctttttgtgaatttatttgtaggctcttttttataatgaaagtttcaaagttgctatgtatgagggttctcatagagcaaccgattaaaaatctaagcaaatatttgaacattttatctgaactcatcacaatttcaccctgaaataatgtgagaacaatgggaaactgtagcttgctccttcccaccctctctgagcatctttgggatcttgttgctcaaaactcttctgtgacttcatcttccccaccatttgtgcccatctcaagcctcagcaagaaaccatgtggaacatgaagcttaatgacttgacagtgtactagtgttaaactctcatacctctgttacaaagcgagaaacgccacacccggactggccttttcttcccccttcacggccctcgcttctccctgcaggagctcgggggcgaaacctgtgtatggatttcagtgtatgacttcagatcatgctccaacttgccaggtgtgagctaatgttgtcggacaccttactataagcaaatgttattcagtgcgttcaatgtatattgacttccatactggtttttccaaaaaccaaaggtagctttgaaaaaccatgtctggaaatgtttggagcgttaagctgattgaccttctgaccttggggctttgagtagtatataattcataactgcgttaattgtattgttaaagtgtttgggagttttttgcgcttgttatgtggaaataaagtgtttgatttaaaatttaaaaaaaaaaatt

SEQ ID NO: 326785 - DNA, 7060 bp, Homo sapiens
tgcctaacaatcagagtattaactctaaagtgagtggtggttctacccatggtacctggggaagccttcaggaaacttgtgaatctgaagtaagtggtacacagaaggtttcattcagtggtcaacctcaaaatattaccactgaaatgactggaccaaataacactactaactttatgacctctagtttaccaaactccggttcagtgcagaataatgagctgcctagtagtaacacaggggcctggcgtgtgagcacaatgaatcatcctcagatgcaggctccatcaggtatgaatggcacttccctttctcaccttagcaatggagagtcaaaaagtggaggctcttatggtactacatggggtgcctatggttctaattactctggagacaaatgttcaggccctaatggccaagctaatggtgacactgtgaatgcaactctaatgcagcctggcgtaaatggtcctatgggcactaactttcaagttaacacaaacaaaggaggtggtgtgtgggaatctggtgcagcaaactcccagagtacatcatggggaagtggaaatggcgcaaattctggaggaagtcgaagaggatggggaacccctgcacaaaacactggcactaatttacccagcgttgagtggaacaaactgcctagcaatcagcattccaatgatagtgcaaatggcaatggtaagacgtttacaaatggatggaaatctactgaggaagaggatcagggttctgccacatctcagacaaatgagcaaagcagtgtgtgggccaaaacaggaggtacagtggagagcgatggtagtacagaaagcactggacgccttgaggaaaaaggaactggggaaagtcagagtagagacagaagaaaaattgatcagcacacattactccaaagcattgtaaacagaactgacttagatccacgtgtcctgtccaactctggttggggacagactcctattaagcagaatactgcctgggatacagaaacatcacctagaggggaacgaaagactgacaatgggacagaggcctggggaagctctgcaacacagacttttaactcaggggcatgtatagataagactagccctaatggtaatgatacctcatctgtatcagggtggggcgatcccaaacctgctctgaggtggggagattccaaaggctcaaactgccagggggggtgggaagatgattctgctgctacaggaatggtcaagagcaatcagtgggggaattgcaaagaggagaaggctgcatggaatgactcgcaaaagaataaacagggatggggtgatggacaaaaatcaagccaagggtggtctgtttctgccagtgataactggggagaaacttcaaggaataaccattggggtgaggccaataagaaatccagctcaggaggtagtgacagtgacaggtccgtttccggttggaacgaacttggtaaaactagttctttcacttggggaaacaacataaatccaaataattcatcaggatgggatgaatcttctaaacctactccttcccagggatggggagaccctccaaagtctaatcagtctctaggttggggagattcgtcaaagccagtcagctctccagactggaacaagcaacaagacattgttggatcttggggaatcccaccagctacaggcaaacctcctggtacaggctggctggggggacctataccagccccagcaaaagaagaagaacccacaggctgggaggaaccatccccagaatctatacgtcgcaaaatggagattgatgatggaacttcagcttggggagatccaagcaaatacaactacaaaaatgtgaacatgtggaacaaaaacgtcccaaatggcaacagccgttcagaccagcaagcacaggtacatcagctgctaacgcctgcaagtgccatctcaaacaaagaggcaagcagtggctctggctggggtgagccctggggggagccttctactccagccacaactgtggataatggtacttcagcatggggtaagcccatagacagtggtcccagctggggggaacccattgctgcggcatccagcacatccacgtggggctccagctctgttggtccacaagcattaagcaaatctgggccaaaatctatgcaagatggctggtgtggtgatgatatgccattgcctggaaatcgccccactggctgggaagaggaagaggatgtggagattggaatgtggaatagtaattcatctcaagagcttaactcatctttaaattggccaccatatacaaagaaaatgtcatcgaagggtctgagtggcaaaaaaaggagaagggaaaggggaatgatgaaaggtggaaacaaacaagaagaagcgtggataaatccatttgttaaacagttttcaaacatcagtttttcgagagactcaccagaggaaaatgtacaaagcaataagatggacctttctggaggaatgttacaagacaaacgaatggagatagataaacatagcctaaatattggtgattacaatcgaacggtcgggaaaggccctggttctcggcctcagatttccaaagagtcttccatggagcgcaatccttattttgataaggatggcattgtagcagatgaatcccaaaacatgcagtttatgtccagtcaaagcatgaagcttcccccttcaaatagtgcactacctaaccaggcccttggctccatagcagggctgggtatgcaaaacttgaattctgttagacagaatggcaatcccagtatgtttggtgttggaaacacagcagcacaaccccggggcatgcagcagcctccagcacaacctcttagttcatctcagcctaatctccgtgctcaagtgcctcctccattactctcccctcaggttccagtttcattgctgaagtatgcaccaaacaacggtggcctgaatccactctttggccctcaacaggtagccatgctgaaccagctatcccagctaaaccagctttctcagatctcccagttacagcgattgttagcgcagcagcaaagggcgcagagtcagagaagcgtgccttctgggaaccggccgcagcaagaccagcagggtcgacctcttagtgtgcagcagcaaatgatgcaacaatctcgtcaacttgatccaaacctgttggtgaagcagcagactccaccatctcagcagcagccactccatcagccagccatgaagtctttccttgacaatgtcatgccccacactacacctgagctgcaaaaagggccatcaccaataaatgctttcagcaacttccctataggcttgaactcaaacttgaatgtaaatatggatatgaacagtattaaagagccacagtcaagactaaggaagtggacgacagtggacagcatttctgtgaacacatctttggatcaaaactccagcaaacatggtgctatttcaagtggtttcaggctggaagagtctccatttgttccctatgactttatgaacagcagtacttcaccagccagtcctccaggttcaataggagatggctggccacgtgccaaatcgcctaacggctctagcagtgttaattggccaccagaatttcgtcctggtgagccatggaaaggttatccaaacattgaccctgaaactgacccttacgtcactcctggcagtgtcataaacaatctttcaattaatactgtgcgggaagttgaccacctcagggacaggaacagtgggtcatcctcatccttgaacaccacgctgccttcaactagtgcctggtcatccattcgtgcctccaactacaacgttcccctcagcagtacagcacaaagcacttcagccagaaatagtgattccaaattgacatggtctcctggttcagttacaaacacctctctggctcatgagctgtggaaggtccctttgccacctaaaaacatcactgctccgtcccgcccacctccgggactgactggtcagaagccacccttgtctacgtgggataattctccccttcgtataggtggaggatggggaaattctgacgccagatataccccaggttccagctggggtgagagcagctcagggagaataacaaattggcttgttctaaaaaaccttacacctcagatcgatggctcaactctgcgcactctgtgcatgcagcacggcccgctgatcacattccacctgaacctccctcacggaaatgctctggtccgctacagttcaaaagaagaggtagtgaaggcacaaaagtctctgcacatgtgtgtactggggaacactactattcttgctgagtttgccagtgaagaggagatcagtcgtttctttgcacaaagccagtctctgaccccttctcccggctggcagtctctcgggtccagccagagccggctgggctccctcgactgttcccactcattctccagccggaccgatctcaatcactggaatggtgctgggctgtcgggaactaactgtggagaccttcacggcacttcactctgggggaccccgcattattccacaagcctgtggggtcccccaagcagcagcgacccccgaggaattagcagcccatctcccattaacgcttttctttctgttgaccacctgggtgggggtggagagtccatgtaacagtgtagatgcagactcaccgaccgggacctcagacgcgagggaaaggagcactaagtggggctcgccgcctgcagccaggggccgcctgtgggaacagctattctctgcacattttccactttgttttccccaaaacatatcagtttgaatacttgaatcatgcaggccaatattataatgtgaaaaggtatctactctatttacactcccaaatagcgccatacatgctaaaccgtagagaatgagctcgcttgtgtctattcatcatgtttagcctttggattcttttttttttttccttctattcctccccaacccccccccccgcccctttttttctctcttgcaaaaccattttttgggctgataacgtatgagcttttccctttgcactgaatgatgttctctccgtctcatcggcagtatggggggcagctgtcccagtgtcaatgtttactcaagggtgttcttaggaggcgtgcgctctctactatgccttgatgttgcctaccttattgtggtatcgtggagtttaaaagatcaagttaggatgctgacttaggattattaatgaaagtgttgcaccagttttttcatgttgtaaaactaaagaatttcgctctgcagtttgaaaaactgtggccacagctgtgacttgcagcccacctgccacccaggacgggccctgcactttgaataggctttccattttgttttggaggttctcactttgaaccttcttgtttacagatttttttgtttgttttttgagaaaaaaaaatgtttactcttccatcatttaaaaaaaatgtaaaagacaaaaaaaaaatggaggatgatttaaaagatgctttctatctctgggaaaaaggagcagcatttggccatgttcttttgtttttctattcctgtcccaaatcaaagagcatggttctcaggaaaaccagttccccagtttaaaaaaaaaaaaaaaaattccttgtagtttcttagaggaaaaaaagaaaaaccccaacttttagcactgatactacatattgctctgttaaagaattttctctgccaaaaaaaaagaaaaaacaaaaaaacgcttaaagctggagtttgacattctgctttcagatgctgtctttttattagtgagtgatgatggtttgctaataatcaataggtaataattttttgtaatcccatcaagtggctccatatgtttctgctctctcgtgactgtgttaatgtttaactgttgtaccttaaagccgaaatcagtaactatgcatactgtaaccaaggtattgggcttacagagttgtttgttgtataaagaaaattttaaatgttgttgcaaactaacgagttacaccattttaaactttctttcctcccccctttttttgcccacaaatggtattataatgcttgcttagtcaaagaagagagactaaacaagggtaaaaattttaacagtacagaatttgccatcatatcattgccttgattctaactgtttgtgtcctaagatgcaaaagaagtcagtggcttttaactgtttacaaatagaatgtgattgtacatgactttttggctgctcaacattaattgtctcctttttgtgaatttatttgtaggctcttttttataatgaaagtttcaaagttgctatgtatgagggttctcatagagcaaccgattaaaaatctaagcaaatatttgaacattttatctgaactcatcacaatttcaccctgaaataatgtgagaacaatgggaaactgtagcttgctccttcccaccctctctgagcatctttgggatcttgttgctcaaaactcttctgtgacttcatcttccccaccatttgtgcccatctcaagcctcagcaagaaaccatgtggaacatgaagcttaatgacttgacagtgtactagtgttaaactctcatacctctgttacaaagcgagaaacgccacacccggactggccttttcttcccccttcacggccctcgcttctccctgcaggagctcgggggcgaaacctgtgtatggatttcagtgtatgacttcagatcatgctccaacttgccaggtgtgagctaatgttgtcggacaccttactataagcaaatgttattcagtgcgttcaatgtatattgacttccatactggtttttccaaaaaccaaaggtagctttgaaaaaccatgtctggaaatgtttggagcgttaagctgattgaccttctgaccttggggctttgagtagtatataattcataactgcgttaattgtattgttaaagtgtttgggagttttttgcgcttgttatgtggaaataaagtgtttgatttaaaatttaaaaaaaaaaatt

SEQ ID NO: 326786 - DNA, 6533 bp, Homo sapiens
tgcctaacaatcagagtattaactctaaagtgagtggtggttctacccatggtacctggggaagccttcaggaaacttgtgaatctgaagtaagtggtacacagaaggtttcattcagtggtcaacctcaaaatattaccactgaaatgactggaccaaataacactactaactttatgacctctagtttaccaaactccggttcagtgcagaataatgagctgcctagtagtaacacaggggcctggcgtgtgagcacaatgaatcatcctcagatgcaggctccatcaggtatgaatggcacttccctttctcaccttagcaatggagagtcaaaaagtggaggctcttatggtactacatggggtgcctatggttctaattactctggagacaaatgttcaggccctaatggccaagctaatggtgacactgtgaatgcaactctaatgcagcctggcgtaaatggtcctatgggcactaactttcaagttaacacaaacaaaggaggtggtgtgtgggaatctggtgcagcaaactcccagagtacatcatggggaagtggaaatggcgcaaattctggaggaagtcgaagaggatggggaacccctgcacaaaacactggcactaatttacccagcgttgagtggaacaaactgcctagcaatcagcattccaatgatagtgcaaatggcaatggtaagacgtttacaaatggatggaaatctactgaggaagaggatcagggttctgccacatctcagacaaatgagcaaagcagtgtgtgggccaaaacaggaggtacagtggagagcgatggtagtacagaaagcactggacgccttgaggaaaaaggaactggggaaagtcagagtagagacagaagaaaaattgatcagcacacattactccaaagcattgtaaacagaactgacttagatccacgtgtcctgtccaactctggttggggacagactcctattaagcagaatactgcctgggatacagaaacatcacctagaggggaacgaaagactgacaatgggacagaggcctggggaagctctgcaacacagacttttaactcaggggcatgtatagataagactagccctaatggtaatgatacctcatctgtatcagggtggggcgatcccaaacctgctctgaggtggggagattccaaaggctcaaactgccagggggggtgggaagatgattctgctgctacaggaatggtcaagagcaatcagtgggggaattgcaaagaggagaaggctgcatggaatgactcgcaaaagaataaacagggatggggtgatggacaaaaatcaagccaagggtggtctgtttctgccagtgataactggggagaaacttcaaggaataaccattggggtgaggccaataagaaatccagctcaggaggtagtgacagtgacaggtccgtttccggttggaacgaacttggtaaaactagttctttcacttggggaaacaacataaatccaaataattcatcaggatgggatgaatcttctaaacctactccttcccagggatggggagaccctccaaagtctaatcagtctctaggttggggagattcgtcaaagccagtcagctctccagactggaacaagcaacaagacattgttggatcttggggaatcccaccagctacaggcaaacctcctggtacaggctggctggggggacctataccagccccagcaaaagaagaagaacccacaggctgggaggaaccatccccagaatctatacgtcgcaaaatggagattgatgatggaacttcagcttggggagatccaagcaaatacaactacaaaaatgtgaacatgtggaacaaaaacgtcccaaatggcaacagccgttcagaccagcaagcacaggtacatcagctgctaacgcctgcaagtgccatctcaaacaaagaggcaagcagtggctctggctggggtgagccctggggggagccttctactccagccacaactgtggataatggtacttcagcatggggtaagcccatagacagtggtcccagctggggggaacccattgctgcggcatccagcacatccacgtggggctccagctctgttggtccacaagcattaagcaaatctgggccaaaatctatgcaagatggctggtgtggtgatgatatgccattgcctggaaatcgccccactggctgggaagaggaagaggatgtggagattggaatgtggaatagtaattcatctcaagagcttaactcatctttaaattggccaccatatacaaagaaaatgtcatcgaagggtctgagtggcaaaaaaaggagaagggaaaggggaatgatgaaaggtggaaacaaacaagaagaagcgtggataaatccatttgttaaacagttttcaaacatcagtttttcgagagactcaccagaggaaaatgtacaaagcaataagatggacctttctggaggaatgttacaagacaaacgaatggagatagataaacatagcctaaatattggtgattacaatcgaacggtcgggaaaggccctggttctcggcctcagatttccaaagagtcttccatggagcgcaatccttattttgataaggatggcattgtagcagatgaatcccaaaacatgcagtttatgtccagtcaaagcatgaagcttcccccttcaaatagtgcactacctaaccaggcccttggctccatagcagggctgggtatgcaaaacttgaattctgttagacagaatggcaatcccagtatgtttggtgttggaaacacagcagcacaaccccggggcatgcagcagcctccagcacaacctcttagttcatctcagcctaatctccgtgctcaagtgcctcctccattactctcccctcaggttccagtttcattgctgaagtatgcaccaaacaacggtggcctgaatccactctttggccctcaacaggtagccatgctgaaccagctatcccagctaaaccagctttctcagatctcccagttacagcgattgttagcgcagcagcaaagggcgcagagtcagagaagcgtgccttctgggaaccggccgcagcaagaccagcagggtcgacctcttagtgtgcagcagcaaatgatgcaacaatctcgtcaacttgatccaaacctgttggtgaagcagcagactccaccatctcagcagcagccactccatcagccagccatgaagtctttccttgacaatgtcatgccccacactacacctgagctgcaaaaagggccatcaccaataaatgctttcagcaacttccctataggcttgaactcaaacttgaatgtaaatatggatatgaacagtattaaagagccacagtcaagactaaggaagtggacgacagtggacagcatttctgtgaacacatctttggatcaaaactccagcaaacatggtgctatttcaagtggtttcaggctggaagagtctccatttgttccctatgactttatgaacagcagtacttcaccagccagtcctccaggttcaataggagatggctggccacgtgccaaatcgcctaacggctctagcagtgttaattggccaccagaatttcgtcctggtgagccatggaaaggttatccaaacattgaccctgaaactgacccttacgtcactcctggcagtgtcataaacaatctttcaattaatactgtgcgggaagttgaccacctcagggacaggaacagtgggtcatcctcatccttgaacaccacgctgccttcaactagtgcctggtcatccattcgtgcctccaactacaacgttcccctcagcagtacagcacaaagcacttcagccagaaatagtgattccaaattgacatggtctcctggttcagttacaaacacctctctggctcatgagctgtggaaggtccctttgccacctaaaaacatcactgctccgtcccgcccacctccgggactgactggtcagaagccacccttgtctacgtgggataattctccccttcgtataggtggaggatggggaaattctgacgccagatataccccaggttccagctggggtgagagcagctcagggagaataacaaattggcttgttctaaaaaaccttacacctcagatcgatggctcaactctgcgcactctgtgcatgcagcacggcccgctgatcacattccacctgaacctccctcacggaaatgctctggtccgctacagttcaaaagaagaggtagtgaaggcacaaaagtctctgcacatgtgtgtactggggaacactactattcttgctgagtttgccagtgaagaggagatcagtcgtttctttgcacaaagccagtctctgaccccttctcccggctggcagtctctcgggtccagccagagccggctgggctccctcgactgttcccactcattctccagccggaccgatctcaatcactggaatggtgctgggctgtcgggaactaactgtggagaccttcacggcacttcactctgggggaccccgcattattccacaagcctgtggggtcccccaagcagcagcgacccccgaggaattagcagcccatctcccattaacgcttttctttctgttgaccacctgggtgggggtggagagtccatgtaacagtgtagatgcagactcaccgaccgggacctcagacgcgagggaaaggagcactaagtggggctcgccgcctgcagccaggggccgcctgtgggaacagctattctctgcactttgaataggctttccattttgttttggaggttctcactttgaaccttcttgtttacagatttttttgtttgttttttgagaaaaaaaaatgtttactcttccatcatttaaaaaaaatgtaaaagacaaaaaaaaaatggaggatgatttaaaagatgctttctatctctgggaaaaaggagcagcatttggccatgttcttttgtttttctattcctgtcccaaatcaaagagcatggttctcaggaaaaccagttccccagtttaaaaaaaaaaaaaaaaattccttgtagtttcttagaggaaaaaaagaaaaaccccaacttttagcactgatactacatattgctctgttaaagaattttctctgccaaaaaaaaagaaaaaacaaaaaaacgcttaaagctggagtttgacattctgctttcagatgctgtctttttattagtgagtgatgatggtttgctaataatcaataggtaataattttttgtaatcccatcaagtggctccatatgtttctgctctctcgtgactgtgttaatgtttaactgttgtaccttaaagccgaaatcagtaactatgcatactgtaaccaaggtattgggcttacagagttgtttgttgtataaagaaaattttaaatgttgttgcaaactaacgagttacaccattttaaactttctttcctcccccctttttttgcccacaaatggtattataatgcttgcttagtcaaagaagagagactaaacaagggtaaaaattttaacagtacagaatttgccatcatatcattgccttgattctaactgtttgtgtcctaagatgcaaaagaagtcagtggcttttaactgtttacaaatagaatgtgattgtaaaatgtacagtttggttgtgtttgaattatgaaatttcttcagatataataaaccatgactttttggctgctcaacattaattgtctcctttttgtgaatttatttgtaggctcttttttataatgaaagtttcaaagttgctatgtatgagggttctcatagagcaaccgattaaaaatctaagcaaatatttgaacattttatctgaactcatcacaatttcaccctgaaataatgtgagaacaatgggaaactgtagcttgctccttcccaccctctctgagcatctttgggatcttgttgctcaaaactcttctgtgacttcatcttccccaccatttgtgcccatctcaagcctcagcaagaaaccatgtggaacatgaagcttaatgacttgacagtgtactagtgttaaactctcatacctctgttacaaagcgagaaacgccacacccggactggccttttcttcccccttcacggccctcgcttctccctgcaggagctcgggggcgaaacctgtgtatggatttcagtgtatgacttcagatcatgctccaacttgccaggtgtgagctaatgttgtcggacaccttactataagcaaatgttattcagtgcgttcaatgtatattgacttccatactggtttttccaaaaaccaaaggtagctttgaaaaaccatgtctggaaatgtttggagcgttaagctgattgaccttctgaccttggggctttgagtagtatataattcataactgcgttaattgtattgttaaagtgtttgggagttttttgcgcttgttatgtggaaataaagtgtttgatttaaaatttaaaaaaaaaaatt

SEQ ID NO: 326787 - DNA, 6802 bp, Homo sapiens
tgcctaacaatcagagtattaactctaaagtgagtggtggttctacccatggtacctggggaagccttcaggaaacttgtgaatctgaagtaagtggtacacagaaggtttcattcagtggtcaacctcaaaatattaccactgaaatgactggaccaaataacactactaactttatgacctctagtttaccaaactccggttcagtgcagaataatgagctgcctagtagtaacacaggggcctggcgtgtgagcacaatgaatcatcctcagatgcaggctccatcaggtatgaatggcacttccctttctcaccttagcaatggagagtcaaaaagtggaggctcttatggtactacatggggtgcctatggttctaattactctggagacaaatgttcaggccctaatggccaagctaatggtgacactgtgaatgcaactctaatgcagcctggcgtaaatggtcctatgggcactaactttcaagttaacacaaacaaaggaggtggtgtgtgggaatctggtgcagcaaactcccagagtacatcatggggaagtggaaatggcgcaaattctggaggaagtcgaagaggatggggaacccctgcacaaaacactggcactaatttacccagcgttgagtggaacaaactgcctagcaatcagcattccaatgatagtgcaaatggcaatggtaagacgtttacaaatggatggaaatctactgaggaagaggatcagggttctgccacatctcagacaaatgagcaaagcagtgtgtgggccaaaacaggaggtacagtggagagcgatggtagtacagaaagcactggacgccttgaggaaaaaggaactggggaaagtcagagtagagacagaagaaaaattgatcagcacacattactccaaagcattgtaaacagaactgacttagatccacgtgtcctgtccaactctggttggggacagactcctattaagcagaatactgcctgggatacagaaacatcacctagaggggaacgaaagactgacaatgggacagaggcctggggaagctctgcaacacagacttttaactcaggggcatgtatagataagactagccctaatggtaatgatacctcatctgtatcagggtggggcgatcccaaacctgctctgaggtggggagattccaaaggctcaaactgccagggggggtgggaagatgattctgctgctacaggaatggtcaagagcaatcagtgggggaattgcaaagaggagaaggctgcatggaatgactcgcaaaagaataaacagggatggggtgatggacaaaaatcaagccaagggtggtctgtttctgccagtgataactggggagaaacttcaaggaataaccattggggtgaggccaataagaaatccagctcaggaggtagtgacagtgacaggtccgtttccggttggaacgaacttggtaaaactagttctttcacttggggaaacaacataaatccaaataattcatcaggatgggatgaatcttctaaacctactccttcccagggatggggagaccctccaaagtctaatcagtctctaggttggggagattcgtcaaagccagtcagctctccagactggaacaagcaacaagacattgttggatcttggggaatcccaccagctacaggcaaacctcctggtacaggctggctggggggacctataccagccccagcaaaagaagaagaacccacaggctgggaggaaccatccccagaatctatacgtcgcaaaatggagattgatgatggaacttcagcttggggagatccaagcaaatacaactacaaaaatgtgaacatgtggaacaaaaacgtcccaaatggcaacagccgttcagaccagcaagcacaggtacatcagctgctaacgcctgcaagtgccatctcaaacaaagaggcaagcagtggctctggctggggtgagccctggggggagccttctactccagccacaactgtggataatggtacttcagcatggggtaagcccatagacagtggtcccagctggggggaacccattgctgcggcatccagcacatccacgtggggctccagctctgttggtccacaagcattaagcaaatctgggccaaaatctatgcaagatggctggtgtggtgatgatatgccattgcctggaaatcgccccactggctgggaagaggaagaggatgtggagattggaatgtggaatagtaattcatctcaagagcttaactcatctttaaattggccaccatatacaaagaaaatgtcatcgaagggtctgagtggcaaaaaaaggagaagggaaaggggaatgatgaaaggtggaaacaaacaagaagaagcgtggataaatccatttgttaaacagttttcaaacatcagtttttcgagagactcaccagaggaaaatgtacaaagcaataagatggacctttctggaggaatgttacaagacaaacgaatggagatagataaacatagcctaaatattggtgattacaatcgaacggtcgggaaaggccctggttctcggcctcagatttccaaagagtcttccatggagcgcaatccttattttgataaggatggcattgtagcagatgaatcccaaaacatgcagtttatgtccagtcaaagcatgaagcttcccccttcaaatagtgcactacctaaccaggcccttggctccatagcagggctgggtatgcaaaacttgaattctgttagacagaatggcaatcccagtatgtttggtgttggaaacacagcagcacaaccccggggcatgcagcagcctccagcacaacctcttagttcatctcagcctaatctccgtgctcaagtgcctcctccattactctcccctcaggttccagtttcattgctgaagtatgcaccaaacaacggtggcctgaatccactctttggccctcaacaggtagccatgctgaaccagctatcccagctaaaccagctttctcagatctcccagttacagcgattgttagcgcagcagcaaagggcgcagagtcagagaagcgtgccttctgggaaccggccgcagcaagaccagcagggtcgacctcttagtgtgcagcagcaaatgatgcaacaatctcgtcaacttgatccaaacctgttggtgaagcagcagactccaccatctcagcagcagccactccatcagccagccatgaagtctttccttgacaatgtcatgccccacactacacctgagctgcaaaaagggccatcaccaataaatgctttcagcaacttccctataggcttgaactcaaacttgaatgtaaatatggatatgaacagtattaaagagccacagtcaagactaaggaagtggacgacagtggacagcatttctgtgaacacatctttggatcaaaactccagcaaacatggtgctatttcaagtggtttcaggctggaagagtctccatttgttccctatgactttatgaacagcagtacttcaccagccagtcctccaggttcaataggagatggctggccacgtgccaaatcgcctaacggctctagcagtgttaattggccaccagaatttcgtcctggtgagccatggaaaggttatccaaacattgaccctgaaactgacccttacgtcactcctggcagtgtcataaacaatctttcaattaatactgtgcgggaagttgaccacctcagggacaggaacagtgggtcatcctcatccttgaacaccacgctgccttcaactagtgcctggtcatccattcgtgcctccaactacaacgttcccctcagcagtacagcacaaagcacttcagccagaaatagtgattccaaattgacatggtctcctggttcagttacaaacacctctctggctcatgagctgtggaaggtccctttgccacctaaaaacatcactgctccgtcccgcccacctccgggactgactggtcagaagccacccttgtctacgtgggataattctccccttcgtataggtggaggatggggaaattctgacgccagatataccccaggttccagctggggtgagagcagctcagggagaataacaaattggcttgttctaaaaaaccttacacctcagatcgatggctcaactctgcgcactctgtgcatgcagcacggcccgctgatcacattccacctgaacctccctcacggaaatgctctggtccgctacagttcaaaagaagaggtagtgaaggcacaaaagtctctgcacatgtgtgtactggggaacactactattcttgctgagtttgccagtgaagaggagatcagtcgtttctttgcacaaagccagtctctgaccccttctcccggctggcagtctctcgggtccagccagagccggctgggctccctcgactgttcccactcattctccagccggaccgatctcaatcactggaatggtgctgggctgtcgggaactaactgtggagaccttcacggcacttcactctgggggaccccgcattattccacaagcctgtggggtcccccaagcagcagcgacccccgaggaattagcagcccatctcccattaacgcttttctttctgttgaccacctgggtgggggtggagagtccatgtaacagtgtagatgcagactcaccgaccgggacctcagacgcgagggaaaggagcactaagtggggctcgccgcctgcagccaggggccgcctgtgggaacagctattctctgcacattttccactttgttttccccaaaacatatcagtttgaatacttgaatcatgcaggccaatattataatgtgaaaaggtatctactctatttacactcccaaatagcgccatacatgctaaaccgtagagaatgagctcgcttgtgtctattcatcatgtttagcctttggattcttttttttttttccttctattcctccccaacccccccccccgcccctttttttctctcttgcaaaaccattttttgggctgataacgtatgagcttttccctttgcactgaatgatgttctctccgtctcatcggcagtatggggggcagctgtcccagtgtcaatgtttactcaagggtgttcttaggaggcgtgcgctctctactatgccttgatgttgcctaccttattgtggtatcgtggagtttaaaagatcaagttaggatgctgacttaggattattaatgaaagtgttgcaccagttttttcatgttgtaaaactaaagaatttcgctctgcagtttgaaaaactgtggccacagctgtgacttgcagcccacctgccacccaggacgggccctgcactttgaataggctttccattttgttttggaggttctcactttgaaccttcttgtttacagatttttttgtttgttttttgagaaaaaaaaatgtttactcttccatcatttaaaaaaaatgtaaaagacaaaaaaaaaatggaggatgatttaaaagatgctttctatctctgggaaaaaggagcagcatttggccatgttcttttgtttttctattcctgtcccaaatcaaagagcatggttctcaggaaaaccagttccccagtttaaaaaaaaaaaaaaaaattccttgtagtttcttagaggaaaaaaagaaaaaccccaacttttagcactgatactacatattgctctgttaaagaattttctctgccaaaaaaaaagaaaaaacaaaaaaacgcttaaagctggagtttgacattctgctttcagatgctgtctttttattagtgagtgatgatggtttgctaataatcaataggtaataattttttgtaatcccatcaagtggctccatatgtttctgctctctcgtgactgtgttaatgtttaactgttgtaccttaaagccgaaatcagtaactatgcatactgtaaccaaggtattgggcttacagagttgtttgttgtataaagaaaattttaaatgttgttgcaaactaacgagttacaccattttaaactttctttcctcccccctttttttgcccacaaatggtattataatgcttgcttagtcaaagaagagagactaaacaagggtaaaaattttaacagtacagaatttgccatcatatcattgccttgattctaactgtttgtgtcctaagatgcaaaagaagtcagtggcttttaactgtttacaaatagaatgtgattgtaaaatgtacagtttggttgtgtttgaattatgaaatttcttcagatataataaaccatgactttttggctgctcaacattaattgtctcctttttgtgaatttatttgtaggctcttttttataatgaaagtttcaaagttgctatgtatgagggttctcatagagcaaccgattaaaaatctaagcaaatatttgaacattttatctgaactcatcacaatttcaccctgaaataatgtgagaacaatgggaaactgtagcttgctccttcccaccctctctgagcatctttgggatcttgttgctcaaaactcttctgtgacttcatcttccccaccatttgtgcccatctcaagcctcagcaagaaaaccatgtctggaaatgtttggagcgttaagctgattgaccttctgaccttggggctttgagtagtatataattcataactgcgttaattgtattgttaaagtgtttgggagttttttgcgcttgttatgtggaaataaagtgtttgatttaaaatttaaaaaaaaaaatt

SEQ ID NO: 326788 - DNA, 3510 bp, Homo sapiens
aactaattttaaatttccgtttccagaatttcgtcctggtgagccatggaaaggttatccaaacattgaccctgaaactgacccttacgtcactcctggcagtgtcataaacaatctttcaattaatactgtgcgggaagttgaccacctcagggacaggaacagtgggtcatcctcatccttgaacaccacgctgccttcaactagtgcctggtcatccattcgtgcctccaactacaacgttcccctcagcagtacagcacaaagcacttcagccagaaatagtgattccaaattgacatggtctcctggttcagttacaaacacctctctggctcatgagctgtggaaggtccctttgccacctaaaaacatcactgctccgtcccgcccacctccgggactgactggtcagaagccacccttgtctacgtgggataattctccccttcgtataggtggaggatggggaaattctgacgccagatataccccaggttccagctggggtgagagcagctcagggagaataacaaattggcttgttctaaaaaaccttacacctcagatcgatggctcaactctgcgcactctgtgcatgcagcacggcccgctgatcacattccacctgaacctccctcacggaaatgctctggtccgctacagttcaaaagaagaggtagtgaaggcacaaaagtctctgcacatgtgtgtactggggaacactactattcttgctgagtttgccagtgaagaggagatcagtcgtttctttgcacaaagccagtctctgaccccttctcccggctggcagtctctcgggtccagccagagccggctgggctccctcgactgttcccactcattctccagccggaccgatctcaatcactggaatggtgctgggctgtcgggaactaactgtggagaccttcacggcacttcactctgggggaccccgcattattccacaagcctgtggggtcccccaagcagcagcgacccccgaggaattagcagcccatctcccattaacgcttttctttctgttgaccacctgggtgggggtggagagtccatgtaacagtgtagatgcagactcaccgaccgggacctcagacgcgagggaaaggagcactaagtggggctcgccgcctgcagccaggggccgcctgtgggaacagctattctctgcacattttccactttgttttccccaaaacatatcagtttgaatacttgaatcatgcaggccaatattataatgtgaaaaggtatctactctatttacactcccaaatagcgccatacatgctaaaccgtagagaatgagctcgcttgtgtctattcatcatgtttagcctttggattcttttttttttttccttctattcctccccaacccccccccccgcccctttttttctctcttgcaaaaccattttttgggctgataacgtatgagcttttccctttgcactgaatgatgttctctccgtctcatcggcagtatggggggcagctgtcccagtgtcaatgtttactcaagggtgttcttaggaggcgtgcgctctctactatgccttgatgttgcctaccttattgtggtatcgtggagtttaaaagatcaagttaggatgctgacttaggattattaatgaaagtgttgcaccagttttttcatgttgtaaaactaaagaatttcgctctgcagtttgaaaaactgtggccacagctgtgacttgcagcccacctgccacccaggacgggccctgcactttgaataggctttccattttgttttggaggttctcactttgaaccttcttgtttacagatttttttgtttgttttttgagaaaaaaaaatgtttactcttccatcatttaaaaaaaatgtaaaagacaaaaaaaaaatggaggatgatttaaaagatgctttctatctctgggaaaaaggagcagcatttggccatgttcttttgtttttctattcctgtcccaaatcaaagagcatggttctcaggaaaaccagttccccagtttaaaaaaaaaaaaaaaaattccttgtagtttcttagaggaaaaaaagaaaaaccccaacttttagcactgatactacatattgctctgttaaagaattttctctgccaaaaaaaaagaaaaaacaaaaaaacgcttaaagctggagtttgacattctgctttcagatgctgtctttttattagtgagtgatgatggtttgctaataatcaataggtaataattttttgtaatcccatcaagtggctccatatgtttctgctctctcgtgactgtgttaatgtttaactgttgtaccttaaagccgaaatcagtaactatgcatactgtaaccaaggtattgggcttacagagttgtttgttgtataaagaaaattttaaatgttgttgcaaactaacgagttacaccattttaaactttctttcctcccccctttttttgcccacaaatggtattataatgcttgcttagtcaaagaagagagactaaacaagggtaaaaattttaacagtacagaatttgccatcatatcattgccttgattctaactgtttgtgtcctaagatgcaaaagaagtcagtggcttttaactgtttacaaatagaatgtgattgtaaaatgtacagtttggttgtgtttgaattatgaaatttcttcagatataataaaccatgactttttggctgctcaacattaattgtctcctttttgtgaatttatttgtaggctcttttttataatgaaagtttcaaagttgctatgtatgagggttctcatagagcaaccgattaaaaatctaagcaaatatttgaacattttatctgaactcatcacaatttcaccctgaaataatgtgagaacaatgggaaactgtagcttgctccttcccaccctctctgagcatctttgggatcttgttgctcaaaactcttctgtgacttcatcttccccaccatttgtgcccatctcaagcctcagcaagaaaccatgtggaacatgaagcttaatgacttgacagtgtactagtgttaaactctcatacctctgttacaaagcgagaaacgccacacccggactggccttttcttcccccttcacggccctcgcttctccctgcaggagctcgggggcgaaacctgtgtatggatttcagtgtatgacttcagatcatgctccaacttgccaggtgtgagctaatgttgtcggacaccttactataagcaaatgttattcagtgcgttcaatgtatattgacttccatactggtttttccaaaaaccaaaggtagctttgaaaaaccatgtctggaaatgtttggagcgttaagctgattgaccttctgaccttggggctttgagtagtatataattcataactgcgttaattgtattgttaaagtgtttgggagttttttgcgcttgttatgtggaaataaagtgtttgatttaaaatttaaaaaaaaaaatt

SEQ ID NO: 326789 - DNA, 6130 bp, Homo sapiens
  misc_feature (6119)..(6119): n is a, c, g, or t
tgcctaacaatcagagtattaactctaaagtgagtggtggttctacccatggtacctggggaagccttcaggaaacttgtgaatctgaagtaagtggtacacagaaggtttcattcagtggtcaacctcaaaatattaccactgaaatgactggaccaaataacactactaactttatgacctctagtttaccaaactccggttcagtgcagaataatgagctgcctagtagtaacacaggggcctggcgtgtgagcacaatgaatcatcctcagatgcaggctccatcaggtatgaatggcacttccctttctcaccttagcaatggagagtcaaaaagtggaggctcttatggtactacatggggtgcctatggttctaattactctggagacaaatgttcaggccctaatggccaagctaatggtgacactgtgaatgcaactctaatgcagcctggcgtaaatggtcctatgggcactaactttcaagttaacacaaacaaaggaggtggtgtgtgggaatctggtgcagcaaactcccagagtacatcatggggaagtggaaatggcgcaaattctggaggaagtcgaagaggatggggaacccctgcacaaaacactggcactaatttacccagcgttgagtggaacaaactgcctagcaatcagcattccaatgatagtgcaaatggcaatggtaagacgtttacaaatggatggaaatctactgaggaagaggatcagggttctgccacatctcagacaaatgagcaaagcagtgtgtgggccaaaacaggaggtacagtggagagcgatggtagtacagaaagcactggacgccttgaggaaaaaggaactggggaaagtcagagtagagacagaagaaaaattgatcagcacacattactccaaagcattgtaaacagaactgacttagatccacgtgtcctgtccaactctggttggggacagactcctattaagcagaatactgcctgggatacagaaacatcacctagaggggaacgaaagactgacaatgggacagaggcctggggaagctctgcaacacagacttttaactcaggggcatgtatagataagactagccctaatggtaatgatacctcatctgtatcagggtggggcgatcccaaacctgctctgaggtggggagattccaaaggctcaaactgccagggggggtgggaagatgattctgctgctacaggaatggtcaagagcaatcagtgggggaattgcaaagaggagaaggctgcatggaatgactcgcaaaagaataaacagggatggggtgatggacaaaaatcaagccaagggtggtctgtttctgccagtgataactggggagaaacttcaaggaataaccattggggtgaggccaataagaaatccagctcaggaggtagtgacagtgacaggtccgtttccggttggaacgaacttggtaaaactagttctttcacttggggaaacaacataaatccaaataattcatcaggatgggatgaatcttctaaacctactccttcccagggatggggagaccctccaaagtctaatcagtctctaggttggggagattcgtcaaagccagtcagctctccagactggaacaagcaacaagacattgttggatcttggggaatcccaccagctacaggcaaacctcctggtacaggctggctggggggacctataccagccccagcaaaagaagaagaacccacaggctgggaggaaccatccccagaatctatacgtcgcaaaatggagattgatgatggaacttcagcttggggagatccaagcaaatacaactacaaaaatgtgaacatgtggaacaaaaacgtcccaaatggcaacagccgttcagaccagcaagcacaggtacatcagctgctaacgcctgcaagtgccatctcaaacaaagaggcaagcagtggctctggctggggtgagccctggggggagccttctactccagccacaactgtggataatggtacttcagcatggggtaagcccatagacagtggtcccagctggggggaacccattgctgcggcatccagcacatccacgtggggctccagctctgttggtccacaagcattaagcaaatctgggccaaaatctatgcaagatggctggtgtggtgatgatatgccattgcctggaaatcgccccactggctgggaagaggaagaggatgtggagattggaatgtggaatagtaattcatctcaagagcttaactcatctttaaattggccaccatatacaaagaaaatgtcatcgaagggtctgagtggcaaaaaaaggagaagggaaaggggaatgatgaaaggtggaaacaaacaagaagaagcgtggataaatccatttgttaaacagttttcaaacatcagtttttcgagagactcaccagaggaaaatgtacaaagcaataagatggacctttctggaggaatgttacaagacaaacgaatggagatagataaacatagcctaaatattggtgattacaatcgaacggtcgggaaaggccctggttctcggcctcagatttccaaagagtcttccatggagcgcaatccttattttgataaggatggcattgtagcagatgaatcccaaaacatgcagtttatgtccagtcaaagcatgaagcttcccccttcaaatagtgcactacctaaccaggcccttggctccatagcagggctgggtatgcaaaacttgaattctgttagacagaatggcaatcccagtatgtttggtgttggaaacacagcagcacaaccccggggcatgcagcagcctccagcacaacctcttagttcatctcagcctaatctccgtgctcaagtgcctcctccattactctcccctcaggttccagtttcattgctgaagtatgcaccaaacaacggtggcctgaatccactctttggccctcaacaggtagccatgctgaaccagctatcccagctaaaccagctttctcagatctcccagttacagcgattgttagcgcagcagcaaagggcgcagagtcagagaagcgtgccttctgggaaccggccgcagcaagaccagcagggtcgacctcttagtgtgcagcagcaaatgatgcaacaatctcgtcaacttgatccaaacctgttggtgaagcagcagactccaccatctcagcagcagccactccatcagccagccatgaagtctttccttgacaatgtcatgccccacactacacctgagctgcaaaaagggccatcaccaataaatgctttcagcaacttccctataggcttgaactcaaacttgaatgtaaatatggatatgaacagtattaaagagccacagtcaagactaaggaagtggacgacagtggacagcatttctgtgaacacatctttggatcaaaactccagcaaacatggtgctatttcaagtggtttcaggctggaagagtctccatttgttccctatgactttatgaacagcagtacttcaccagccagtcctccaggttcaataggagatggctggccacgtgccaaatcgcctaacggctctagcagtgttaattggccaccagaatttcgtcctggtgagccatggaaaggttatccaaacattgaccctgaaactgacccttacgtcactcctggcagtgtcataaacaatctttcaattaatactgtgcgggaagttgaccacctcagggacaggaacagtgggtcatcctcatccttgaacaccacgctgccttcaactagtgcctggtcatccattcgtgcctccaactacaacgttcccctcagcagtacagcacaaagcacttcagccagaaatagtgattccaaattgacatggtctcctggttcagttacaaacacctctctggctcatgagctgtggaaggtccctttgccacctaaaaacatcactgctccgtcccgcccacctccgggactgactggtcagaagccacccttgtctacgtgggataattctccccttcgtataggtggaggatggggaaattctgacgccagatataccccaggttccagctggggtgagagcagctcagggagaataacaaattggcttgttctaaaaaaccttacacctcagatcgatggctcaactctgcgcactctgtgcatgcagcacggcccgctgatcacattccacctgaacctccctcacggaaatgctctggtccgctacagttcaaaagaagaggtagtgaaggcacaaaagtctctgcacatgtgtgtactggggaacactactattcttgctgagtttgccagtgaagaggagatcagtcgtttctttgcacaaagccagtctctgaccccttctcccggctggcagtctctcgggtccagccagagccggctgggctccctcgactgttcccactcattctccagccggaccgatctcaatcactggaatggtgctgggctgtcgggaactaactgtggagaccttcacggcacttcactctgggggaccccgcattattccacaagcctgtggggtcccccaagcagcagcgacccccgaggaattagcagcccatctcccattaacgcttttctttctgttgaccacctgggtgggggtggagagtccatgtaacagtgtagatgcagactcaccgaccgggacctcagacgcgagggaaaggagcactaagtggggctcgccgcctgcagccaggggccgcctgtgggaacagctattctctgcacattttccactttgttttccccaaaacatatcagtttgaatacttgaatcatgcaggccaatattataatgtgaaaaggtatctactctatttacactcccaaatagcgccatacatgctaaaccgtagagaatgagctcgcttgtgtctattcatcatgtttagcctttggattcttttttttttttccttctattcctccccaacccccccccccgcccctttttttctctcttgcaaaaccattttttgggctgataacgtatgagcttttccctttgcactgaatgatgttctctccgtctcatcggcagtatggggggcagctgtcccagtgtcaatgtttactcaagggtgttcttaggaggcgtgcgctctctactatgccttgatgttgcctaccttattgtggtatcgtggagtttaaaagatcaagttaggatgctgacttaggattattaatgaaagtgttgcaccagttttttcatgttgtaaaactaaagaatttcgctctgcagtttgaaaaactgtggccacagctgtgacttgcagcccacctgccacccaggacgggccctgcactttgaataggctttccattttgttttggaggttctcactttgaaccttcttgtttacagatttttttgtttgttttttgagaaaaaaaaatgtttactcttccatcatttaaaaaaaatgtaaaagacaaaaaaaaaatggaggatgatttaaaagatgctttctatctctgggaaaaaggagcagcatttggccatgttcttttgtttttctattcctgtcccaaatcaaagagcatggttctcaggaaaaccagttccccagtttaaaaaaaaaaaaaaaaattccttgtagtttcttagaggaaaaaaagaaaaaccccaacttttagcactgatactacatattgctctgttaaagaattttctctgccaaaaaaaaagaaaaaacaaaaaaacgcttaaagctggagtttgacattctgctttcagatgctgtctttttattagtgagtgatgatggtttgctaataatcaataggtaataattttttgtaatcccatcaagtggctccatatgtttctgctctctcgtgactgtgttaatgtttaactgttgtaccttaaagccgaaatcagtaactatgcatactgtaaccaaggtattgggcttacagagttgtttgttgtataaagaaaattttaaatgttgttgcaaactaacgagttacaccattttaaactttctttcctcccccctttttttgtcacctcgggatcctctgaacgctatgaccngatacgacccg

SEQ ID NO: 326790 - DNA, 4193 bp, Homo sapiens
tgcctaacaatcagagtattaactctaaagtgagtggtggttctacccatggtacctggggaagccttcaggaaacttgtgaatctgaagtaagtggtacacagaaggtttcattcagtggtcaacctcaaaatattaccactgaaatgactggaccaaataacactactaactttatgacctctagtttaccaaactccggttcagtgcagaataatgagctgcctagtagtaacacaggggcctggcgtgtgagcacaatgaatcatcctcagatgcaggctccatcaggtatgaatggcacttccctttctcaccttagcaatggagagtcaaaaagtggaggctcttatggtactacatggggtgcctatggttctaattactctggagacaaatgttcaggccctaatggccaagctaatggtgacactgtgaatgcaactctaatgcagcctggcgtaaatggtcctatgggcactaactttcaagttaacacaaacaaaggaggtggtgtgtgggaatctggtgcagcaaactcccagagtacatcatggggaagtggaaatggcgcaaattctggaggaagtcgaagaggatggggaacccctgcacaaaacactggcactaatttacccagcgttgagtggaacaaactgcctagcaatcagcattccaatgatagtgcaaatggcaatggtaagacgtttacaaatggatggaaatctactgaggaagaggatcagggttctgccacatctcagacaaatgagcaaagcagtgtgtgggccaaaacaggaggtacagtggagagcgatggtagtacagaaagcactggacgccttgaggaaaaaggaactggggaaagtcagagtagagacagaagaaaaattgatcagcacacattactccaaagcattgtaaacagaactgacttagatccacgtgtcctgtccaactctggttggggacagactcctattaagcagaatactgcctgggatacagaaacatcacctagaggggaacgaaagactgacaatgggacagaggcctggggaagctctgcaacacagacttttaactcaggggcatgtatagataagactagccctaatggtaatgatacctcatctgtatcagggtggggcgatcccaaacctgctctgaggtggggagattccaaaggctcaaactgccagggggggtgggaagatgattctgctgctacaggaatggtcaagagcaatcagtgggggaattgcaaagaggagaaggctgcatggaatgactcgcaaaagaataaacagggatggggtgatggacaaaaatcaagccaagggtggtctgtttctgccagtgataactggggagaaacttcaaggaataaccattggggtgaggccaataagaaatccagctcaggaggtagtgacagtgacaggtccgtttccggttggaacgaacttggtaaaactagttctttcacttggggaaacaacataaatccaaataattcatcaggatgggatgaatcttctaaacctactccttcccagggatggggagaccctccaaagtctaatcagtctctaggttggggagattcgtcaaagccagtcagctctccagactggaacaagcaacaagacattgttggatcttggggaatcccaccagctacaggcaaacctcctggtacaggctggctggggggacctataccagccccagcaaaagaagaagaacccacaggctgggaggaaccatccccagaatctatacgtcgcaaaatggagattgatgatggaacttcagcttggggagatccaagcaaatacaactacaaaaatgtgaacatgtggaacaaaaacgtcccaaatggcaacagccgttcagaccagcaagcacaggtacatcagctgctaacgcctgcaagtgccatctcaaacaaagaggcaagcagtggctctggctggggtgagccctggggggagccttctactccagccacaactgtggataatggtacttcagcatggggtaagcccatagacagtggtcccagctggggggaacccattgctgcggcatccagcacatccacgtggggctccagctctgttggtccacaagcattaagcaaatctgggccaaaatctatgcaagatggctggtgtggtgatgatatgccattgcctggaaatcgccccactggctgggaagaggaagaggatgtggagattggaatgtggaatagtaattcatctcaagagcttaactcatctttaaattggccaccatatacaaagaaaatgtcatcgaagggtctgagtggcaaaaaaaggagaagggaaaggggaatgatgaaaggtggaaacaaacaagaagaagcgtggataaatccatttgttaaacagttttcaaacatcagtttttcgagagactcaccagaggaaaatgtacaaagcaataagatggacctttctggaggaatgttacaagacaaacgaatggagatagataaacatagcctaaatattggtgattacaatcgaacggtcgggaaaggccctggttctcggcctcagatttccaaagagtcttccatggagcgcaatccttattttgataaggatggcattgtagcagatgaatcccaaaacatgcagtttatgtccagtcaaagcatgaagcttcccccttcaaatagtgcactacctaaccaggcccttggctccatagcagggctgggtatgcaaaacttgaattctgttagacagaatggcaatcccagtatgtttggtgttggaaacacagcagcacaaccccggggcatgcagcagcctccagcacaacctcttagttcatctcagcctaatctccgtgctcaagtgcctcctccattactctcccctcaggttccagtttcattgctgaagtatgcaccaaacaacggtggcctgaatccactctttggccctcaacaggtagccatgctgaaccagctatcccagctaaaccagctttctcagatctcccagttacagcgattgttagcgcagcagcaaagggcgcagagtcagagaagcgtgccttctgggaaccggccgcagcaagaccagcagggtcgacctcttagtgtgcagcagcaaatgatgcaacaatctcgtcaacttgatccaaacctgttggtgaagcagcagactccaccatctcagcagcagccactccatcagccagccatgaagtctttccttgacaatgtcatgccccacactacacctgagctgcaaaaagggccatcaccaataaatgctttcagcaacttccctataggcttgaactcaaacttgaatgtaaatatggatatgaacagtattaaagagccacagtcaagactaaggaagtggacgacagtggacagcatttctgtgaacacatctttggatcaaaactccagcaaacatggtgctatttcaagtggtttcaggctggaagagtctccatttgttccctatgactttatgaacagcagtacttcaccagccagtcctccaggttcaataggagatggctggccacgtgccaaatcgcctaacggctctagcagtgttaattggccaccagaatttcgtcctggtgagccatggaaaggttatccaaacattgaccctgaaactgacccttacgtcactcctggcagtgtcataaacaatctttcaattaatactgtgcgggaagttgaccacctcagggacaggaacagtgggtcatcctcatccttgaacaccacgctgccttcaactagtgcctggtcatccattcgtgcctccaactacaacgttcccctcagcagtacagcacaaagcacttcagccagaaatagtgattccaaattgacatggtctcctggttcagttacaaacacctctctggctcatgagctgtggaaggtccaggtatgcctttttaattgagggttagggagtcataataccgacaaagatggtaaaaggaatttgaggagaaaatgaaagcacaagggacaaataagaactgcctgggttattcattattcatactgactccctaattaagtgattttcagtttgaatgttattgccgcccttgcctatcctccgcttacagtgcttatttttttaagggaccagaatcacagctagattttc

SEQ ID NO: 326791 - DNA, 3499 bp, Homo sapiens
tgcctaacaatcagagtattaactctaaagtgagtggtggttctacccatggtacctggggaagccttcaggaaacttgtgaatctgaagtaagtggtacacagaaggtttcattcagtggtcaacctcaaaatattaccactgaaatgactggaccaaataacactactaactttatgacctctagtttaccaaactccggttcagtgcagaataatgagctgcctagtagtaacacaggggcctggcgtgtgagcacaatgaatcatcctcagatgcaggctccatcaggtatgaatggcacttccctttctcaccttagcaatggagagtcaaaaagtggaggctcttatggtactacatggggtgcctatggttctaattactctggagacaaatgttcaggccctaatggccaagctaatggtgacactgtgaatgcaactctaatgcagcctggcgtaaatggtcctatgggcactaactttcaagttaacacaaacaaaggaggtggtgtgtgggaatctggtgcagcaaactcccagagtacatcatggggaagtggaaatggcgcaaattctggaggaagtcgaagaggatggggaacccctgcacaaaacactggcactaatttacccagcgttgagtggaacaaactgcctagcaatcagcattccaatgatagtgcaaatggcaatggtaagacgtttacaaatggatggaaatctactgaggaagaggatcagggttctgccacatctcagacaaatgagcaaagcagtgtgtgggccaaaacaggaggtacagtggagagcgatggtagtacagaaagcactggacgccttgaggaaaaaggaactggggaaagtcagagtagagacagaagaaaaattgatcagcacacattactccaaagcattgtaaacagaactgacttagatccacgtgtcctgtccaactctggttggggacagactcctattaagcagaatactgcctgggatacagaaacatcacctagaggggaacgaaagactgacaatgggacagaggcctggggaagctctgcaacacagacttttaactcaggggcatgtatagataagactagccctaatggtaatgatacctcatctgtatcagggtggggcgatcccaaacctgctctgaggtggggagattccaaaggctcaaactgccagggggggtgggaagatgattctgctgctacaggaatggtcaagagcaatcagtgggggaattgcaaagaggagaaggctgcatggaatgactcgcaaaagaataaacagggatggggtgatggacaaaaatcaagccaagggtggtctgtttctgccagtgataactggggagaaacttcaaggaataaccattggggtgaggccaataagaaatccagctcaggaggtagtgacagtgacaggtccgtttccggttggaacgaacttggtaaaactagttctttcacttggggaaacaacataaatccaaataattcatcaggatgggatgaatcttctaaacctactccttcccagggatggggagaccctccaaagtctaatcagtctctaggttggggagattcgtcaaagccagtcagctctccagactggaacaagcaacaagacattgttggatcttggggaatcccaccagctacaggcaaacctcctggtacaggctggctggggggacctataccagccccagcaaaagaagaagaacccacaggctgggaggaaccatccccagaatctatacgtcgcaaaatggagattgatgatggaacttcagcttggggagatccaagcaaatacaactacaaaaatgtgaacatgtggaacaaaaacgtcccaaatggcaacagccgttcagaccagcaagcacaggtacatcagctgctaacgcctgcaagtgccatctcaaacaaagaggcaagcagtggctctggctggggtgagccctggggggagccttctactccagccacaactgtggataatggtacttcagcatggggtaagcccatagacagtggtcccagctggggggaacccattgctgcggcatccagcacatccacgtggggctccagctctgttggtccacaagcattaagcaaatctgggccaaaatctatgcaagatggctggtgtggtgatgatatgccattgcctggaaatcgccccactggctgggaagaggaagaggatgtggagattggaatgtggaatagtaattcatctcaagagcttaactcatctttaaattggccaccatatacaaagaaaatgtcatcgaagggtctgagtggcaaaaaaaggagaagggaaaggggaatgatgaaaggtggaaacaaacaagaagaagcgtggataaatccatttgttaaacagttttcaaacatcagtttttcgagagactcaccagaggaaaatgtacaaagcaataagatggacctttctggaggaatgttacaagacaaacgaatggagatagataaacatagcctaaatattggtgattacaatcgaacggtcgggaaaggccctggttctcggcctcagatttccaaagagtcttccatggagcgcaatccttattttgataaggatggcattgtagcagatgaatcccaaaacatgcagtttatgtccagtcaaagcatgaagcttcccccttcaaatagtgcactacctaaccaggcccttggctccatagcagggctgggtatgcaaaacttgaattctgttagacagaatggcaatcccagtatgtttggtgttggaaacacagcagcacaaccccggggcatgcagcagcctccagcacaacctcttagttcatctcagcctaatctccgtgctcaagtgcctcctccattactctcccctcaggttccagtttcattgctgaagtatgcaccaaacaacggtggcctgaatccactctttggccctcaacaggtagccatgctgaaccagctatcccagctaaaccagctttctcagatctcccagttacagcgattgttagcgcagcagcaaagggcgcagagtcagagaagcgtgccttctgggaaccggccgcagcaagaccagcagggtcgacctcttagtgtgcagcagcaaatgatgcaacaatctcgtcaacttgatccaaacctgttggtgaagcagcagactccaccatctcagcagcagccactccatcagccagccatgaagtctttccttgacaatgtcatgccccacactacacctgagctgcaaaaagggccatcaccaataaatgctttcagcaacttccctataggcttgaactcaaacttgaatgtaaatatggatatgaacagtattaaagagccacagtcaagactaaggaagtggacgacagtggacagcatttctgtgaacacatctttggatcaaaactccagcaaacatggtacaaaagatacatcttaccaaaaaaa

SEQ ID NO: 326792 - DNA, 2654 bp, Homo sapiens
tgcctaacaatcagagtattaactctaaagtgagtggtggttctacccatggtacctggggaagccttcaggaaacttgtgaatctgaagtaagtggtacacagaaggtttcattcagtggtcaacctcaaaatattaccactgaaatgactggaccaaataacactactaactttatgacctctagtttaccaaactccggttcagtgcagaataatgagctgcctagtagtaacacaggggcctggcgtgtgagcacaatgaatcatcctcagatgcaggctccatcaggtatgaatggcacttccctttctcaccttagcaatggagagtcaaaaagtggaggctcttatggtactacatggggtgcctatggttctaattactctggagacaaatgttcaggccctaatggccaagctaatggtgacactgtgaatgcaactctaatgcagcctggcgtaaatggtcctatgggcactaactttcaagttaacacaaacaaaggaggtggtgtgtgggaatctggtgcagcaaactcccagagtacatcatggggaagtggaaatggcgcaaattctggaggaagtcgaagaggatggggaacccctgcacaaaacactggcactaatttacccagcgttgagtggaacaaactgcctagcaatcagcattccaatgatagtgcaaatggcaatggtaagacgtttacaaatggatggaaatctactgaggaagaggatcagggttctgccacatctcagacaaatgagcaaagcagtgtgtgggccaaaacaggaggtacagtggagagcgatggtagtacagaaagcactggacgccttgaggaaaaaggaactggggaaagtcagagtagagacagaagaaaaattgatcagcacacattactccaaagcattgtaaacagaactgacttagatccacgtgtcctgtccaactctggttggggacagactcctattaagcagaatactgcctgggatacagaaacatcacctagaggggaacgaaagactgacaatgggacagaggcctggggaagctctgcaacacagacttttaactcaggggcatgtatagataagactagccctaatggtaatgatacctcatctgtatcagggtggggcgatcccaaacctgctctgaggtggggagattccaaaggctcaaactgccagggggggtgggaagatgattctgctgctacaggaatggtcaagagcaatcagtgggggaattgcaaagaggagaaggctgcatggaatgactcgcaaaagaataaacagggatggggtgatggacaaaaatcaagccaagggtggtctgtttctgccagtgataactggggagaaacttcaaggaataaccattggggtgaggccaataagaaatccagctcaggaggtagtgacagtgacaggtccgtttccggttggaacgaacttggtaaaactagttctttcacttggggaaacaacataaatccaaataattcatcaggatgggatgaatcttctaaacctactccttcccagggatggggagaccctccaaagtctaatcagtctctaggttggggagattcgtcaaagccagtcagctctccagactggaacaagcaacaagacattgttggatcttggggaatcccaccagctacaggcaaacctcctggtacaggctggctggggggacctataccagccccagcaaaagaagaagaacccacaggctgggaggaaccatccccagaatctatacgtcgcaaaatggagattgatgatggaacttcagcttggggagatccaagcaaatacaactacaaaaatgtgaacatgtggaacaaaaacgtcccaaatggcaacagccgttcagaccagcaagcacaggtacatcagctgctaacgcctgcaagtgccatctcaaacaaagaggcaagcagtggctctggctggggtgagccctggggggagccttctactccagccacaactgtggataatggtacttcagcatggggtaagcccatagacagtggtcccagctggggggaacccattgctgcggcatccagcacatccacgtggggctccagctctgttggtccacaagcattaagcaaatctgggccaaaatctatgcaagatggctggtgtggtgatgatatgccattgcctggaaatcgccccactggctgggaagaggaagaggatgtggagattggaatgtggaatagtaattcatctcaagagcttaactcatctttaaattggccaccatatacaaagaaaatgtcatcgaagggtctgagtggcaaaaaaaggagaagggaaaggggaatgatgaaaggtggaaacaaacaagaagaagcgtggataaatccatttgttaaacagttttcaaacatcagtttttcgagagactcaccagaggaaaatgtacaaagcaataagatggacctttctggaggtaagagaaaattaaatctgtttatattcctcattgagggacacgcacatccatgacatgattctactgaaagagccctgacgtagatcaggacaggggaggctgtgctctccaatagacgtacacatgctgtggttaaatgagtgcatgtgccttgaaag

SEQ ID NO: 326793 - DNA, 101 bp, Homo sapiens
tgtggcttttctagcagagacaagttgcaccctcacttgtgagtgaatgaagccctcctggtgtgctgtcctcacgtgtccgcggtgcctctctcctctag

SEQ ID NO: 326794 - DNA, 439 bp, Homo sapiens
agagtattagtgtaaattggaaagtatttgagagttgcataggattcaggaataaaggttttggatatttattaatggattttaaaatgatgattaagctttgaactaattttaaatttccgtttccagaatttcgtcctggtgagccatggaaaggttatccaaacattgaccctgaaactgacccttacgtcactcctggcagtgtcataaacaatctttcaattaatactgtgcgggaagttgaccacctcagggacaggaacagtggtacgtagggggtgcaaatcaatttctgagtgacacttaacacagtttaagaatggctcatgtagtacccagctactctgggcgactgagcccagggtactctgggatcacttgagcccaggagcttgaggcaagcctgggcaacatagttgtgggaccctgtctcttt

SEQ ID NO: 326795 - DNA, 7114 bp, Homo sapiens
tgcctaacaatcagagtattaactctaaagtgagtggtggttctacccatggtacctggggaagccttcaggaaacttgtgaatctgaagtaagtggtacacagaaggtttcattcagtggtcaacctcaaaatattaccactgaaatgactggaccaaataacactactaactttatgacctctagtttaccaaactccggttcagtgcagaataatgagctgcctagtagtaacacaggggcctggcgtgtgagcacaatgaatcatcctcagatgcaggctccatcaggtatgaatggcacttccctttctcaccttagcaatggagagtcaaaaagtggaggctcttatggtactacatggggtgcctatggttctaattactctggagacaaatgttcaggccctaatggccaagctaatggtgacactgtgaatgcaactctaatgcagcctggcgtaaatggtcctatgggcactaactttcaagttaacacaaacaaaggaggtggtgtgtgggaatctggtgcagcaaactcccagagtacatcatggggaagtggaaatggcgcaaattctggaggaagtcgaagaggatggggaacccctgcacaaaacactggcactaatttacccagcgttgagtggaacaaactgcctagcaatcagcattccaatgatagtgcaaatggcaatggtaagacgtttacaaatggatggaaatctactgaggaagaggatcagggttctgccacatctcagacaaatgagcaaagcagtgtgtgggccaaaacaggaggtacagtggagagcgatggtagtacagaaagcactggacgccttgaggaaaaaggaactggggaaagtcagagtagagacagaagaaaaattgatcagcacacattactccaaagcattgtaaacagaactgacttagatccacgtgtcctgtccaactctggttggggacagactcctattaagcagaatactgcctgggatacagaaacatcacctagaggggaacgaaagactgacaatgggacagaggcctggggaagctctgcaacacagacttttaactcaggggcatgtatagataagactagccctaatggtaatgatacctcatctgtatcagggtggggcgatcccaaacctgctctgaggtggggagattccaaaggctcaaactgccagggggggtgggaagatgattctgctgctacaggaatggtcaagagcaatcagtgggggaattgcaaagaggagaaggctgcatggaatgactcgcaaaagaataaacagggatggggtgatggacaaaaatcaagccaagggtggtctgtttctgccagtgataactggggagaaacttcaaggaataaccattggggtgaggccaataagaaatccagctcaggaggtagtgacagtgacaggtccgtttccggttggaacgaacttggtaaaactagttctttcacttggggaaacaacataaatccaaataattcatcaggatgggatgaatcttctaaacctactccttcccagggatggggagaccctccaaagtctaatcagtctctaggttggggagattcgtcaaagccagtcagctctccagactggaacaagcaacaagacattgttggatcttggggaatcccaccagctacaggcaaacctcctggtacaggctggctggggggacctataccagccccagcaaaagaagaagaacccacaggctgggaggaaccatccccagaatctatacgtcgcaaaatggagattgatgatggaacttcagcttggggagatccaagcaaatacaactacaaaaatgtgaacatgtggaacaaaaacgtcccaaatggcaacagccgttcagaccagcaagcacaggtacatcagctgctaacgcctgcaagtgccatctcaaacaaagaggcaagcagtggctctggctggggtgagccctggggggagccttctactccagccacaactgtggataatggtacttcagcatggggtaagcccatagacagtggtcccagctggggggaacccattgctgcggcatccagcacatccacgtggggctccagctctgttggtccacaagcattaagcaaatctgggccaaaatctatgcaagatggctggtgtggtgatgatatgccattgcctggaaatcgccccactggctgggaagaggaagaggatgtggagattggaatgtggaatagtaattcatctcaagagcttaactcatctttaaattggccaccatatacaaagaaaatgtcatcgaagggtctgagtggcaaaaaaaggagaagggaaaggggaatgatgaaaggtggaaacaaacaagaagaagcgtggataaatccatttgttaaacagttttcaaacatcagtttttcgagagactcaccagaggaaaatgtacaaagcaataagatggacctttctggaggaatgttacaagacaaacgaatggagatagataaacatagcctaaatattggtgattacaatcgaacggtcgggaaaggccctggttctcggcctcagatttccaaagagtcttccatggagcgcaatccttattttgataaggatggcattgtagcagatgaatcccaaaacatgcagtttatgtccagtcaaagcatgaagcttcccccttcaaatagtgcactacctaaccaggcccttggctccatagcagggctgggtatgcaaaacttgaattctgttagacagaatggcaatcccagtatgtttggtgttggaaacacagcagcacaaccccggggcatgcagcagcctccagcacaacctcttagttcatctcagcctaatctccgtgctcaagtgcctcctccattactctcccctcaggttccagtttcattgctgaagtatgcaccaaacaacggtggcctgaatccactctttggccctcaacaggtagccatgctgaaccagctatcccagctaaaccagctttctcagatctcccagttacagcgattgttagcgcagcagcaaagggcgcagagtcagagaagcgtgccttctgggaaccggccgcagcaagaccagcagggtcgacctcttagtgtgcagcagcaaatgatgcaacaatctcgtcaacttgatccaaacctgttggtgaagcagcagactccaccatctcagcagcagccactccatcagccagccatgaagtctttccttgacaatgtcatgccccacactacacctgagctgcaaaaagggccatcaccaataaatgctttcagcaacttccctataggcttgaactcaaacttgaatgtaaatatggatatgaacagtattaaagagccacagtcaagactaaggaagtggacgacagtggacagcatttctgtgaacacatctttggatcaaaactccagcaaacatggtgctatttcaagtggtttcaggctggaagagtctccatttgttccctatgactttatgaacagcagtacttcaccagccagtcctccaggttcaataggagatggctggccacgtgccaaatcgcctaacggctctagcagtgttaattggccaccagaatttcgtcctggtgagccatggaaaggttatccaaacattgaccctgaaactgacccttacgtcactcctggcagtgtcataaacaatctttcaattaatactgtgcgggaagttgaccacctcagggacaggaacagtgggtcatcctcatccttgaacaccacgctgccttcaactagtgcctggtcatccattcgtgcctccaactacaacgttcccctcagcagtacagcacaaagcacttcagccagaaatagtgattccaaattgacatggtctcctggttcagttacaaacacctctctggctcatgagctgtggaaggtccctttgccacctaaaaacatcactgctccgtcccgcccacctccgggactgactggtcagaagccacccttgtctacgtgggataattctccccttcgtataggtggaggatggggaaattctgacgccagatataccccaggttccagctggggtgagagcagctcagggagaataacaaattggcttgttctaaaaaaccttacacctcagatcgatggctcaactctgcgcactctgtgcatgcagcacggcccgctgatcacattccacctgaacctccctcacggaaatgctctggtccgctacagttcaaaagaagaggtagtgaaggcacaaaagtctctgcacatgtgtgtactggggaacactactattcttgctgagtttgccagtgaagaggagatcagtcgtttctttgcacaaagccagtctctgaccccttctcccggctggcagtctctcgggtccagccagagccggctgggctccctcgactgttcccactcattctccagccggaccgatctcaatcactggaatggtgctgggctgtcgggaactaactgtggagaccttcacggcacttcactctgggggaccccgcattattccacaagcctgtggggtcccccaagcagcagcgacccccgaggaattagcagcccatctcccattaacgcttttctttctgttgaccacctgggtgggggtggagagtccatgtaacagtgtagatgcagactcaccgaccgggacctcagacgcgagggaaaggagcactaagtggggctcgccgcctgcagccaggggccgcctgtgggaacagctattctctgcacattttccactttgttttccccaaaacatatcagtttgaatacttgaatcatgcaggccaatattataatgtgaaaaggtatctactctatttacactcccaaatagcgccatacatgctaaaccgtagagaatgagctcgcttgtgtctattcatcatgtttagcctttggattcttttttttttttccttctattcctccccaacccccccccccgcccctttttttctctcttgcaaaaccattttttgggctgataacgtatgagcttttccctttgcactgaatgatgttctctccgtctcatcggcagtatggggggcagctgtcccagtgtcaatgtttactcaagggtgttcttaggaggcgtgcgctctctactatgccttgatgttgcctaccttattgtggtatcgtggagtttaaaagatcaagttaggatgctgacttaggattattaatgaaagtgttgcaccagttttttcatgttgtaaaactaaagaatttcgctctgcagtttgaaaaactgtggccacagctgtgacttgcagcccacctgccacccaggacgggccctgcactttgaataggctttccattttgttttggaggttctcactttgaaccttcttgtttacagatttttttgtttgttttttgagaaaaaaaaatgtttactcttccatcatttaaaaaaaatgtaaaagacaaaaaaaaaatggaggatgatttaaaagatgctttctatctctgggaaaaaggagcagcatttggccatgttcttttgtttttctattcctgtcccaaatcaaagagcatggttctcaggaaaaccagttccccagtttaaaaaaaaaaaaaaaaattccttgtagtttcttagaggaaaaaaagaaaaaccccaacttttagcactgatactacatattgctctgttaaagaattttctctgccaaaaaaaaagaaaaaacaaaaaaacgcttaaagctggagtttgacattctgctttcagatgctgtctttttattagtgagtgatgatggtttgctaataatcaataggtaataattttttgtaatcccatcaagtggctccatatgtttctgctctctcgtgactgtgttaatgtttaactgttgtaccttaaagccgaaatcagtaactatgcatactgtaaccaaggtattgggcttacagagttgtttgttgtataaagaaaattttaaatgttgttgcaaactaacgagttacaccattttaaactttctttcctcccccctttttttgcccacaaatggtattataatgcttgcttagtcaaagaagagagactaaacaagggtaaaaattttaacagtacagaatttgccatcatatcattgccttgattctaactgtttgtgtcctaagatgcaaaagaagtcagtggcttttaactgtttacaaatagaatgtgattgtaaaatgtacagtttggttgtgtttgaattatgaaatttcttcagatataataaaccatgactttttggctgctcaacattaattgtctcctttttgtgaatttatttgtaggctcttttttataatgaaagtttcaaagttgctatgtatgagggttctcatagagcaaccgattaaaaatctaagcaaatatttgaacattttatctgaactcatcacaatttcaccctgaaataatgtgagaacaatgggaaactgtagcttgctccttcccaccctctctgagcatctttgggatcttgttgctcaaaactcttctgtgacttcatcttccccaccatttgtgcccatctcaagcctcagcaagaaaccatgtggaacatgaagcttaatgacttgacagtgtactagtgttaaactctcatacctctgttacaaagcgagaaacgccacacccggactggccttttcttcccccttcacggccctcgcttctccctgcaggagctcgggggcgaaacctgtgtatggatttcagtgtatgacttcagatcatgctccaacttgccaggtgtgagctaatgttgtcggacaccttactataagcaaatgttattcagtgcgttcaatgtatattgacttccatactggtttttccaaaaaccaaaggtagctttgaaaaaccatgtctggaaatgtttggagcgttaagctgattgaccttctgaccttggggctttgagtagtatataattcataactgcgttaattgtattgttaaagtgtttgggagttttttgcgcttgttatgtggaaataaagtgtttgatttaaaatttaaaaaaaaaaatt

SEQ ID NO: 326796 - DNA, 5479 bp, Homo sapiens
ctgttctagaggacacctcgtatagaggaaggtggtctgtttctgccagtgataactggggagaaacttcaaggaataaccattggggtgaggccaataagaaatccagctcaggaggtagtgacagtgacaggtccgtttccggttggaacgaacttggtaaaactagttctttcacttggggaaacaacataaatccaaataattcatcaggatgggatgaatcttctaaacctactccttcccagggatggggagaccctccaaagtctaatcagtctctaggttggggagattcgtcaaagccagtcagctctccagactggaacaagcaacaagacattgttggatcttggggaatcccaccagctacaggcaaacctcctggtacaggctggctggggggacctataccagccccagcaaaagaagaagaacccacaggctgggaggaaccatccccagaatctatacgtcgcaaaatggagattgatgatggaacttcagcttggggagatccaagcaaatacaactacaaaaatgtgaacatgtggaacaaaaacgtcccaaatggcaacagccgttcagaccagcaagcacaggtacatcagctgctaacgcctgcaagtgccatctcaaacaaagaggcaagcagtggctctgggccaaaatctatgcaagatggctggtgtggtgatgatatgccattgcctggaaatcgccccactggctgggaagaggaagaggatgtggagattggaatgtggaatagtaattcatctcaagagcttaactcatctttaaattggccaccatatacaaagaaaatgtcatcgaagggtctgagtggcaaaaaaaggagaagggaaaggggaatgatgaaaggtggaaacaaacaagaagaagcgtggataaatccatttgttaaacagttttcaaacatcagtttttcgagagactcaccagaggaaaatgtacaaagcaataagatggacctttctggaggaatgttacaagacaaacgaatggagatagataaacatagcctaaatattggtgattacaatcgaacggtcgggaaaggccctggttctcggcctcagatttccaaagagtcttccatggagcgcaatccttattttgataagaatggcaatcccagtatgtttggtgttggaaacacagcagcacaaccccggggcatgcagcagcctccagcacaacctcttagttcatctcagcctaatctccgtgctcaagtgcctcctccattactctcccctcaggttccagtttcattgctgaagtatgcaccaaacaacggtggcctgaatccactctttggccctcaacaggtagccatgctgaaccagctatcccagctaaaccagctttctcagatctcccagttacagcgattgttagcgcagcagcaaagggcgcagagtcagagaagcgtgccttctgggaaccggccgcagcaagaccagcagggtcgacctcttagtgtgcagcagcaaatgatgcaacaatctcgtcaacttgatccaaacctgttggtgaagcagcagactccaccatctcagcagcagccactccatcagccagccatgaagtctttccttgacaatgtcatgccccacactacacctgagctgcaaaaagggccatcaccaataaatgctttcagcaacttccctataggcttgaactcaaacttgaatgtaaatatggatatgaacagtattaaagagccacagtcaagactaaggaagtggacgacagtggacagcatttctgtgaacacatctttggatcaaaactccagcaaacatggtgctatttcaagtggtttcaggctggaagagtctccatttgttccctatgactttatgaacagcagtacttcaccagccagtcctccaggttcaataggagatggctggccacgtgccaaatcgcctaacggctctagcagtgttaattggccaccagaatttcgtcctggtgagccatggaaaggttatccaaacattgaccctgaaactgacccttacgtcactcctggcagtgtcataaacaatctttcaattaatactgtgcgggaagttgaccacctcagggacaggaacagtgggtcatcctcatccttgaacaccacgctgccttcaactagtgcctggtcatccattcgtgcctccaactacaacgttcccctcagcagtacagcacaaagcacttcagccagaaatagtgattccaaattgacatggtctcctggttcagttacaaacacctctctggctcatgagctgtggaaggtccctttgccacctaaaaacatcactgctccgtcccgcccacctccgggactgactggtcagaagccacccttgtctacgtgggataattctccccttcgtataggtggaggatggggaaattctgacgccagatataccccaggttccagctggggtgagagcagctcagggagaataacaaattggcttgttctaaaaaaccttacacctcagatcgatggctcaactctgcgcactctgtgcatgcagcacggcccgctgatcacattccacctgaacctccctcacggaaatgctctggtccgctacagttcaaaagaagaggtagtgaaggcacaaaagtctctgcacatgtgtgtactggggaacactactattcttgctgagtttgccagtgaagaggagatcagtcgtttctttgcacaaagccagtctctgaccccttctcccggctggcagtctctcgggtccagccagagccggctgggctccctcgactgttcccactcattctccagccggaccgatctcaatcactggaatggtgctgggctgtcgggaactaactgtggagaccttcacggcacttcactctgggggaccccgcattattccacaagcctgtggggtcccccaagcagcagcgacccccgaggaattagcagcccatctcccattaacgcttttctttctgttgaccacctgggtgggggtggagagtccatgtaacagtgtagatgcagactcaccgaccgggacctcagacgcgagggaaaggagcactaagtggggctcgccgcctgcagccaggggccgcctgtgggaacagctattctctgcacattttccactttgttttccccaaaacatatcagtttgaatacttgaatcatgcaggccaatattataatgtgaaaaggtatctactctatttacactcccaaatagcgccatacatgctaaaccgtagagaatgagctcgcttgtgtctattcatcatgtttagcctttggattcttttttttttttccttctattcctccccaacccccccccccgcccctttttttctctcttgcaaaaccattttttgggctgataacgtatgagcttttccctttgcactgaatgatgttctctccgtctcatcggcagtatggggggcagctgtcccagtgtcaatgtttactcaagggtgttcttaggaggcgtgcgctctctactatgccttgatgttgcctaccttattgtggtatcgtggagtttaaaagatcaagttaggatgctgacttaggattattaatgaaagtgttgcaccagttttttcatgttgtaaaactaaagaatttcgctctgcagtttgaaaaactgtggccacagctgtgacttgcagcccacctgccacccaggacgggccctgcactttgaataggctttccattttgttttggaggttctcactttgaaccttcttgtttacagatttttttgtttgttttttgagaaaaaaaaatgtttactcttccatcatttaaaaaaaatgtaaaagacaaaaaaaaaatggaggatgatttaaaagatgctttctatctctgggaaaaaggagcagcatttggccatgttcttttgtttttctattcctgtcccaaatcaaagagcatggttctcaggaaaaccagttccccagtttaaaaaaaaaaaaaaaaattccttgtagtttcttagaggaaaaaaagaaaaaccccaacttttagcactgatactacatattgctctgttaaagaattttctctgccaaaaaaaaagaaaaaacaaaaaaacgcttaaagctggagtttgacattctgctttcagatgctgtctttttattagtgagtgatgatggtttgctaataatcaataggtaataattttttgtaatcccatcaagtggctccatatgtttctgctctctcgtgactgtgttaatgtttaactgttgtaccttaaagccgaaatcagtaactatgcatactgtaaccaaggtattgggcttacagagttgtttgttgtataaagaaaattttaaatgttgttgcaaactaacgagttacaccattttaaactttctttcctcccccctttttttgcccacaaatggtattataatgcttgcttagtcaaagaagagagactaaacaagggtaaaaattttaacagtacagaatttgccatcatatcattgccttgattctaactgtttgtgtcctaagatgcaaaagaagtcagtggcttttaactgtttacaaatagaatgtgattgtaaaatgtacagtttggttgtgtttgaattatgaaatttcttcagatataataaaccatgactttttggctgctcaacattaattgtctcctttttgtgaatttatttgtaggctcttttttataatgaaagtttcaaagttgctatgtatgagggttctcatagagcaaccgattaaaaatctaagcaaatatttgaacattttatctgaactcatcacaatttcaccctgaaataatgtgagaacaatgggaaactgtagcttgctccttcccaccctctctgagcatctttgggatcttgttgctcaaaactcttctgtgacttcatcttccccaccatttgtgcccatctcaagcctcagcaagaaaccatgtggaacatgaagcttaatgacttgacagtgtactagtgttaaactctcatacctctgttacaaagcgagaaacgccacacccggactggccttttcttcccccttcacggccctcgcttctccctgcaggagctcgggggcgaaacctgtgtatggatttcagtgtatgacttcagatcatgctccaacttgccaggtgtgagctaatgttgtcggacaccttactataagcaaatgttattcagtgcgttcaatgtatattgacttccatactggtttttccaaaaaccaaaggtagctttgaaaaaccatgtctggaaatgtttggagcgttaagctgattgaccttctgaccttggggctttgagtagtatataattcataactgcgttaattgtattgttaaagtgtttgggagttttttgcgcttgttatgtggaaataaagtgtttgatttaaaatttaaaaaaaaaaatt

SEQ ID NO: 326797 - DNA, 7045 bp, Homo sapiens
tgcctaacaatcagagtattaactctaaagtgagtggtggttctacccatggtacctggggaagccttcaggaaacttgtgaatctgaagtaagtggtacacagaaggtttcattcagtggtcaacctcaaaatattaccactgaaatgactggaccaaataacactactaactttatgacctctagtttaccaaactccggttcagtgcagaataatgagctgcctagtagtaacacaggggcctggcgtgtgagcacaatgaatcatcctcagatgcaggctccatcaggtatgaatggcacttccctttctcaccttagcaatggagagtcaaaaagtggaggctcttatggtactacatggggtgcctatggttctaattactctggagacaaatgttcaggccctaatggccaagctaatggtgacactgtgaatgcaactctaatgcagcctggcgtaaatggtcctatgggcactaactttcaagttaacacaaacaaaggaggtggtgtgtgggaatctggtgcagcaaactcccagagtacatcatggggaagtggaaatggcgcaaattctggaggaagtcgaagaggatggggaacccctgcacaaaacactggcactaatttacccagcgttgagtggaacaaactgcctagcaatcagcattccaatgatagtgcaaatggcaatggtaagacgtttacaaatggatggaaatctactgaggaagaggatcagggttctgccacatctcagacaaatgagcaaagcagtgtgtgggccaaaacaggaggtacagtggagagcgatggtagtacagaaagcactggacgccttgaggaaaaaggaactggggaaagtcagagtagagacagaagaaaaattgatcagcacacattactccaaagcattgtaaacagaactgacttagatccacgtgtcctgtccaactctggttggggacagactcctattaagcagaatactgcctgggatacagaaacatcacctagaggggaacgaaagactgacaatgggacagaggcctggggaagctctgcaacacagacttttaactcaggggcatgtatagataagactagccctaatggtaatgatacctcatctgtatcagggtggggcgatcccaaacctgctctgaggtggggagattccaaaggctcaaactgccagggggggtgggaagatgattctgctgctacaggaatggtcaagagcaatcagtgggggaattgcaaagaggagaaggctgcatggaatgactcgcaaaagaataaacagggatggggtgatggacaaaaatcaagccaagggtggtctgtttctgccagtgataactggggagaaacttcaaggaataaccattggggtgaggccaataagaaatccagctcaggaggtagtgacagtgacaggtccgtttccggttggaacgaacttggtaaaactagttctttcacttggggaaacaacataaatccaaataattcatcaggatgggatgaatcttctaaacctactccttcccagggatggggagaccctccaaagtctaatcagtctctaggttggggagattcgtcaaagccagtcagctctccagactggaacaagcaacaagacattgttggatcttggggaatcccaccagctacaggcaaacctcctggtacaggctggctggggggacctataccagccccagcaaaagaagaagaacccacaggctgggaggaaccatccccagaatctatacgtcgcaaaatggagattgatgatggaacttcagcttggggagatccaagcaaatacaactacaaaaatgtgaacatgtggaacaaaaacgtcccaaatggcaacagccgttcagaccagcaagcacaggtacatcagctgctaacgcctgcaagtgccatctcaaacaaagaggcaagcagtggctctggctggggtgagccctggggggagccttctactccagccacaactgtggataatggtacttcagcatggggtaagcccatagacagtggtcccagctggggggaacccattgctgcggcatccagcacatccacgtggggctccagctctgttggtccacaagcattaagcaaatctgggccaaaatctatgcaagatggctggtgtggtgatgatatgccattgcctggaaatcgccccactggctgggaagaggaagaggatgtggagattggaatgtggaatagtaattcatctcaagagcttaactcatctttaaattggccaccatatacaaagaaaatgtcatcgaagggtctgagtggcaaaaaaaggagaagggaaaggggaatgatgaaaggtggaaacaaacaagaagaagcgtggataaatccatttgttaaacagttttcaaacatcagtttttcgagagactcaccagaggaaaatgtacaaagcaataagatggacctttctggaggaatgttacaagacaaacgaatggagatagataaacatagcctaaatattggtgattacaatcgaacggtcgggaaaggccctggttctcggcctcagatttccaaagagtcttccatggagcgcaatccttattttgataaggatggcattgtagcagatgaatcccaaaacatgcagtttatgtccagtcaaagcatgaagcttcccccttcaaatagtgcactacctaaccaggcccttggctccatagcagggctgggtatgcaaaacttgaattctgttagacagaatggcaatcccagtatgtttggtgttggaaacacagcagcacaaccccggggcatgcagcagcctccagcacaacctcttagttcatctcagcctaatctccgtgctcaagtgcctcctccattactctcccctcaggtagccatgctgaaccagctatcccagctaaaccagctttctcagatctcccagttacagcgattgttagcgcagcagcaaagggcgcagagtcagagaagcgtgccttctgggaaccggccgcagcaagaccagcagggtcgacctcttagtgtgcagcagcaaatgatgcaacaatctcgtcaacttgatccaaacctgttggtgaagcagcagactccaccatctcagcagcagccactccatcagccagccatgaagtctttccttgacaatgtcatgccccacactacacctgagctgcaaaaagggccatcaccaataaatgctttcagcaacttccctataggcttgaactcaaacttgaatgtaaatatggatatgaacagtattaaagagccacagtcaagactaaggaagtggacgacagtggacagcatttctgtgaacacatctttggatcaaaactccagcaaacatggtgctatttcaagtggtttcaggctggaagagtctccatttgttccctatgactttatgaacagcagtacttcaccagccagtcctccaggttcaataggagatggctggccacgtgccaaatcgcctaacggctctagcagtgttaattggccaccagaatttcgtcctggtgagccatggaaaggttatccaaacattgaccctgaaactgacccttacgtcactcctggcagtgtcataaacaatctttcaattaatactgtgcgggaagttgaccacctcagggacaggaacagtgggtcatcctcatccttgaacaccacgctgccttcaactagtgcctggtcatccattcgtgcctccaactacaacgttcccctcagcagtacagcacaaagcacttcagccagaaatagtgattccaaattgacatggtctcctggttcagttacaaacacctctctggctcatgagctgtggaaggtccctttgccacctaaaaacatcactgctccgtcccgcccacctccgggactgactggtcagaagccacccttgtctacgtgggataattctccccttcgtataggtggaggatggggaaattctgacgccagatataccccaggttccagctggggtgagagcagctcagggagaataacaaattggcttgttctaaaaaaccttacacctcagatcgatggctcaactctgcgcactctgtgcatgcagcacggcccgctgatcacattccacctgaacctccctcacggaaatgctctggtccgctacagttcaaaagaagaggtagtgaaggcacaaaagtctctgcacatgtgtgtactggggaacactactattcttgctgagtttgccagtgaagaggagatcagtcgtttctttgcacaaagccagtctctgaccccttctcccggctggcagtctctcgggtccagccagagccggctgggctccctcgactgttcccactcattctccagccggaccgatctcaatcactggaatggtgctgggctgtcgggaactaactgtggagaccttcacggcacttcactctgggggaccccgcattattccacaagcctgtggggtcccccaagcagcagcgacccccgaggaattagcagcccatctcccattaacgcttttctttctgttgaccacctgggtgggggtggagagtccatgtaacagtgtagatgcagactcaccgaccgggacctcagacgcgagggaaaggagcactaagtggggctcgccgcctgcagccaggggccgcctgtgggaacagctattctctgcacattttccactttgttttccccaaaacatatcagtttgaatacttgaatcatgcaggccaatattataatgtgaaaaggtatctactctatttacactcccaaatagcgccatacatgctaaaccgtagagaatgagctcgcttgtgtctattcatcatgtttagcctttggattcttttttttttttccttctattcctccccaacccccccccccgcccctttttttctctcttgcaaaaccattttttgggctgataacgtatgagcttttccctttgcactgaatgatgttctctccgtctcatcggcagtatggggggcagctgtcccagtgtcaatgtttactcaagggtgttcttaggaggcgtgcgctctctactatgccttgatgttgcctaccttattgtggtatcgtggagtttaaaagatcaagttaggatgctgacttaggattattaatgaaagtgttgcaccagttttttcatgttgtaaaactaaagaatttcgctctgcagtttgaaaaactgtggccacagctgtgacttgcagcccacctgccacccaggacgggccctgcactttgaataggctttccattttgttttggaggttctcactttgaaccttcttgtttacagatttttttgtttgttttttgagaaaaaaaaatgtttactcttccatcatttaaaaaaaatgtaaaagacaaaaaaaaaatggaggatgatttaaaagatgctttctatctctgggaaaaaggagcagcatttggccatgttcttttgtttttctattcctgtcccaaatcaaagagcatggttctcaggaaaaccagttccccagtttaaaaaaaaaaaaaaaaattccttgtagtttcttagaggaaaaaaagaaaaaccccaacttttagcactgatactacatattgctctgttaaagaattttctctgccaaaaaaaaagaaaaaacaaaaaaacgcttaaagctggagtttgacattctgctttcagatgctgtctttttattagtgagtgatgatggtttgctaataatcaataggtaataattttttgtaatcccatcaagtggctccatatgtttctgctctctcgtgactgtgttaatgtttaactgttgtaccttaaagccgaaatcagtaactatgcatactgtaaccaaggtattgggcttacagagttgtttgttgtataaagaaaattttaaatgttgttgcaaactaacgagttacaccattttaaactttctttcctcccccctttttttgcccacaaatggtattataatgcttgcttagtcaaagaagagagactaaacaagggtaaaaattttaacagtacagaatttgccatcatatcattgccttgattctaactgtttgtgtcctaagatgcaaaagaagtcagtggcttttaactgtttacaaatagaatgtgattgtaaaatgtacagtttggttgtgtttgaattatgaaatttcttcagatataataaaccatgactttttggctgctcaacattaattgtctcctttttgtgaatttatttgtaggctcttttttataatgaaagtttcaaagttgctatgtatgagggttctcatagagcaaccgattaaaaatctaagcaaatatttgaacattttatctgaactcatcacaatttcaccctgaaataatgtgagaacaatgggaaactgtagcttgctccttcccaccctctctgagcatctttgggatcttgttgctcaaaactcttctgtgacttcatcttccccaccatttgtgcccatctcaagcctcagcaagaaaccatgtggaacatgaagcttaatgacttgacagtgtactagtgttaaactctcatacctctgttacaaagcgagaaacgccacacccggactggccttttcttcccccttcacggccctcgcttctccctgcaggagctcgggggcgaaacctgtgtatggatttcagtgtatgacttcagatcatgctccaacttgccaggtgtgagctaatgttgtcggacaccttactataagcaaatgttattcagtgcgttcaatgtatattgacttccatactggtttttccaaaaaccaaaggtagctttgaaaaaccatgtctggaaatgtttggagcgttaagctgattgaccttctgaccttggggctttgagtagtatataattcataactgcgttaattgtattgttaaagtgtttgggagttttttgcgcttgttatgtggaaataaagtgtttgatttaaaatttaaaaaaaaaaatt

SEQ ID NO: 326798 - DNA, 3756 bp, Homo sapiens
tccaaacgaaaggtgccaaacgcaacgtaaccaggagaacattgctagagcaactgaccagctggacagcatttctgtgaacacatctttggatcaaaactccagcaaacatggtgctatttcaagtggtttcaggctggaagagtctccatttgttccctatgactttatgaacagcagtacttcaccagccagtcctccaggttcaataggagatggctggccacgtgccaaatcgcctaacggctctagcagtgttaattggccaccagaatttcgtcctggtgagccatggaaaggttatccaaacattgaccctgaaactgacccttacgtcactcctggcagtgtcataaacaatctttcaattaatactgtgcgggaagttgaccacctcagggacaggaacagtgggtcatcctcatccttgaacaccacgctgccttcaactagtgcctggtcatccattcgtgcctccaactacaacgttcccctcagcagtacagcacaaagcacttcagccagaaatagtgattccaaattgacatggtctcctggttcagttacaaacacctctctggctcatgagctgtggaaggtccctttgccacctaaaaacatcactgctccgtcccgcccacctccgggactgactggtcagaagccacccttgtctacgtgggataattctccccttcgtataggtggaggatggggaaattctgacgccagatataccccaggttccagctggggtgagagcagctcagggagaataacaaattggcttgttctaaaaaaccttacacctcagatcgatggctcaactctgcgcactctgtgcatgcagcacggcccgctgatcacattccacctgaacctccctcacggaaatgctctggtccgctacagttcaaaagaagaggtagtgaaggcacaaaagtctctgcacatgtgtgtactggggaacactactattcttgctgagtttgccagtgaagaggagatcagtcgtttctttgcacaaagccagtctctgaccccttctcccggctggcagtctctcgggtccagccagagccggctgggctccctcgactgttcccactcattctccagccggaccgatctcaatcactggaatggtgctgggctgtcgggaactaactgtggagaccttcacggcacttcactctgggggaccccgcattattccacaagcctgtggggtcccccaagcagcagcgacccccgaggaattagcagcccatctcccattaacgcttttctttctgttgaccacctgggtgggggtggagagtccatgtaacagtgtagatgcagactcaccgaccgggacctcagacgcgagggaaaggagcactaagtggggctcgccgcctgcagccaggggccgcctgtgggaacagctattctctgcacattttccactttgttttccccaaaacatatcagtttgaatacttgaatcatgcaggccaatattataatgtgaaaaggtatctactctatttacactcccaaatagcgccatacatgctaaaccgtagagaatgagctcgcttgtgtctattcatcatgtttagcctttggattcttttttttttttccttctattcctccccaacccccccccccgcccctttttttctctcttgcaaaaccattttttgggctgataacgtatgagcttttccctttgcactgaatgatgttctctccgtctcatcggcagtatggggggcagctgtcccagtgtcaatgtttactcaagggtgttcttaggaggcgtgcgctctctactatgccttgatgttgcctaccttattgtggtatcgtggagtttaaaagatcaagttaggatgctgacttaggattattaatgaaagtgttgcaccagttttttcatgttgtaaaactaaagaatttcgctctgcagtttgaaaaactgtggccacagctgtgacttgcagcccacctgccacccaggacgggccctgcactttgaataggctttccattttgttttggaggttctcactttgaaccttcttgtttacagatttttttgtttgttttttgagaaaaaaaaatgtttactcttccatcatttaaaaaaaatgtaaaagacaaaaaaaaaatggaggatgatttaaaagatgctttctatctctgggaaaaaggagcagcatttggccatgttcttttgtttttctattcctgtcccaaatcaaagagcatggttctcaggaaaaccagttccccagtttaaaaaaaaaaaaaaaaattccttgtagtttcttagaggaaaaaaagaaaaaccccaacttttagcactgatactacatattgctctgttaaagaattttctctgccaaaaaaaaagaaaaaacaaaaaaacgcttaaagctggagtttgacattctgctttcagatgctgtctttttattagtgagtgatgatggtttgctaataatcaataggtaataattttttgtaatcccatcaagtggctccatatgtttctgctctctcgtgactgtgttaatgtttaactgttgtaccttaaagccgaaatcagtaactatgcatactgtaaccaaggtattgggcttacagagttgtttgttgtataaagaaaattttaaatgttgttgcaaactaacgagttacaccattttaaactttctttcctcccccctttttttgcccacaaatggtattataatgcttgcttagtcaaagaagagagactaaacaagggtaaaaattttaacagtacagaatttgccatcatatcattgccttgattctaactgtttgtgtcctaagatgcaaaagaagtcagtggcttttaactgtttacaaatagaatgtgattgtaaaatgtacagtttggttgtgtttgaattatgaaatttcttcagatataataaaccatgactttttggctgctcaacattaattgtctcctttttgtgaatttatttgtaggctcttttttataatgaaagtttcaaagttgctatgtatgagggttctcatagagcaaccgattaaaaatctaagcaaatatttgaacattttatctgaactcatcacaatttcaccctgaaataatgtgagaacaatgggaaactgtagcttgctccttcccaccctctctgagcatctttgggatcttgttgctcaaaactcttctgtgacttcatcttccccaccatttgtgcccatctcaagcctcagcaagaaaccatgtggaacatgaagcttaatgacttgacagtgtactagtgttaaactctcatacctctgttacaaagcgagaaacgccacacccggactggccttttcttcccccttcacggccctcgcttctccctgcaggagctcgggggcgaaacctgtgtatggatttcagtgtatgacttcagatcatgctccaacttgccaggtgtgagctaatgttgtcggacaccttactataagcaaatgttattcagtgcgttcaatgtatattgacttccatactggtttttccaaaaaccaaaggtagctttgaaaaaccatgtctggaaatgtttggagcgttaagctgattgaccttctgaccttggggctttgagtagtatataattcataactgcgttaattgtattgttaaagtgtttgggagttttttgcgcttgttatgtggaaataaagtgtttgatttaaaatttaaaaaaaaaaatt

SEQ ID NO: 326799 - DNA, 6475 bp, Homo sapiens
  misc_feature (6464)..(6464): n is a, c, g, or t
tgcctaacaatcagagtattaactctaaagtgagtggtggttctacccatggtacctggggaagccttcaggaaacttgtgaatctgaagtaagtggtacacagaaggtttcattcagtggtcaacctcaaaatattaccactgaaatgactggaccaaataacactactaactttatgacctctagtttaccaaactccggttcagtgcagaataatgagctgcctagtagtaacacaggggcctggcgtgtgagcacaatgaatcatcctcagatgcaggctccatcaggtatgaatggcacttccctttctcaccttagcaatggagagtcaaaaagtggaggctcttatggtactacatggggtgcctatggttctaattactctggagacaaatgttcaggccctaatggccaagctaatggtgacactgtgaatgcaactctaatgcagcctggcgtaaatggtcctatgggcactaactttcaagttaacacaaacaaaggaggtggtgtgtgggaatctggtgcagcaaactcccagagtacatcatggggaagtggaaatggcgcaaattctggaggaagtcgaagaggatggggaacccctgcacaaaacactggcactaatttacccagcgttgagtggaacaaactgcctagcaatcagcattccaatgatagtgcaaatggcaatggtaagacgtttacaaatggatggaaatctactgaggaagaggatcagggttctgccacatctcagacaaatgagcaaagcagtgtgtgggccaaaacaggaggtacagtggagagcgatggtagtacagaaagcactggacgccttgaggaaaaaggaactggggaaagtcagagtagagacagaagaaaaattgatcagcacacattactccaaagcattgtaaacagaactgacttagatccacgtgtcctgtccaactctggttggggacagactcctattaagcagaatactgcctgggatacagaaacatcacctagaggggaacgaaagactgacaatgggacagaggcctggggaagctctgcaacacagacttttaactcaggggcatgtatagataagactagccctaatggtaatgatacctcatctgtatcagggtggggcgatcccaaacctgctctgaggtggggagattccaaaggctcaaactgccagggggggtgggaagatgattctgctgctacaggaatggtcaagagcaatcagtgggggaattgcaaagaggagaaggctgcatggaatgactcgcaaaagaataaacagggatggggtgatggacaaaaatcaagccaagggtggtctgtttctgccagtgataactggggagaaacttcaaggaataaccattggggtgaggccaataagaaatccagctcaggaggtagtgacagtgacaggtccgtttccggttggaacgaacttggtaaaactagttctttcacttggggaaacaacataaatccaaataattcatcaggatgggatgaatcttctaaacctactccttcccagggatggggagaccctccaaagtctaatcagtctctaggttggggagattcgtcaaagccagtcagctctccagactggaacaagcaacaagacattgttggatcttggggaatcccaccagctacaggcaaacctcctggtacaggctggctggggggacctataccagccccagcaaaagaagaagaacccacaggctgggaggaaccatccccagaatctatacgtcgcaaaatggagattgatgatggaacttcagcttggggagatccaagcaaatacaactacaaaaatgtgaacatgtggaacaaaaacgtcccaaatggcaacagccgttcagaccagcaagcacaggtacatcagctgctaacgcctgcaagtgccatctcaaacaaagaggcaagcagtggctctggctggggtgagccctggggggagccttctactccagccacaactgtggataatggtacttcagcatggggtaagcccatagacagtggtcccagctggggggaacccattgctgcggcatccagcacatccacgtggggctccagctctgttggtccacaagcattaagcaaatctgggccaaaatctatgcaagatggctggtgtggtgatgatatgccattgcctggaaatcgccccactggctgggaagaggaagaggatgtggagattggaatgtggaatagtaattcatctcaagagcttaactcatctttaaattggccaccatatacaaagaaaatgtcatcgaagggtctgagtggcaaaaaaaggagaagggaaaggggaatgatgaaaggtggaaacaaacaagaagaagcgtggataaatccatttgttaaacagttttcaaacatcagtttttcgagagactcaccagaggaaaatgtacaaagcaataagatggacctttctggaggaatgttacaagacaaacgaatggagatagataaacatagcctaaatattggtgattacaatcgaacggtcgggaaaggccctggttctcggcctcagatttccaaagagtcttccatggagcgcaatccttattttgataaggatggcattgtagcagatgaatcccaaaacatgcagtttatgtccagtcaaagcatgaagcttcccccttcaaatagtgcactacctaaccaggcccttggctccatagcagggctgggtatgcaaaacttgaattctgttagacagaatggcaatcccagtatgtttggtgttggaaacacagcagcacaaccccggggcatgcagcagcctccagcacaacctcttagttcatctcagcctaatctccgtgctcaagtgcctcctccattactctcccctcaggttccagtttcattgctgaagtatgcaccaaacaacggtggcctgaatccactctttggccctcaacaggtagccatgctgaaccagctatcccagctaaaccagctttctcagatctcccagttacagcgattgttagcgcagcagcaaagggcgcagagtcagagaagcgtgccttctgggaaccggccgcagcaagaccagcagggtcgacctcttagtgtgcagcagcaaatgatgcaacaatctcgtcaacttgatccaaacctgttggtgaagcagcagactccaccatctcagcagcagccactccatcagccagccatgaagtctttccttgacaatgtcatgccccacactacacctgagctgcaaaaagggccatcaccaataaatgctttcagcaacttccctataggcttgaactcaaacttgaatgtaaatatggatatgaacagtattaaagagccacagtcaagactaaggaagtggacgacagtggacagcatttctgtgaacacatctttggatcaaaactccagcaaacatggtgctatttcaagtggtttcaggctggaagagtctccatttgttccctatgactttatgaacagcagtacttcaccagccagtcctccaggttcaataggagatggctggccacgtgccaaatcgcctaacggctctagcagtgttaattggccaccagaatttcgtcctggtgagccatggaaaggttatccaaacattgaccctgaaactgacccttacgtcactcctggcagtgtcataaacaatctttcaattaatactgtgcgggaagttgaccacctcagggacaggaacagtgggtcatcctcatccttgaacaccacgctgccttcaactagtgcctggtcatccattcgtgcctccaactacaacgttcccctcagcagtacagcacaaagcacttcagccagaaatagtgattccaaattgacatggtctcctggttcagttacaaacacctctctggctcatgagctgtggaaggtccctttgccacctaaaaacatcactgctccgtcccgcccacctccgggactgactggtcagaagccacccttgtctacgtgggataattctccccttcgtataggtggaggatggggaaattctgacgccagatataccccaggttccagctggggtgagagcagctcagggagaataacaaattggcttgttctaaaaaaccttacacctcagatcgatggctcaactctgcgcactctgtgcatgcagcacggcccgctgatcacattccacctgaacctccctcacggaaatgctctggtccgctacagttcaaaagaagaggtagtgaaggcacaaaagtctctgcacatgtgtgtactggggaacactactattcttgctgagtttgccagtgaagaggagatcagtcgtttctttgcacaaagccagtctctgaccccttctcccggctggcagtctctcgggtccagccagagccggctgggctccctcgactgttcccactcattctccagccggaccgatctcaatcactggaatggtgctgggctgtcgggaactaactgtggagaccttcacggcacttcactctgggggaccccgcattattccacaagcctgtggggtcccccaagcagcagcgacccccgaggaattagcagcccatctcccattaacgcttttctttctgttgaccacctgggtgggggtggagagtccatgtaacagtgtagatgcagactcaccgaccgggacctcagacgcgagggaaaggagcactaagtggggctcgccgcctgcagccaggggccgcctgtgggaacagctattctctgcacattttccactttgttttccccaaaacatatcagtttgaatacttgaatcatgcaggccaatattataatgtgaaaaggtatctactctatttacactcccaaatagcgccatacatgctaaaccgtagagaatgagctcgcttgtgtctattcatcatgtttagcctttggattcttttttttttttccttctattcctccccaacccccccccccgcccctttttttctctcttgcaaaaccattttttgggctgataacgtatgagcttttccctttgcactgaatgatgttctctccgtctcatcggcagtatggggggcagctgtcccagtgtcaatgtttactcaagggtgttcttaggaggcgtgcgctctctactatgccttgatgttgcctaccttattgtggtatcgtggagtttaaaagatcaagttaggatgctgacttaggattattaatgaaagtgttgcaccagttttttcatgttgtaaaactaaagaatttcgctctgcagtttgaaaaactgtggccacagctgtgacttgcagcccacctgccacccaggacgggccctgcactttgaataggctttccattttgttttggaggttctcactttgaaccttcttgtttacagatttttttgtttgttttttgagaaaaaaaaatgtttactcttccatcatttaaaaaaaatgtaaaagacaaaaaaaaaatggaggatgatttaaaagatgctttctatctctgggaaaaaggagcagcatttggccatgttcttttgtttttctattcctgtcccaaatcaaagagcatggttctcaggaaaaccagttccccagtttaaaaaaaaaaaaaaaaattccttgtagtttcttagaggaaaaaaagaaaaaccccaacttttagcactgatactacatattgctctgttaaagaattttctctgccaaaaaaaaagaaaaaacaaaaaaacgcttaaagctggagtttgacattctgctttcagatgctgtctttttattagtgagtgatgatggtttgctaataatcaataggtaataattttttgtaatcccatcaagtggctccatatgtttctgctctctcgtgactgtgttaatgtttaactgttgtaccttaaagccgaaatcagtaactatgcatactgtaaccaaggtattgggcttacagagttgtttgttgtataaagaaaattttaaatgttgttgcaaactaacgagttacaccattttaaactttctttcctcccccctttttttgtcacctcgaggtgaccaaaaaacggtatatcaaggtgtaccatatgatgttttgacatatatataccttgtgaaacgattaccattgtgaaatgattaccattaagtttacatatctgtcacctaaccttgttacctttttttctggtgagaatgctttttatttttaatttttttgagacagagacttgctctgttgcccaggctggagtgcagtggcatgatcacagcgcactgcaacctcacctctctggctcaagaaatcctcctgcttcaaccccccaaggagctgagactacaggcacatgccaccatgcccagctcattgttttgtattttttttttgtcacctcgggatcctctgaacgctatgaccngatacgacccg

SEQ ID NO: 326800 - DNA, 4444 bp, Homo sapiens
tgcctaacaatcagagtattaactctaaagtgagtggtggttctacccatggtacctggggaagccttcaggaaacttgtgaatctgaagtaagtggtacacagaaggtttcattcagtggtcaacctcaaaatattaccactgaaatgactggaccaaataacactactaactttatgacctctagtttaccaaactccggttcagtgcagaataatgagctgcctagtagtaacacaggggcctggcgtgtgagcacaatgaatcatcctcagatgcaggctccatcaggtatgaatggcacttccctttctcaccttagcaatggagagtcaaaaagtggaggctcttatggtactacatggggtgcctatggttctaattactctggagacaaatgttcaggccctaatggccaagctaatggtgacactgtgaatgcaactctaatgcagcctggcgtaaatggtcctatgggcactaactttcaagttaacacaaacaaaggaggtggtgtgtgggaatctggtgcagcaaactcccagagtacatcatggggaagtggaaatggcgcaaattctggaggaagtcgaagaggatggggaacccctgcacaaaacactggcactaatttacccagcgttgagtggaacaaactgcctagcaatcagcattccaatgatagtgcaaatggcaatggtaagacgtttacaaatggatggaaatctactgaggaagaggatcagggttctgccacatctcagacaaatgagcaaagcagtgtgtgggccaaaacaggaggtacagtggagagcgatggtagtacagaaagcactggacgccttgaggaaaaaggaactggggaaagtcagagtagagacagaagaaaaattgatcagcacacattactccaaagcattgtaaacagaactgacttagatccacgtgtcctgtccaactctggttggggacagactcctattaagcagaatactgcctgggatacagaaacatcacctagaggggaacgaaagactgacaatgggacagaggcctggggaagctctgcaacacagacttttaactcaggggcatgtatagataagactagccctaatggtaatgatacctcatctgtatcagggtggggcgatcccaaacctgctctgaggtggggagattccaaaggctcaaactgccagggggggtgggaagatgattctgctgctacaggaatggtcaagagcaatcagtgggggaattgcaaagaggagaaggctgcatggaatgactcgcaaaagaataaacagggatggggtgatggacaaaaatcaagccaagggtggtctgtttctgccagtgataactggggagaaacttcaaggaataaccattggggtgaggccaataagaaatccagctcaggaggtagtgacagtgacaggtccgtttccggttggaacgaacttggtaaaactagttctttcacttggggaaacaacataaatccaaataattcatcaggatgggatgaatcttctaaacctactccttcccagggatggggagaccctccaaagtctaatcagtctctaggttggggagattcgtcaaagccagtcagctctccagactggaacaagcaacaagacattgttggatcttggggaatcccaccagctacaggcaaacctcctggtacaggctggctggggggacctataccagccccagcaaaagaagaagaacccacaggctgggaggaaccatccccagaatctatacgtcgcaaaatggagattgatgatggaacttcagcttggggagatccaagcaaatacaactacaaaaatgtgaacatgtggaacaaaaacgtcccaaatggcaacagccgttcagaccagcaagcacaggtacatcagctgctaacgcctgcaagtgccatctcaaacaaagaggcaagcagtggctctggctggggtgagccctggggggagccttctactccagccacaactgtggataatggtacttcagcatggggtaagcccatagacagtggtcccagctggggggaacccattgctgcggcatccagcacatccacgtggggctccagctctgttggtccacaagcattaagcaaatctgggccaaaatctatgcaagatggctggtgtggtgatgatatgccattgcctggaaatcgccccactggctgggaagaggaagaggatgtggagattggaatgtggaatagtaattcatctcaagagcttaactcatctttaaattggccaccatatacaaagaaaatgtcatcgaagggtctgagtggcaaaaaaaggagaagggaaaggggaatgatgaaaggtggaaacaaacaagaagaagcgtggataaatccatttgttaaacagttttcaaacatcagtttttcgagagactcaccagaggaaaatgtacaaagcaataagatggacctttctggaggaatgttacaagacaaacgaatggagatagataaacatagcctaaatattggtgattacaatcgaacggtcgggaaaggccctggttctcggcctcagatttccaaagagtcttccatggagcgcaatccttattttgataaggatggcattgtagcagatgaatcccaaaacatgcagtttatgtccagtcaaagcatgaagcttcccccttcaaatagtgcactacctaaccaggcccttggctccatagcagggctgggtatgcaaaacttgaattctgttagacagaatggcaatcccagtatgtttggtgttggaaacacagcagcacaaccccggggcatgcagcagcctccagcacaacctcttagttcatctcagcctaatctccgtgctcaagtgcctcctccattactctcccctcaggttccagtttcattgctgaagtatgcaccaaacaacggtggcctgaatccactctttggccctcaacaggtagccatgctgaaccagctatcccagctaaaccagctttctcagatctcccagttacagcgattgttagcgcagcagcaaagggcgcagagtcagagaagcgtgccttctgggaaccggccgcagcaagaccagcagggtcgacctcttagtgtgcagcagcaaatgatgcaacaatctcgtcaacttgatccaaacctgttggtgaagcagcagactccaccatctcagcagcagccactccatcagccagccatgaagtctttccttgacaatgtcatgccccacactacacctgagctgcaaaaagggccatcaccaataaatgctttcagcaacttccctataggcttgaactcaaacttgaatgtaaatatggatatgaacagtattaaagagccacagtcaagactaaggaagtggacgacagtggacagcatttctgtgaacacatctttggatcaaaactccagcaaacatggtgctatttcaagtggtttcaggctggaagagtctccatttgttccctatgactttatgaacagcagtacttcaccagccagtcctccaggttcaataggagatggctggccacgtgccaaatcgcctaacggctctagcagtgttaattggccaccagaatttcgtcctggtgagccatggaaaggttatccaaacattgaccctgaaactgacccttacgtcactcctggcagtgtcataaacaatctttcaattaatactgtgcgggaagttgaccacctcagggacaggaacagtgggtcatcctcatccttgaacaccacgctgccttcaactagtgcctggtcatccattcgtgcctccaactacaacgttcccctcagcagtacagcacaaagcacttcagccagaaatagtgattccaaattgacatggtctcctggttcagttacaaacacctctctggctcatgagctgtggaaggtccctttgccacctaaaaacatcactgctccgtcccgcccacctccgggactgactggtcagaagccacccttgtctacgtgggataattctccccttcgtataggtggaggatggggaaattctgacgccagatataccccaggttccagctggggtgagagcagctcagggagaataacaaattggcttgttctaaaaaaccttacacctcagatcgatggctcaactctgcgcactctgtgcatgcagcacggcccgctgatcacattccacctgaacctccctcacggaaatgctctggtccgctacagttcaaaagaagaggtagtgaaggcacaaaagtctctgcacatttcagatcttttcctgctgaccctttgatttcaaatgtgcagaggggtgtctcggaacaaaagccagaactggaacccatatggaccttgacagagaccaggccttcagccctggcggaactttgcatgaat

SEQ ID NO: 326801 - DNA, 3307 bp, Homo sapiens
tgcctaacaatcagagtattaactctaaagtgagtggtggttctacccatggtacctggggaagccttcaggaaacttgtgaatctgaagtaagtggtacacagaaggtttcattcagtggtcaacctcaaaatattaccactgaaatgactggaccaaataacactactaactttatgacctctagtttaccaaactccggttcagtgcagaataatgagctgcctagtagtaacacaggggcctggcgtgtgagcacaatgaatcatcctcagatgcaggctccatcaggtatgaatggcacttccctttctcaccttagcaatggagagtcaaaaagtggaggctcttatggtactacatggggtgcctatggttctaattactctggagacaaatgttcaggccctaatggccaagctaatggtgacactgtgaatgcaactctaatgcagcctggcgtaaatggtcctatgggcactaactttcaagttaacacaaacaaaggaggtggtgtgtgggaatctggtgcagcaaactcccagagtacatcatggggaagtggaaatggcgcaaattctggaggaagtcgaagaggatggggaacccctgcacaaaacactggcactaatttacccagcgttgagtggaacaaactgcctagcaatcagcattccaatgatagtgcaaatggcaatggtaagacgtttacaaatggatggaaatctactgaggaagaggatcagggttctgccacatctcagacaaatgagcaaagcagtgtgtgggccaaaacaggaggtacagtggagagcgatggtagtacagaaagcactggacgccttgaggaaaaaggaactggggaaagtcagagtagagacagaagaaaaattgatcagcacacattactccaaagcattgtaaacagaactgacttagatccacgtgtcctgtccaactctggttggggacagactcctattaagcagaatactgcctgggatacagaaacatcacctagaggggaacgaaagactgacaatgggacagaggcctggggaagctctgcaacacagacttttaactcaggggcatgtatagataagactagccctaatggtaatgatacctcatctgtatcagggtggggcgatcccaaacctgctctgaggtggggagattccaaaggctcaaactgccagggggggtgggaagatgattctgctgctacaggaatggtcaagagcaatcagtgggggaattgcaaagaggagaaggctgcatggaatgactcgcaaaagaataaacagggatggggtgatggacaaaaatcaagccaagggtggtctgtttctgccagtgataactggggagaaacttcaaggaataaccattggggtgaggccaataagaaatccagctcaggaggtagtgacagtgacaggtccgtttccggttggaacgaacttggtaaaactagttctttcacttggggaaacaacataaatccaaataattcatcaggatgggatgaatcttctaaacctactccttcccagggatggggagaccctccaaagtctaatcagtctctaggttggggagattcgtcaaagccagtcagctctccagactggaacaagcaacaagacattgttggatcttggggaatcccaccagctacaggcaaacctcctggtacaggctggctggggggacctataccagccccagcaaaagaagaagaacccacaggctgggaggaaccatccccagaatctatacgtcgcaaaatggagattgatgatggaacttcagcttggggagatccaagcaaatacaactacaaaaatgtgaacatgtggaacaaaaacgtcccaaatggcaacagccgttcagaccagcaagcacaggtacatcagctgctaacgcctgcaagtgccatctcaaacaaagaggcaagcagtggctctggctggggtgagccctggggggagccttctactccagccacaactgtggataatggtacttcagcatggggtaagcccatagacagtggtcccagctggggggaacccattgctgcggcatccagcacatccacgtggggctccagctctgttggtccacaagcattaagcaaatctgggccaaaatctatgcaagatggctggtgtggtgatgatatgccattgcctggaaatcgccccactggctgggaagaggaagaggatgtggagattggaatgtggaatagtaattcatctcaagagcttaactcatctttaaattggccaccatatacaaagaaaatgtcatcgaagggtctgagtggcaaaaaaaggagaagggaaaggggaatgatgaaaggtggaaacaaacaagaagaagcgtggataaatccatttgttaaacagttttcaaacatcagtttttcgagagactcaccagaggaaaatgtacaaagcaataagatggacctttctggaggaatgttacaagacaaacgaatggagatagataaacatagcctaaatattggtgattacaatcgaacggtcgggaaaggccctggttctcggcctcagatttccaaagagtcttccatggagcgcaatccttattttgataaggatggcattgtagcagatgaatcccaaaacatgcagtttatgtccagtcaaagcatgaagcttcccccttcaaatagtgcactacctaaccaggcccttggctccatagcagggctgggtatgcaaaacttgaattctgttagacagaatggcaatcccagtatgtttggtgttggaaacacagcagcacaaccccggggcatgcagcagcctccagcacaacctcttagttcatctcagcctaatctccgtgctcaagtgcctcctccattactctcccctcaggttccagtttcattgctgaagtatgcaccaaacaacggtggcctgaatccactctttggccctcaacaggtagccatgctgaaccagctatcccagctaaaccagctttctcagatctcccagttacagcgattgttagcgcagcagcaaagggcgcagagtcagagaagcgtgccttctgggaaccggccgcagcaagaccagcagggtcgacctcttagtgtgcagcagcaaatgatgcaacaatctcgtcaacttgatccaaacctgttggtgaagcagcagactccaccatctcagcagcagccactccatcagccagccatgaagtctttccttgacaatgtcatgcccctgtggtggtatcggagaaggggatcctatag

SEQ ID NO: 326802 - DNA, 327 bp, Homo sapiens
attttatcaagatcattaacttaccattgtgatcctaaggttccagtttcattgctgaagtatgcaccaaacaacggtggcctgaatccactctttggccctcaacaggtagccatgctgaaccagctatcccagctaaaccagctttctcagatctcccagttacaggtaagcagagtcatagtctttcttagtacacatttatggagcatctactgtatgccaaacactagactctgtgcgggacatagtgcactaaacaaaacaggcgtagtcatagtcctcatggagcttacagtctatcgggggagacagatcgtgaacatt

SEQ ID NO: 326803 - DNA, 7733 bp, Homo sapiens
tgaggcctgaggcctggggcgggtggcggccgggctggccttggcctcgcgccttcccctgcggccgccgcgggctccgcgggcggtatcggagtgtcgtgcggcgcgtggccgcgtgacacgcgcacttgtcggagtgacgggccctgcggaagaggaggtgcggcccagggcgcaggggagccctcgggagcgggcccggccctcagcgccgccccggccgtgtcccggaggagcggcctgcgccgccgcgcgagaggaagcacccaggcatgtggaatatgctcatagtggcgatgtgcttggcccttctgggctgcctgcaagcccaggagctccagggacatgtctccataatcctgctgggagcaactggggacctggctaagaagtacttatggcagggactgttccagctgtacctggatgaagcggggaggggtcacagttttagcttccatggagctgctctgacagcccccaagcagggtcaagagctcatggccaaggccctggaatccctctcctgccccaaggacatggcacccagtcactgtgcagagcacaaggatcagttcctgcagctgagccagtaccgccaactgaagacggccgaggactatcaggccctgaacaaggacatcgaggcacagctccagcacgcaggcctccgggaggctggcaggatcttctacttctcagtgccacccttcgcctatgaagacattgcccgcaacatcaacagtagctgccggccaggcccgggcgcctggctgcgggttgtccttgagaaaccctttggccatgaccacttctcagcccagcagctggccacagaactcgggacctttttccaggaggaggagatgtaccgggtggaccattacttaggcaagcaggctgtggcgcagatcctgcctttccgagaccagaaccgcaaggctttggacggcctctggaaccggcaccatgtggagcgggtggagatcatcatgaaagagaccgtggatgctgaaggccgcaccagcttctatgaggagtacggtgtcattcgcgacgtcctccagaaccatctgacggaggtcctcaccctcgtggccatggagctgccccacaatgtcagcagtgcggaggctgtgctgcggcacaagcttcaggtcttccaggcgctgcggggcctgcagaggggcagtgccgtcgtgggccagtaccagtcttacagtgagcaggtgcgcagagagctgcagaagccagacagcttccacagcctgacgccgaccttcgcagccgtcctagtgcacattgacaaccttcgctgggagggcgtgcctttcatcctgatgtctggcaaagccttggacgagagagtgggctacgctcggatcttgttcaagaaccaggcctgctgtgtgcagagcgaaaagcactgggccgcggcgcagagccagtgcctgccccggcagctcgtcttccacatcggccatggcgacctgggcagccctgccgtgctggtcagcaggaacctgttcaggccctccctgccctccagctggaaggaaatggagggaccacctgggctccgccttttcggcagccctctgtccgattactacgcctacagccctgtgcgggagcgggacgcccactccgtcctcttatcccatatcttccatggccggaagaatttcttcatcaccacagagaacttgctggcctcctggaacttctggacccctctgctggagagcctggcccataaggccccacgcctctaccctggaggagctgagaatggccgtctgttggactttgagttcagtagcggccggttgttcttttcccagcagcagccggagcagctggtgccagggccagggccggccccaatgcccagtgacttccaggtcctcagggccaagtaccgagagagcccgctggtctccgcctggtccgaggagctgatctctaagctggctaatgacatcgaggccaccgctgtgcgagccgtgcggcgctttggccagttccacctggcactgtcggggggctcgagccccgtggccctgttccagcagctggccacggcgcactatggcttcccctgggcccacacgcacctgtggctggttgacgagcgctgcgtcccactctcagacccggagtccaacttccagggcctgcaggcccacctgctgcagcacgtccggatcccctactacaacatccaccccatgcctgtgcacctgcagcagcggctctgcgccgaggaggaccagggcgcccagatctatgccagggagatctcagccctggtggccaacagcagcttcgacctggtgctgctgggcatgggtgccgacgggcacacagcctccctcttcccacagtcacccactggcctggatggcgagcagctggtcgtgctgaccacgagcccctcccagccacaccgccgcatgagccttagcctgcctctcatcaaccgcgccaagaaggtggcagtcctggtcatgggcaggatgaagcgtgagatcaccacgctggtgagccgggtgggccatgagcccaagaagtggcccatctcgggtgtcctgccgcactccggccagctggtgtggtacatggactacgacgccttcctgggatgagggcgcctgtgccccttgcccgcttcgctcctgtgctttccttcgcccgtgtcttccctcccttctcggccccgccacctgcccagcgtgccctggctctccagaaccttctatcccacagtcaggccccagagagggcaggacaagccttgtcccgatgcctttgaccggcagctctgtgtattggtggatagatgcagaaacaaggaagaaatggagtctgctcctgagaagcttcaaattcaggccaggagagaagtcttaagaaaagacctccagcagttacacattcatatcaaccagcacaacacgggatggcgcccaaactccggcgtttacaagaggagacgtgacgtggtgggctgaggttaatcagggaaggtttcctgggggaggtgatccttgaactggctcccggggaacattcagagcatgattggtagacagaagggtgcagaggcgcccaggggagtacattgccccgtgcaaagcaggggcattggggactgtcttgagaccctgagggggtcaagcccctccttccccagctgcccctccttctagaacctctgcacatctagcctctggccctcctcttcactgcctccacctgctcccgcttgccatccctgtctcctccatcctggctgtgcagtaggaattccaggctcctccctgtgtctttgctgttcttcagactccatttatagagaatgagggctgataacaggaatacagtggcaaagactagactgtggaaagggttccagaaatctttttttcttttttaattaaaaaaaatatttgcagagatgagctcttgctatgttgcccaggctggtctcaaactcctgggctcaagcgatcctcccatctcagcctcccagagtgctgggattacaggtgtgagctactgcgcccagccccagaaatctcagtgctgtttggagctccatttctcatttgatgacttgctctgcgtggggaggtggggtctcattcccccaacttcctcagggaggacccctgccctccgctgctcctctgtcctgctagccttcctccaggaagcacactgggtgcagataatcaggacattccagagatccccaatttaagagggtcatttccatctcaggggactcccggatgggtgtttccgctctcaatagcccctcttgttttaccaggaaagatccagttaaatcacccactgaggtgacagctcattagcggggagagagatggagcatcgagtgacactgggccatccaggcggctctgctcccaccagacaggagctaggcctcactggcaggggggctgcccacagccttttcaggggctcgcttggcgggtgacggggccgcagccaggccttctctccctgccccttggtgaccccgtggcttcctgtctgctggcctctcctgctacttatcacttcaccacgaactctctgcctgagactggggaagtaagcgggtatcttctcagtgagcataggttggggactgtgatcttgagaagccatgggccagcaatacctgcttttctgaagcccccaaggagggctctgacattctttttaaaaacaccacaaagcaaaattcccaggacatgtgtagttttgtttgttcagtatcccacaacttaaggctgggagatggaactcttggttaaggtcgatttttctgtctggcttctccgcaccttccacttgctctctggatcaggcagatataaactttctagcgcattttgagagagggctttcttgggtgagggagcatggcaaagtcggtttctctctggactgtttacacttcaaggcggtggatttagaggaatcctggctttcattttcaatgccagttctgaggtgggaggatcacctgagcccaggagactgaggctgcagtgaggtgtgattgcactattgctctctagcctggaaaacagagtgagaccctatctcaaaaaaaaaaaaaaaaaaaaaggaaagagtgatgacaacagcccagggagcagccccgctcagaacccaagtcccaagttccagcactgtgttcccaggcaggctgtttgcctcttcctggtctggaagcccttgggtcctatggtggcggcagctcccacagtccaggttccctggtggggaccaatgattccatccgcatggaagcccacgtgtgcacttaggggcccataaatggcagaagggcccctcctttgggagaccttgtcagtcagcatctctagggcaaccgtgattgccatttgtagaggggaaggaatcaagggactttaagctagatcaaaatctggggacaaattctcctgctaactgcaagttaaaataggcccttcttactgaatttccctgtttgtttctctgcagacaatgctttagccctactcttgggcccccaagttagcagagtaatcaaagcttcctaccgtttggcctactattccagactagtccctcgaggggttcccttccaaaatatgcagggctcaggctcccaattccgggcctgtctgctttgcttgtgtttctcctgtccctgttctcccggagggcccaggtggaactcacgacagggagggagacgcttcccaaaaacctgcagggctatttcccagaatttggttttcaagtacaaaactttttgtcctgtaagatatatgcagcctcacagaagcagcctctgcctccactttaccagctacgtttttatcttaagcacatggggctcccttagaacttactccactgatttaaaaaaaaaaaactgcctggcagcatctcagtgtcagagtgagcacggcacaggaaaggcccgtggtgacgagggtgaggtggccacagtgaccggacgacaaatgagactctgcaaatgagactccagagggtgaagatctgcggtctccagacatcataggccatgtgacccactaggggccgcttacccctggccgtccgctggctgaactgaacgcattccctctctccgcaactctcccgtgaggctgcacccgtgtgggtagcactggaagcggcactgtttgcattgtacataggaaggaaggaagttcttccagcctcaccagcacctggcagcgagtcagagcctgtgagggcatccgaagcagtgatgcagtgtcaacctcccagctggtgccactctgccctcgggggctccaagcattgtaactcagtcatgggagctgcctctttggaagtgcagatttattcctgtaataatcctgcctgcttttacctctcgtccactgaccagcaagtgtgagtcccggtgtcagtcggcacagtccagtgtccatctgcatttgctcatgcagagggggtgagttgggcactccctgttgttggttttccttttgcagcacactgggcagtctccctataaaacaaaaaccccaccttctgtgccttctgctttagagcagagctccccctcccatttcctcagtcttccctgcaaaatctgtccaccggggaaggcagcaggaaccctgggcagcgggtgttctgggaaggctagtgacagcagatgtcatccaggaacagccacacacggttctccaggccgccgtcagcagctcaaggtggggtatgagtgagaagctgaggatctcgcagcttgttgctgagcaaggtgcaaccgggctcatgctgtcatcagcacaagacgggatggcaagggctttcagacgcatttccaagagtccagcaagccagggggaagatgatccctttgccgaagtgtaccctctagccaacttttgggagcgcttctgtttgcaaagcgctggggatgtgcctgtctctgtgtgacccacgaacgggaagggagagcactggagtaatgacacttctgctgctgctttgattctcaaggctgatctttaaaaccctcgccttgctgacaggtgctttaaaggcagtctgcatcttttcttcccttggtgtgggagaggtaaacactttgatttgctgaaagctgtatggagtatatttgaacagctagtagttagctttgaaagtggaagtgtgaacagacactacttgtgtcgctttgggtccttcactttacccccacagaagtctagaggcgtctgttataaagcgttacggggcgcctgcatgcaggaggaaggacctgtattagctggaaatcatcaggaacccagcttgcctccatctctctgagatgtgctgggtacagcctgcccctcctagttctgtccaccgggaagagccggctggcggcagatccccaggggcagagcccctgctggatcctgggagctcatctttacctgtgccggagtgggaactgtgattccagccgggcaggtcagagtggagcagtgctaagaggctgttgcaggagaactagacgggcggggcctgctgcatctggatcatgtttctgtgctctgccccgcgctagggactcagggtctgggcttctgccaggtgaggagcagagagactgttcccttgggtggagaggtgtgggcatgagagccacccattgccaagcagcaagaatgttcgtgcttttttccagagaggggaaccccactggtttttgtggaaacaatggaaacttacagatgcctgcctgggatgatgaggcacattcagaacaaatgcttttttttttttgagacagagtctcgctctgacgcccaggctggagtgcagtggcgcgatctcggctcactgcaaactttgcctcccaggttcaagtgattctcctacctcagcctcccgagtagctgggattacaccaccatgcccagcaaatttttgtgtttttagtagagacggagtttcaccatgttggccaggctggtctcgaactcctgacctcaggtgatccatccgccttggcctcccaaagtgctgggattacaggcgggagccaccatgcctggccagaacaaatgcctttttaaaccttttaagaacatttttaaaatgtctttttctatgtcaaatgtaacgtttatttttttaaacaataaaattgatttgccaaaatccgggct

SEQ ID NO: 326804 - DNA, 9020 bp, Homo sapiens
tgaggcctgaggcctggggcgggtggcggccgggctggccttggcctcgcgccttcccctgcggccgccgcgggctccgcgggcggtatcggagtgtcgtgcggcgcgtggccgcgtgacacgcgcacttgtcggagtgacgggccctgcggaagaggaggtgcggcccagggcgcaggggagccctcgggagcgggcccggccctcagcgccgccccggccgtgtcccggaggagcggcctgcgccgccgcgcgagaggaagcacccaggcatgtggaatatgctcatagtggcgatgtgcttggcccttctgggctgcctgcaagcccaggagctccagggacatgtctccataatcctgctgggagcaactggggacctggctaagaagtacttatggcagggactgttccagctgtacctggatgaagcggggaggggtcacagttttagcttccatggagctgctctgacagcccccaagcagggtcaagagctcatggccaaggccctggaatccctctcctgccccaaggacatggcacccagtcactgtgcagagcacaaggatcagttcctgcagctgagccagtaccgccaactgaagacggccgaggactatcaggccctgaacaaggacatcgaggcacagctccagcacgcaggcctccgggaggctggcaggatcttctacttctcagtgccacccttcgcctatgaagacattgcccgcaacatcaacagtagctgccggccaggcccgggcgcctggctgcgggttgtccttgagaaaccctttggccatgaccacttctcagcccagcagctggccacagaactcgggacctttttccaggaggaggagatgtaccgggtggaccattacttaggcaagcaggctgtggcgcagatcctgcctttccgagaccagaaccgcaaggctttggacggcctctggaaccggcaccatgtggagcgggtggagatcatcatgaaagagaccgtggatgctgaaggccgcaccagcttctatgaggagtacggtgtcattcgcgacgtcctccagaaccatctgacggaggtcctcaccctcgtggccatggagctgccccacaatgtcagcagtgcggaggctgtgctgcggcacaagcttcaggtcttccaggcgctgcggggcctgcagaggggcagtgccgtcgtgggccagtaccagtcttacagtgagcaggtgcgcagagagctgcagaagccagacagcttccacagcctgacgccgaccttcgcagccgtcctagtgcacattgacaaccttcgctgggagggcgtgcctttcatcctgatgtctggcaaagccttggacgagagagtgggctacgctcggatcttgttcaagaaccaggcctgctgtgtgcagagcgaaaagcactgggccgcggcgcagagccagtgcctgccccggcagctcgtcttccacatcggccatggcgacctgggcagccctgccgtgctggtcagcaggaacctgttcaggccctccctgccctccagctggaaggaaatggagggaccacctgggctccgccttttcggcagccctctgtccgattactacgcctacagccctgtgcgggagcgggacgcccactccgtcctcttatcccatatcttccatggccggaagaatttcttcatcaccacagagaacttgctggcctcctggaacttctggacccctctgctggagagcctggcccataaggccccacgcctctaccctggaggagctgagaatggccgtctgttggactttgagttcagtagcggccggttgttcttttcccagcagcagccggagcagctggtgccagggccagggccggccccaatgcccagtgacttccaggtcctcagggccaagtaccgagagagcccgctggtctccgcctggtccgaggagctgatctctaagctggctaatgacatcgaggccaccgctgtgcgagccgtgcggcgctttggccagttccacctggcactgtcggggggctcgagccccgtggccctgttccagcagctggccacggcgcactatggcttcccctgggcccacacgcacctgtggctggttgacgagcgctgcgtcccactctcagacccggagtccaacttccagggcctgcaggcccacctgctgcagcacgtccggatcccctactacaacatccaccccatgcctgtgcacctgcagcagcggctctgcgccgaggaggaccagggcgcccagatctatgccagggagatctcagccctggtggccaacagcagcttcgacctggtgctgctgggcatgggtgccgacgggcacacagcctccctcttcccacagtcacccactggcctggatggcgagcagctggtcgtgctgaccacgagcccctcccagccacaccgccgcatgagccttagcctgcctctcatcaaccgcgccaagaaggtggcagtcctggtcatgggcaggatgaagcgtgagatcaccacgctggtgagccgggtgggccatgagcccaagaagtggcccatctcgggtgtcctgccgcactccggccagctggtgtggtacatggactacgacgccttcctgggatgagggcgcctgtgccccttgcccgcttcgctcctgtgctttccttcgcccgtgtcttccctcccttctcggccccgccacctgcccagcgtgccctggctctccagaaccttctatcccacagtcaggccccagagagggcaggacaagccttgtcccgatgcctttgaccggcagctctgtgtattggtggatagatgcagaaacaaggaagaaatggagtctgctcctgagaagcttcaaattcaggccaggagagaagtcttaagaaaagacctccagcagttacacattcatatcaaccagcacaacacgggatggcgcccaaactccggcgtttacaagaggagacgtgacgtggtgggctgaggttaatcagggaaggtttcctgggggaggtgatccttgaactggctcccggggaacattcagagcatgattggtagacagaagggtgcagaggcgcccaggggagtacattgccccgtgcaaagcaggggcattggggactgtcttgagaccctgagggggtcaagcccctccttccccagctgcccctccttctagaacctctgcacatctagcctctggccctcctcttcactgcctccacctgctcccgcttgccatccctgtctcctccatcctggctgtgcagtaggaattccaggctcctccctgtgtctttgctgttcttcagactccatttatagagaatgagggctgataacaggaatacagtggcaaagactagactgtggaaagggttccagaaatctttttttcttttttaattaaaaaaaatatttgcagagatgagctcttgctatgttgcccaggctggtctcaaactcctgggctcaagcgatcctcccatctcagcctcccagagtgctgggattacaggtgtgagctactgcgcccagccccagaaatctcagtgctgtttggagctccatttctcatttgatgacttgctctgcgtggggaggtggggtctcattcccccaacttcctcagggaggacccctgccctccgctgctcctctgtcctgctagccttcctccaggaagcacactgggtgcagataatcaggacattccagagatccccaatttaagagggtcatttccatctcaggggactcccggatgggtgtttccgctctcaatagcccctcttgttttaccaggaaagatccagttaaatcacccactgaggtgacagctcattagcggggagagagatggagcatcgagtgacactgggccatccaggcggctctgctcccaccagacaggagctaggcctcactggcaggggggctgcccacagccttttcaggggctcgcttggcgggtgacggggccgcagccaggccttctctccctgccccttggtgaccccgtggcttcctgtctgctggcctctcctgctacttatcacttcaccacgaactctctgcctgagactggggaagtaagcgggtatcttctcagtgagcataggttggggactgtgatcttgagaagccatgggccagcaatacctgcttttctgaagcccccaaggagggctctgacattctttttaaaaacaccacaaagcaaaattcccaggacatgtgtagttttgtttgttcagtatcccacaacttaaggctgggagatggaactcttggttaaggtcgatttttctgtctggcttctccgcaccttccacttgctctctggatcaggcagatataaactttctagcgcattttgagagagggctttcttgggtgagggagcatggcaaagtcggtttctctctggactgtttacacttcaaggcggtggatttagaggaatcctggctttcattttcaatgccagtctgagacatgttcccaagccggggctcttgttcacaccacttactctggccaccaacaacaacccaggccagacagagcatctcttttttttttttgagacagagtctctgtcgcccaggctggagcccagtggcgagatcttggctcactacaacctccacctcccgggttcaggcaattctcgtgcctaagcctcccgagtagctgcgactacaggcgccggccagcatgcctgtctaatttttgtattttagtagagacagggtttcaccatgttgcccaggctggtctcgaactcctgagctcgggcagtctacccacctcagcctcccaaagtgctgggattacaggcgtgagccaccgcgcccagccagaacatctgtttttacacccagagagcgcccctcgttaggacagaaccacggtgcccagagccaggaagccgccctcctggcgcccagcatctgagcttctacacgtgatgggcgggctcaggagaggacagggagtcgtggtggaagttccacagctggccgcgtgggggggcccttgcaccgcactgccgcctcctgactgcccctatccccgcagcccctgtgccggatttcatttccctcctctctcccagggtacctggccccagcactctcccatctgttcttcaggaaccgactcctctccagttgcaacaccagggagaaaggggcctccacatgcccaagtacccctgcaggatgaagggcaggccggcccttgatgtgccatttctgaataatagtcactgccgccgagtctaggatgtcctgttctaactcagccctgcctcggatgcaccaccgatctgtgcagagtgggtgtgggagtgtgggtgagggtcgaaatgccaaaggtctactttccagaatcaagtgccttctgcaaatcatgttggaaaagtccaaacctggagatgtccctgtgcctccgcccctacccaccccttttccttcagctgtgttaggaaggagaagttttcagaaccctctaggctggtggctttcaaacttcagaccatgatctgcagcaagaaacgtgccttccatcataaatcagtccatttgtttacaactgtgttccaagcaggtttcataaagaaattcttacccttagaacctcggatatcctctatgttttagttttcatttttttaaaatgcttcttaaaattcactaaattgggctaggtgtggctcatgcctgtaatcccagcactatgggaggctgaggtgagaggatcacttgagcccagaaggttgaaaccagcctgggcaacatagtgagaccccatctctacaaaaagttttaaaaccaggtatggtggtgccctcctgtggtcccagctactcgggagtctgaggtgggaggatcacctgagcccaggagactgaggctgcagtgaggtgtgattgcactattgctctctagcctggaaaacagagtgagaccctatctcaaaaaaaaaaaaaaaaaaaaaggaaagagtgatgacaacagcccagggagcagccccgctcagaacccaagtcccaagttccagcactgtgttcccaggcaggctgtttgcctcttcctggtctggaagcccttgggtcctatggtggcggcagctcccacagtccaggttccctggtggggaccaatgattccatccgcatggaagcccacgtgtgcacttaggggcccataaatggcagaagggcccctcctttgggagaccttgtcagtcagcatctctagggcaaccgtgattgccatttgtagaggggaaggaatcaagggactttaagctagatcaaaatctggggacaaattctcctgctaactgcaagttaaaataggcccttcttactgaatttccctgtttgtttctctgcagacaatgctttagccctactcttgggcccccaagttagcagagtaatcaaagcttcctaccgtttggcctactattccagactagtccctcgaggggttcccttccaaaatatgcagggctcaggctcccaattccgggcctgtctgctttgcttgtgtttctcctgtccctgttctcccggagggcccaggtggaactcacgacagggagggagacgcttcccaaaaacctgcagggctatttcccagaatttggttttcaagtacaaaactttttgtcctgtaagatatatgcagcctcacagaagcagcctctgcctccactttaccagctacgtttttatcttaagcacatggggctcccttagaacttactccactgatttaaaaaaaaaaaactgcctggcagcatctcagtgtcagagtgagcacggcacaggaaaggcccgtggtgacgagggtgaggtggccacagtgaccggacgacaaatgagactctgcaaatgagactccagagggtgaagatctgcggtctccagacatcataggccatgtgacccactaggggccgcttacccctggccgtccgctggctgaactgaacgcattccctctctccgcaactctcccgtgaggctgcacccgtgtgggtagcactggaagcggcactgtttgcattgtacataggaaggaaggaagttcttccagcctcaccagcacctggcagcgagtcagagcctgtgagggcatccgaagcagtgatgcagtgtcaacctcccagctggtgccactctgccctcgggggctccaagcattgtaactcagtcatgggagctgcctctttggaagtgcagatttattcctgtaataatcctgcctgcttttacctctcgtccactgaccagcaagtgtgagtcccggtgtcagtcggcacagtccagtgtccatctgcatttgctcatgcagagggggtgagttgggcactccctgttgttggttttccttttgcagcacactgggcagtctccctataaaacaaaaaccccaccttctgtgccttctgctttagagcagaatgtcatccaggaacagccacacacggttctccaggccgccgtcagcagctcaaggtggggtatgagtgagaagctgaggatctcgcagcttgttgctgagcaaggtgcaaccgggctcatgctgtcatcagcacaagacgggatggcaagggctttcagacgcatttccaagagtccagcaagccagggggaagatgatccctttgccgaagtgtaccctctagccaacttttgggagcgcttctgtttgcaaagcgctggggatgtgcctgtctctgtgtgacccacgaacgggaagggagagcactggagtaatgacacttctgctgctgctttgattctcaaggctgatctttaaaaccctcgccttgctgacaggtgctttaaaggcagtctgcatcttttcttcccttggtgtgggagaggtaaacactttgatttgctgaaagctgtatggagtatatttgaacagctagtagttagctttgaaagtggaagtgtgaacagacactacttgtgtcgctttgggtccttcactttacccccacagaagtctagaggcgtctgttataaagcgttacggggcgcctgcatgcaggaggaaggacctgtattagctggaaatcatcaggaacccagcttgcctccatctctctgagatgtgctgggtacagcctgcccctcctagttctgtccaccgggaagagccggctggcggcagatccccaggggcagagcccctgctggatcctgggagctcatctttacctgtgccggagtgggaactgtgattccagccgggcaggtcagagtggagcagtgctaagaggctgttgcaggagaactagacgggcggggcctgctgcatctggatcatgtttctgtgctctgccccgcgctagggactcagggtctgggcttctgccaggtgaggagcagagagactgttcccttgggtggagaggtgtgggcatgagagccacccattgccaagcagcaagaatgttcgtgcttttttccagagaggggaaccccactggtttttgtggaaacaatggaaacttacagatgcctgcctgggatgatgaggcacattcagaacaaatgcttttttttttttgagacagagtctcgctctgacgcccaggctggagtgcagtggcgcgatctcggctcactgcaaactttgcctcccaggttcaagtgattctcctacctcagcctcccgagtagctgggattacaccaccatgcccagcaaatttttgtgtttttagtagagacggagtttcaccatgttggccaggctggtctcgaactcctgacctcaggtgatccatccgccttggcctcccaaagtgctgggattacaggcgggagccaccatgcctggccagaacaaatgcctttttaaaccttttaagaacatttttaaaatgtctttttctatgtcaaatgtaacgtttatttttttaaacaataaaattgatttgccaaaatccgggct

SEQ ID NO: 326805 - DNA, 6016 bp, Homo sapiens
tgaggcctgaggcctggggcgggtggcggccgggctggccttggcctcgcgccttcccctgcggccgccgcgggctccgcgggcggtatcggagtgtcgtgcggcgcgtggccgcgtgacacgcgcacttgtcggagtgacgggccctgcggaagaggaggtgcggcccagggcgcaggggagccctcgggagcgggcccggccctcagcgccgccccggccgtgtcccggaggagcggcctgcgccgccgcgcgagaggaagcacccaggcatgtggaatatgctcatagtggcgatgtgcttggcccttctgggctgcctgcaagcccaggagctccagggacatgtctccataatcctgctgggagcaactggggacctggctaagaagtacttatggcagggactgttccagctgtacctggatgaagcggggaggggtcacagttttagcttccatggagctgctctgacagcccccaagcagggtcaagagctcatggccaaggccctggaatccctctcctgccccaaggacatggcacccagtcactgtgcagagcacaaggatcagttcctgcagctgagccagtaccgccaactgaagacggccgaggactatcaggccctgaacaaggacatcgaggcacagctccagcacgcaggcctccgggaggctggcaggatcttctacttctcagtgccacccttcgcctatgaagacattgcccgcaacatcaacagtagctgccggccaggcccgggcgcctggctgcgggttgtccttgagaaaccctttggccatgaccacttctcagcccagcagctggccacagaactcgggacctttttccaggaggaggagatgtaccgggtggaccattacttaggcaagcaggctgtggcgcagatcctgcctttccgagaccagaaccgcaaggctttggacggcctctggaaccggcaccatgtggagcgggtggagatcatcatgaaagagaccgtggatgctgaaggccgcaccagcttctatgaggagtacggtgtcattcgcgacgtcctccagaaccatctgacggaggtcctcaccctcgtggccatggagctgccccacaatgtcagcagtgcggaggctgtgctgcggcacaagcttcaggtcttccaggcgctgcggggcctgcagaggggcagtgccgtcgtgggccagtaccagtcttacagtgagcaggtgcgcagagagctgcagaagccagacagcttccacagcctgacgccgaccttcgcagccgtcctagtgcacattgacaaccttcgctgggagggcgtgcctttcatcctgatgtctggcaaagccttggacgagagagtgggctacgctcggatcttgttcaagaaccaggcctgctgtgtgcagagcgaaaagcactgggccgcggcgcagagccagtgcctgccccggcagctcgtcttccacatcggccatggcgacctgggcagccctgccgtgctggtcagcaggaacctgttcaggccctccctgccctccagctggaaggaaatggagggaccacctgggctccgccttttcggcagccctctgtccgattactacgcctacagccctgtgcgggagcgggacgcccactccgtcctcttatcccatatcttccatggccggaagaatttcttcatcaccacagagaacttgctggcctcctggaacttctggacccctctgctggagagcctggcccataaggccccacgcctctaccctggaggagctgagaatggccgtctgttggactttgagttcagtagcggccggttgttcttttcccagcagcagccggagcagctggtgccagggccagggccggccccaatgcccagtgacttccaggtcctcagggccaagtaccgagagagcccgctggtctccgcctggtccgaggagctgatctctaagctggctaatgacatcgaggccaccgctgtgcgagccgtgcggcgctttggccagttccacctggcactgtcggggggctcgagccccgtggccctgttccagcagctggccacggcgcactatggcttcccctgggcccacacgcacctgtggctggttgacgagcgctgcgtcccactctcagacccggagtccaacttccagggcctgcaggcccacctgctgcagcacgtccggatcccctactacaacatccaccccatgcctgtgcacctgcagcagcggctctgcgccgaggaggaccagggcgcccagatctatgccagggagatctcagccctggtggccaacagcagcttcgacctggtgctgctgggcatgggtgccgacgggcacacagcctccctcttcccacagtcacccactggcctggatggcgagcagctggtcgtgctgaccacgagcccctcccagccacaccgccgcatgagccttagcctgcctctcatcaaccgcgccaagaaggtggcagtcctggtcatgggcaggatgaagcgtgagatcaccacgctggtgagccgggtgggccatgagcccaagaagtggcccatctcgggtgtcctgccgcactccggccagctggtgtggtacatggactacgacgccttcctgggatgagggcgcctgtgccccttgcccgcttcgctcctgtgctttccttcgcccgtgtcttccctcccttctcggccccgccacctgcccagcgtgccctggctctccagaaccttctatcccacagtcaggccccagagagggcaggacaagccttgtcccgatgcctttgaccggcagctctgtgtattggtggatagatgcagaaacaaggaagaaatggagtctgctcctgagaagcttcaaattcaggccaggagagaagtcttaagaaaagacctccagcagttacacattcatatcaaccagcacaacacgggatggcgcccaaactccggcgtttacaagaggagacgtgacgtggtgggctgaggttaatcagggaaggtttcctgggggaggtgatccttgaactggctcccggggaacattcagagcatgattggtagacagaagggtgcagaggcgcccaggggagtacattgccccgtgcaaagcaggggcattggggactgtcttgagaccctgagggggtcaagcccctccttccccagctgcccctccttctagaacctctgcacatctagcctctggccctcctcttcactgcctccacctgctcccgcttgccatccctgtctcctccatcctggctgtgcagtaggaattccaggctcctccctgtgtctttgctgttcttcagactccatttatagagaatgagggctgataacaggaatacagtggcaaagactagactgtggaaagggttccagaaatctttttttcttttttaattaaaaaaaatatttgcagagatgagctcttgctatgttgcccaggctggtctcaaactcctgggctcaagcgatcctcccatctcagcctcccagagtgctgggattacaggtgtgagctactgcgcccagccccagaaatctcagtgctgtttggagctccatttctcatttgatgacttgctctgcgtggggaggtggggtctcattcccccaacttcctcagggaggacccctgccctccgctgctcctctgtcctgctagccttcctccaggaagcacactgggtgcagataatcaggacattccagagatccccaatttaagagggtcatttccatctcaggggactcccggatgggtgtttccgctctcaatagcccctcttgttttaccaggaaagatccagttaaatcacccactgaggtgacagctcattagcggggagagagatggagcatcgagtgacactgggccatccaggcggctctgctcccaccagacaggagctaggcctcactggcaggggggctgcccacagccttttcaggggctcgcttggcgggtgacggggccgcagccaggccttctctccctgccccttggtgaccccgtggcttcctgtctgctggcctctcctgctacttatcacttcaccacgaactctctgcctgagactggggaagtaagcgggtatcttctcagtgagcataggttggggactgtgatcttgagaagccatgggccagcaatacctgcttttctgaagcccccaaggagggctctgacattctttttaaaaacaccacaaagcaaaattcccaggacatgtgtagttttgtttgttcagtatcccacaacttaaggctgggagatggaactcttggttaaggtcgatttttctgtctggcttctccgcaccttccacttgctctctggatcaggcagatataaactttctagcgcattttgagagagggctttcttgggtgagggagcatggcaaagtcggtttctctctggactgtttacacttcaaggcggtggatttagaggaatcctggctttcattttcaatgccagtctgagacatgttcccaagccggggctcttgttcacaccacttactctggccaccaacaacaacccaggccagacagagcatctcttttttttttttgagacagagtctctgtcgcccaggctggagcccagtggcgagatcttggctcactacaacctccacctcccgggttcaggcaattctcgtgcctaagcctcccgagtagctgcgactacaggcgccggccagcatgcctgtctaatttttgtattttagtagagacagggtttcaccatgttgcccaggctggtctcgaactcctgagctcgggcagtctacccacctcagcctcccaaagtgctgggattacaggcgtgagccaccgcgcccagccagaacatctgtttttacacccagagagcgcccctcgttaggacagaaccacggtgcccagagccaggaagccgccctcctggcgcccagcatctgagcttctacacgtgatgggcgggctcaggagaggacagggagtcgtggtggaagttccacagctggccgcgtgggggggcccttgcaccgcactgccgcctcctgactgcccctatccccgcagcccctgtgccggatttcatttccctcctctctcccagggtacctggccccagcactctcccatctgttcttcaggaaccgactcctctccagttgcaacaccagggagaaaggggcctccacatgcccaagtacccctgcaggatgaagggcaggccggcccttgatgtgccatttctgaataatagtcactgccgccgagtctaggatgtcctgttctaactcagccctgcctcggatgcaccaccgatctgtgcagagtgggtgtgggagtgtgggtgagggtcgaaatgccaaaggtctactttccagaatcaagtgccttctgcaaatcatgttggaaaagtccaaacctggagatgtccctgtgcctccgcccctacccaccccttttccttcagctgtgttaggaaggagaagttttcagaaccctctaggctggtggctttcaaacttcagaccatgatctgcagcaagaaacgtgccttccatcataaatcagtccatttgtttacaactgtgttccaagcaggtttcataaagaaattcttacccttagaacctcggatatcctctatgttttagttttcatttttttaaaatgcttcttaaaattcactaaattgggctaggtgtggctcatgcctgtaatcccagcactatgggaggctgaggtgagaggatcacttgagcccagaaggctggtctcgaactcctgacctcaggtgatccatccgccttggcctcccaaagtgctgggattacaggcgggagccaccatgcctggccagaacaaatgcctttttaaaccttttaagaacatttttaaaatgtctttttctatgtcaaatgtaacgtttatttttttaaacaataaaattgatttgccaaaatccgggct

SEQ ID NO: 326806 - DNA, 5277 bp, Homo sapiens
tacattggtttgattttgtatttgtagctcagagtcattgttgtctaaatccaactttctaagttagcaaaacaacggcggctctgctcccaccagacaggagctaggcctcactggcaggggggctgcccacagccttttcaggggctcgcttggcgggtgacggggccgcagccaggccttctctccctgccccttggtgaccccgtggcttcctgtctgctggcctctcctgctacttatcacttcaccacgaactctctgcctgagactggggaagtaagcgggtatcttctcagtgagcataggttggggactgtgatcttgagaagccatgggccagcaatacctgcttttctgaagcccccaaggagggctctgacattctttttaaaaacaccacaaagcaaaattcccaggacatgtgtagttttgtttgttcagtatcccacaacttaaggctgggagatggaactcttggttaaggtcgatttttctgtctggcttctccgcaccttccacttgctctctggatcaggcagatataaactttctagcgcattttgagagagggctttcttgggtgagggagcatggcaaagtcggtttctctctggactgtttacacttcaaggcggtggatttagaggaatcctggctttcattttcaatgccagtctgagacatgttcccaagccggggctcttgttcacaccacttactctggccaccaacaacaacccaggccagacagagcatctcttttttttttttgagacagagtctctgtcgcccaggctggagcccagtggcgagatcttggctcactacaacctccacctcccgggttcaggcaattctcgtgcctaagcctcccgagtagctgcgactacaggcgccggccagcatgcctgtctaatttttgtattttagtagagacagggtttcaccatgttgcccaggctggtctcgaactcctgagctcgggcagtctacccacctcagcctcccaaagtgctgggattacaggcgtgagccaccgcgcccagccagaacatctgtttttacacccagagagcgcccctcgttaggacagaaccacggtgcccagagccaggaagccgccctcctggcgcccagcatctgagcttctacacgtgatgggcgggctcaggagaggacagggagtcgtggtggaagttccacagctggccgcgtgggggggcccttgcaccgcactgccgcctcctgactgcccctatccccgcagcccctgtgccggatttcatttccctcctctctcccagggtacctggccccagcactctcccatctgttcttcaggaaccgactcctctccagttgcaacaccagggagaaaggggcctccacatgcccaagtacccctgcaggatgaagggcaggccggcccttgatgtgccatttctgaataatagtcactgccgccgagtctaggatgtcctgttctaactcagccctgcctcggatgcaccaccgatctgtgcagagtgggtgtgggagtgtgggtgagggtcgaaatgccaaaggtctactttccagaatcaagtgccttctgcaaatcatgttggaaaagtccaaacctggagatgtccctgtgcctccgcccctacccaccccttttccttcagctgtgttaggaaggagaagttttcagaaccctctaggctggtggctttcaaacttcagaccatgatctgcagcaagaaacgtgccttccatcataaatcagtccatttgtttacaactgtgttccaagcaggtttcataaagaaattcttacccttagaacctcggatatcctctatgttttagttttcatttttttaaaatgcttcttaaaattcactaaattgggctaggtgtggctcatgcctgtaatcccagcactatgggaggctgaggtgagaggatcacttgagcccagaaggttgaaaccagcctgggcaacatagtgagaccccatctctacaaaaagttttaaaaccaggtatggtggtgccctcctgtggtcccagctactcgggagtctgaggtgggaggatcacctgagcccaggagactgaggctgcagtgaggtgtgattgcactattgctctctagcctggaaaacagagtgagaccctatctcaaaaaaaaaaaaaaaaaaaaaggaaagagtgatgacaacagcccagggagcagccccgctcagaacccaagtcccaagttccagcactgtgttcccaggcaggctgtttgcctcttcctggtctggaagcccttgggtcctatggtggcggcagctcccacagtccaggttccctggtggggaccaatgattccatccgcatggaagcccacgtgtgcacttaggggcccataaatggcagaagggcccctcctttgggagaccttgtcagtcagcatctctagggcaaccgtgattgccatttgtagaggggaaggaatcaagggactttaagctagatcaaaatctggggacaaattctcctgctaactgcaagttaaaataggcccttcttactgaatttccctgtttgtttctctgcagacaatgctttagccctactcttgggcccccaagttagcagagtaatcaaagcttcctaccgtttggcctactattccagactagtccctcgaggggttcccttccaaaatatgcagggctcaggctcccaattccgggcctgtctgctttgcttgtgtttctcctgtccctgttctcccggagggcccaggtggaactcacgacagggagggagacgcttcccaaaaacctgcagggctatttcccagaatttggttttcaagtacaaaactttttgtcctgtaagatatatgcagcctcacagaagcagcctctgcctccactttaccagctacgtttttatcttaagcacatggggctcccttagaacttactccactgatttaaaaaaaaaaaactgcctggcagcatctcagtgtcagagtgagcacggcacaggaaaggcccgtggtgacgagggtgaggtggccacagtgaccggacgacaaatgagactctgcaaatgagactccagagggtgaagatctgcggtctccagacatcataggccatgtgacccactaggggccgcttacccctggccgtccgctggctgaactgaacgcattccctctctccgcaactctcccgtgaggctgcacccgtgtgggtagcactggaagcggcactgtttgcattgtacataggaaggaaggaagttcttccagcctcaccagcacctggcagcgagtcagagcctgtgagggcatccgaagcagtgatgcagtgtcaacctcccagctggtgccactctgccctcgggggctccaagcattgtaactcagtcatgggagctgcctctttggaagtgcagatttattcctgtaataatcctgcctgcttttacctctcgtccactgaccagcaagtgtgagtcccggtgtcagtcggcacagtccagtgtccatctgcatttgctcatgcagagggggtgagttgggcactccctgttgttggttttccttttgcagcacactgggcagtctccctataaaacaaaaaccccaccttctgtgccttctgctttagagcagagctccccctcccatttcctcagtcttccctgcaaaatctgtccaccggggaaggcagcaggaaccctgggcagcgggtgttctgggaaggctagtgacagcagatgtcatccaggaacagccacacacggttctccaggccgccgtcagcagctcaaggtggggtatgagtgagaagctgaggatctcgcagcttgttgctgagcaaggtgcaaccgggctcatgctgtcatcagcacaagacgggatggcaagggctttcagacgcatttccaagagtccagcaagccagggggaagatgatccctttgccgaagtgtaccctctagccaacttttgggagcgcttctgtttgcaaagcgctggggatgtgcctgtctctgtgtgacccacgaacgggaagggagagcactggagtaatgacacttctgctgctgctttgattctcaaggctgatctttaaaaccctcgccttgctgacaggtgctttaaaggcagtctgcatcttttcttcccttggtgtgggagaggtaaacactttgatttgctgaaagctgtatggagtatatttgaacagctagtagttagctttgaaagtggaagtgtgaacagacactacttgtgtcgctttgggtccttcactttacccccacagaagtctagaggcgtctgttataaagcgttacggggcgcctgcatgcaggaggaaggacctgtattagctggaaatcatcaggaacccagcttgcctccatctctctgagatgtgctgggtacagcctgcccctcctagttctgtccaccgggaagagccggctggcggcagatccccaggggcagagcccctgctggatcctgggagctcatctttacctgtgccggagtgggaactgtgattccagccgggcaggtcagagtggagcagtgctaagaggctgttgcaggagaactagacgggcggggcctgctgcatctggatcatgtttctgtgctctgccccgcgctagggactcagggtctgggcttctgccaggtgaggagcagagagactgttcccttgggtggagaggtgtgggcatgagagccacccattgccaagcagcaagaatgttcgtgcttttttccagagaggggaaccccactggtttttgtggaaacaatggaaacttacagatgcctgcctgggatgatgaggcacattcagaacaaatgcttttttttttttgagacagagtctcgctctgacgcccaggctggagtgcagtggcgcgatctcggctcactgcaaactttgcctcccaggttcaagtgattctcctacctcagcctcccgagtagctgggattacaccaccatgcccagcaaatttttgtgtttttagtagagacggagtttcaccatgttggccaggctggtctcgaactcctgacctcaggtgatccatccgccttggcctcccaaagtgctgggattacaggcgggagccaccatgcctggccagaacaaatgcctttttaaaccttttaagaacatttttaaaatgtctttttctatgtcaaatgtaacgtttatttttttaaacaataaaattgatttgccaaaatccgggct

SEQ ID NO: 326807 - DNA, 5923 bp, Homo sapiens
tgaggcctgaggcctggggcgggtggcggccgggctggccttggcctcgcgccttcccctgcggccgccgcgggctccgcgggcggtatcggagtgtcgtgcggcgcgtggccgcgtgacacgcgcacttgtcggagtgacgggccctgcggaagaggaggtgcggcccagggcgcaggggagccctcgggagcgggcccggccctcagcgccgccccggccgtgtcccggaggagcggcctgcgccgccgcgcgagaggaagcacccaggcatgtggaatatgctcatagtggcgatgtgcttggcccttctgggctgcctgcaagcccaggagctccagggacatgtctccataatcctgctgggagcaactggggacctggctaagaagtacttatggcagggactgttccagctgtacctggatgaagcggggaggggtcacagttttagcttccatggagctgctctgacagcccccaagcagggtcaagagctcatggccaaggccctggaatccctctcctgccccaaggacatggcacccagtcactgtgcagagcacaaggatcagttcctgcagctgagccagtaccgccaactgaagacggccgaggactatcaggccctgaacaaggacatcgaggcacagctccagcacgcaggcctccgggaggctggcaggatcttctacttctcagtgccacccttcgcctatgaagacattgcccgcaacatcaacagtagctgccggccaggcccgggcgcctggctgcgggttgtccttgagaaaccctttggccatgaccacttctcagcccagcagctggccacagaactcgggacctttttccaggaggaggagatgtaccgggtggaccattacttaggcaagcaggctgtggcgcagatcctgcctttccgagaccagaaccgcaaggctttggacggcctctggaaccggcaccatgtggagcgggtggagatcatcatgaaagagaccgtggatgctgaaggccgcaccagcttctatgaggagtacggtgtcattcgcgacgtcctccagaaccatctgacggaggtcctcaccctcgtggccatggagctgccccacaatgtcagcagtgcggaggctgtgctgcggcacaagcttcaggtcttccaggcgctgcggggcctgcagaggggcagtgccgtcgtgggccagtaccagtcttacagtgagcaggtgcgcagagagctgcagaagccagacagcttccacagcctgacgccgaccttcgcagccgtcctagtgcacattgacaaccttcgctgggagggcgtgcctttcatcctgatgtctggcaaagccttggacgagagagtgggctacgctcggatcttgttcaagaaccaggcctgctgtgtgcagagcgaaaagcactgggccgcggcgcagagccagtgcctgccccggcagctcgtcttccacatcggccatggcgacctgggcagccctgccgtgctggtcagcaggaacctgttcaggccctccctgccctccagctggaaggaaatggagggaccacctgggctccgccttttcggcagccctctgtccgattactacgcctacagccctgtgcgggagcgggacgcccactccgtcctcttatcccatatcttccatggccggaagaatttcttcatcaccacagagaacttgctggcctcctggaacttctggacccctctgctggagagcctggcccataaggccccacgcctctaccctggaggagctgagaatggccgtctgttggactttgagttcagtagcggccggttgttcttttcccagcagcagccggagcagctggtgccagggccagggccggccccaatgcccagtgacttccaggtcctcagggccaagtaccgagagagcccgctggtctccgcctggtccgaggagctgatctctaagctggctaatgacatcgaggccaccgctgtgcgagccgtgcggcgctttggccagttccacctggcactgtcggggggctcgagccccgtggccctgttccagcagctggccacggcgcactatggcttcccctgggcccacacgcacctgtggctggttgacgagcgctgcgtcccactctcagacccggagtccaacttccagggcctgcaggcccacctgctgcagcacgtccggatcccctactacaacatccaccccatgcctgtgcacctgcagcagcggctctgcgccgaggaggaccagggcgcccagatctatgccagggagatctcagccctggtggccaacagcagcttcgacctggtgctgctgggcatgggtgccgacgggcacacagcctccctcttcccacagtcacccactggcctggatggcgagcagctggtcgtgctgaccacgagcccctcccagccacaccgccgcatgagccttagcctgcctctcatcaaccgcgccaagaaggtggcagtcctggtcatgggcaggatgaagcgtgagatcaccacgctggtgagccgggtgggccatgagcccaagaagtggcccatctcgggtgtcctgccgcactccggccagctggtgtggtacatggactacgacgccttcctgggatgagggcgcctgtgccccttgcccgcttcgctcctgtgctttccttcgcccgtgtcttccctcccttctcggccccgccacctgcccagcgtgccctggctctccagaaccttctatcccacagtcaggccccagagagggcaggacaagccttgtcccgatgcctttgaccggcagctctgtgtattggtggatagatgcagaaacaaggaagaaatggagtctgctcctgagaagcttcaaattcaggccaggagagaagtcttaagaaaagacctccagcagttacacattcatatcaaccagcacaacacgggatggcgcccaaactccggcgtttacaagaggagacgtgacgtggtgggctgaggttaatcagggaaggtttcctgggggaggtgatccttgaactggctcccggggaacattcagagcatgattggtagacagaagggtgcagaggcgcccaggggagtacattgccccgtgcaaagcaggggcattggggactgtcttgagaccctgagggggtcaagcccctccttccccagctgcccctccttctagaacctctgcacatctagcctctggccctcctcttcactgcctccacctgctcccgcttgccatccctgtctcctccatcctggctgtgcagtaggaattccaggctcctccctgtgtctttgctgttcttcagactccatttatagagaatgagggctgataacaggaatacagtggcaaagactagactgtggaaagggttccagaaatctttttttcttttttaattaaaaaaaatatttgcagagatgagctcttgctatgttgcccaggctggtctcaaactcctgggctcaagcgatcctcccatctcagcctcccagagtgctgggattacaggtgtgagctactgcgcccagccccagaaatctcagtgctgtttggagctccatttctcatttgatgacttgctctgcgtggggaggtggggtctcattcccccaacttcctcagggaggacccctgccctccgctgctcctctgtcctgctagccttcctccaggaagcacactgggtgcagataatcaggacattccagagatccccaatttaagagggtcatttccatctcaggggactcccggatgggtgtttccgctctcaatagcccctcttgttttaccaggaaagatccagttaaatcacccactgaggtgacagctcattagcggggagagagatggagcatcgagtgacactgggccatccaggcggctctgctcccaccagacaggagctaggcctcactggcaggggggctgcccacagccttttcaggggctcgcttggcgggtgacggggccgcagccaggccttctctccctgccccttggtgaccccgtggcttcctgtctgctggcctctcctgctacttatcacttcaccacgaactctctgcctgagactggggaagtaagcgggtatcttctcagtgagcataggttggggactgtgatcttgagaagccatgggccagcaatacctgcttttctgaagcccccaaggagggctctgacattctttttaaaaacaccacaaagcaaaattcccaggacatgtgtagttttgtttgttcagtatcccacaacttaaggctgggagatggaactcttggttaaggtcgatttttctgtctggcttctccgcaccttccacttgctctctggatcaggcagatataaactttctagcgcattttgagagagggctttcttgggtgagggagcatggcaaagtcggtttctctctggactgtttacacttcaaggcggtggatttagaggaatcctggctttcattttcaatgccagtctgagacatgttcccaagccggggctcttgttcacaccacttactctggccaccaacaacaacccaggccagacagagcatctcttttttttttttgagacagagtctctgtcgcccaggctggagcccagtggcgagatcttggctcactacaacctccacctcccgggttcaggcaattctcgtgcctaagcctcccgagtagctgcgactacaggcgccggccagcatgcctgtctaatttttgtattttagtagagacagggtttcaccatgttgcccaggctggtctcgaactcctgagctcgggcagtctacccacctcagcctcccaaagtgctgggattacaggcgtgagccaccgcgcccagccagaacatctgtttttacacccagagagcgcccctcgttaggacagaaccacggtgcccagagccaggaagccgccctcctggcgcccagcatctgagcttctacacgtgatgggcgggctcaggagaggacagggagtcgtggtggaagttccacagctggccgcgtgggggggcccttgcaccgcactgccgcctcctgactgcccctatccccgcagcccctgtgccggatttcatttccctcctctctcccagggtacctggccccagcactctcccatctgttcttcaggaaccgactcctctccagttgcaacaccagggagaaaggggcctccacatgcccaagtacccctgcaggatgaagggcaggccggcccttgatgtgccatttctgaataatagtcactgccgccgagtctaggatgtcctgttctaactcagccctgcctcggatgcaccaccgatctgtgcagagtgggtgtgggagtgtgggtgagggtcgaaatgccaaaggtctactttccagaatcaagtgccttctgcaaatcatgttggaaaagtccaaacctggagatgtccctgtgcctccgcccctacccaccccttttccttcagctgtgttaggaaggagaagttttcagaaccctctaggctggtggctttcaaacttcagaccatgatctgcagcaagaaacgtgccttccatcataaatcagtccatttgtttacaactgtgttccaagcaggtttcataaagaaattcttacccttagaacctcggatatcctctatgttttagttttcatttttttaaaatgcttcttaaaattcactaaattgggctaggtgtggctcatgcctgtaatcccagaagtgctgggattacaggcgggagccaccatgcctggccagaacaaatgcctttttaaaccttttaagaacatttttaaaatgtctttttctatgtcaaatgtaacgtttatttttttaaacaataaaattgatttgccaaaatccgggct

SEQ ID NO: 326808 - DNA, 3825 bp, Homo sapiens
  misc_feature (1)..(1): n is a, c, g, or t
ngccaacgcttttgattttttcctcggtccaaatatcgggcccggagccttggaatgcccccaccgatctgtgcagagtgggtgtgggagtgtgggtgagggtcgaaatgccaaaggtctactttccagaatcaagtgccttctgcaaatcatgttggaaaagtccaaacctggagatgtccctgtgcctccgcccctacccaccccttttccttcagctgtgttaggaaggagaagttttcagaaccctctaggctggtggctttcaaacttcagaccatgatctgcagcaagaaacgtgccttccatcataaatcagtccatttgtttacaactgtgttccaagcaggtttcataaagaaattcttacccttagaacctcggatatcctctatgttttagttttcatttttttaaaatgcttcttaaaattcactaaattgggctaggtgtggctcatgcctgtaatcccagcactatgggaggctgaggtgagaggatcacttgagcccagaaggttgaaaccagcctgggcaacatagtgagaccccatctctacaaaaagttttaaaaccaggtatggtggtgccctcctgtggtcccagctactcgggagtctgaggtgggaggatcacctgagcccaggagactgaggctgcagtgaggtgtgattgcactattgctctctagcctggaaaacagagtgagaccctatctcaaaaaaaaaaaaaaaaaaaaaggaaagagtgatgacaacagcccagggagcagccccgctcagaacccaagtcccaagttccagcactgtgttcccaggcaggctgtttgcctcttcctggtctggaagcccttgggtcctatggtggcggcagctcccacagtccaggttccctggtggggaccaatgattccatccgcatggaagcccacgtgtgcacttaggggcccataaatggcagaagggcccctcctttgggagaccttgtcagtcagcatctctagggcaaccgtgattgccatttgtagaggggaaggaatcaagggactttaagctagatcaaaatctggggacaaattctcctgctaactgcaagttaaaataggcccttcttactgaatttccctgtttgtttctctgcagacaatgctttagccctactcttgggcccccaagttagcagagtaatcaaagcttcctaccgtttggcctactattccagactagtccctcgaggggttcccttccaaaatatgcagggctcaggctcccaattccgggcctgtctgctttgcttgtgtttctcctgtccctgttctcccggagggcccaggtggaactcacgacagggagggagacgcttcccaaaaacctgcagggctatttcccagaatttggttttcaagtacaaaactttttgtcctgtaagatatatgcagcctcacagaagcagcctctgcctccactttaccagctacgtttttatcttaagcacatggggctcccttagaacttactccactgatttaaaaaaaaaaaactgcctggcagcatctcagtgtcagagtgagcacggcacaggaaaggcccgtggtgacgagggtgaggtggccacagtgaccggacgacaaatgagactctgcaaatgagactccagagggtgaagatctgcggtctccagacatcataggccatgtgacccactaggggccgcttacccctggccgtccgctggctgaactgaacgcattccctctctccgcaactctcccgtgaggctgcacccgtgtgggtagcactggaagcggcactgtttgcattgtacataggaaggaaggaagttcttccagcctcaccagcacctggcagcgagtcagagcctgtgagggcatccgaagcagtgatgcagtgtcaacctcccagctggtgccactctgccctcgggggctccaagcattgtaactcagtcatgggagctgcctctttggaagtgcagatttattcctgtaataatcctgcctgcttttacctctcgtccactgaccagcaagtgtgagtcccggtgtcagtcggcacagtccagtgtccatctgcatttgctcatgcagagggggtgagttgggcactccctgttgttggttttccttttgcagcacactgggcagtctccctataaaacaaaaaccccaccttctgtgccttctgctttagagcagagctccccctcccatttcctcagtcttccctgcaaaatctgtccaccggggaaggcagcaggaaccctgggcagcgggtgttctgggaaggctagtgacagcagatgtcatccaggaacagccacacacggttctccaggccgccgtcagcagctcaaggtggggtatgagtgagaagctgaggatctcgcagcttgttgctgagcaaggtgcaaccgggctcatgctgtcatcagcacaagacgggatggcaagggctttcagacgcatttccaagagtccagcaagccagggggaagatgatccctttgccgaagtgtaccctctagccaacttttgggagcgcttctgtttgcaaagcgctggggatgtgcctgtctctgtgtgacccacgaacgggaagggagagcactggagtaatgacacttctgctgctgctttgattctcaaggctgatctttaaaaccctcgccttgctgacaggtgctttaaaggcagtctgcatcttttcttcccttggtgtgggagaggtaaacactttgatttgctgaaagctgtatggagtatatttgaacagctagtagttagctttgaaagtggaagtgtgaacagacactacttgtgtcgctttgggtccttcactttacccccacagaagtctagaggcgtctgttataaagcgttacggggcgcctgcatgcaggaggaaggacctgtattagctggaaatcatcaggaacccagcttgcctccatctctctgagatgtgctgggtacagcctgcccctcctagttctgtccaccgggaagagccggctggcggcagatccccaggggcagagcccctgctggatcctgggagctcatctttacctgtgccggagtgggaactgtgattccagccgggcaggtcagagtggagcagtgctaagaggctgttgcaggagaactagacgggcggggcctgctgcatctggatcatgtttctgtgctctgccccgcgctagggactcagggtctgggcttctgccaggtgaggagcagagagactgttcccttgggtggagaggtgtgggcatgagagccacccattgccaagcagcaagaatgttcgtgcttttttccagagaggggaaccccactggtttttgtggaaacaatggaaacttacagatgcctgcctgggatgatgaggcacattcagaacaaatgcttttttttttttgagacagagtctcgctctgacgcccaggctggagtgcagtggcgcgatctcggctcactgcaaactttgcctcccaggttcaagtgattctcctacctcagcctcccgagtagctgggattacaccaccatgcccagcaaatttttgtgtttttagtagagacggagtttcaccatgttggccaggctggtctcgaactcctgacctcaggtgatccatccgccttggcctcccaaagtgctgggattacaggcgggagccaccatgcctggccagaacaaatgcctttttaaaccttttaagaacatttttaaaatgtctttttctatgtcaaatgtaacgtttatttttttaaacaataaaattgatttgccaaaatccgggct

SEQ ID NO: 326809 - DNA, 4332 bp, Homo sapiens
tgaggcctgaggcctggggcgggtggcggccgggctggccttggcctcgcgccttcccctgcggccgccgcgggctccgcgggcggtatcggagtgtcgtgcggcgcgtggccgcgtgacacgcgcacttgtcggagtgacgggccctgcggaagaggaggtgcggcccagggcgcaggggagccctcgggagcgggcccggccctcagcgccgccccggccgtgtcccggaggagcggcctgcgccgccgcgcgagaggaagcacccaggcatgtggaatatgctcatagtggcgatgtgcttggcccttctgggctgcctgcaagcccaggagctccagggacatgtctccataatcctgctgggagcaactggggacctggctaagaagtacttatggcagggactgttccagctgtacctggatgaagcggggaggggtcacagttttagcttccatggagctgctctgacagcccccaagcagggtcaagagctcatggccaaggccctggaatccctctcctgccccaaggacatggcacccagtcactgtgcagagcacaaggatcagttcctgcagctgagccagtaccgccaactgaagacggccgaggactatcaggccctgaacaaggacatcgaggcacagctccagcacgcaggcctccgggaggctggcaggatcttctacttctcagtgccacccttcgcctatgaagacattgcccgcaacatcaacagtagctgccggccaggcccgggcgcctggctgcgggttgtccttgagaaaccctttggccatgaccacttctcagcccagcagctggccacagaactcgggacctttttccaggaggaggagatgtaccgggtggaccattacttaggcaagcaggctgtggcgcagatcctgcctttccgagaccagaaccgcaaggctttggacggcctctggaaccggcaccatgtggagcgggtggagatcatcatgaaagagaccgtggatgctgaaggccgcaccagcttctatgaggagtacggtgtcattcgcgacgtcctccagaaccatctgacggaggtcctcaccctcgtggccatggagctgccccacaatgtcagcagtgcggaggctgtgctgcggcacaagcttcaggtcttccaggcgctgcggggcctgcagaggggcagtgccgtcgtgggccagtaccagtcttacagtgagcaggtgcgcagagagctgcagaagccagacagcttccacagcctgacgccgaccttcgcagccgtcctagtgcacattgacaaccttcgctgggagggcgtgcctttcatcctgatgtctggcaaagccttggacgagagagtgggctacgctcggatcttgttcaagaaccaggcctgctgtgtgcagagcgaaaagcactgggccgcggcgcagagccagtgcctgccccggcagctcgtcttccacatcggccatggcgacctgggcagccctgccgtgctggtcagcaggaacctgttcaggccctccctgccctccagctggaaggaaatggagggaccacctgggctccgccttttcggcagccctctgtccgattactacgcctacagccctgtgcgggagcgggacgcccactccgtcctcttatcccatatcttccatggccggaagaatttcttcatcaccacagagaacttgctggcctcctggaacttctggacccctctgctggagagcctggcccataaggccccacgcctctaccctggaggagctgagaatggccgtctgttggactttgagttcagtagcggccggttgttcttttcccagcagcagccggagcagctggtgccagggccagggccggccccaatgcccagtgacttccaggtcctcagggccaagtaccgagagagcccgctggtctccgcctggtccgaggagctgatctctaagctggctaatgacatcgaggccaccgctgtgcgagccgtgcggcgctttggccagttccacctggcactgtcggggggctcgagccccgtggccctgttccagcagctggccacggcgcactatggcttcccctgggcccacacgcacctgtggctggttgacgagcgctgcgtcccactctcagacccggagtccaacttccagggcctgcaggcccacctgctgcagcacgtccggatcccctactacaacatccaccccatgcctgtgcacctgcagcagcggctctgcgccgaggaggaccagggcgcccagatctatgccagggagatctcagccctggtggccaacagcagcttcgacctggtgctgctgggcatgggtgccgacgggcacacagcctccctcttcccacagtcacccactggcctggatggcgagcagctggtcgtgctgaccacgagcccctcccagccacaccgccgcatgagccttagcctgcctctcatcaaccgcgccaagaaggtggcagtcctggtcatgggcaggatgaagcgtgagatcaccacgctggtgagccgggtgggccatgagcccaagaagtggcccatctcgggtgtcctgccgcactccggccagctggtgtggtacatggactacgacgccttcctgggatgagggcgcctgtgccccttgcccgcttcgctcctgtgctttccttcgcccgtgtcttccctcccttctcggccccgccacctgcccagcgtgccctggctctccagaaccttctatcccacagtcaggccccagagagggcaggacaagccttgtcccgatgcctttgaccggcagctctgtgtattggtggatagatgcagaaacaaggaagaaatggagtctgctcctgagaagcttcaaattcaggccaggagagaagtcttaagaaaagacctccagcagttacacattcatatcaaccagcacaacacgggatggcgcccaaactccggcgtttacaagaggagacgtgacgtggtgggctgaggttaatcagggaaggtttcctgggggaggtgatccttgaactggctcccggggaacattcagagcatgattggtagacagaagggtgcagaggcgcccaggggagtacattgccccgtgcaaagcaggggcattggggactgtcttgagaccctgagggggtcaagcccctccttccccagctgcccctccttctagaacctctgcacatctagcctctggccctcctcttcactgcctccacctgctcccgcttgccatccctgtctcctccatcctggctgtgcagtaggaattccaggctcctccctgtgtctttgctgttcttcagactccatttatagagaatgagggctgataacaggaatacagtggcaaagactagactgtggaaagggttccagaaatctttttttcttttttaattaaaaaaaatatttgcagagatgagctcttgctatgttgcccaggctggtctcaaactcctgggctcaagcgatcctcccatctcagcctcccagagtgctgggattacaggtgtgagctactgcgcccagccccagaaatctcagtgctgtttggagctccatttctcatttgatgacttgctctgcgtggggaggtggggtctcattcccccaacttcctcagggaggacccctgccctccgctgctcctctgtcctgctagccttcctccaggaagcacactgggtgcagataatcaggacattccagagatccccaatttaagagggtcatttccatctcaggggactcccggatgggtgtttccgctctcaatagcccctcttgttttaccaggaaagatccagttaaatcacccactgaggtgacagctcattagcggggagagagatggagcatcgagtgacactgggccatccaggcggctctgctcccaccagacaggagctaggcctcactggcaggggggctgcccacagccttttcaggggctcgcttggcgggtgacggggccgcagccaggccttctctccctgccccttggtgaccccgtggcttcctgtctgctggcctctcctgctacttatcacttcaccacgaactctctgcctgagactggggaagtaagcgggtatcttctcagtgagcataggttggggactgtgatcttgagaagccatgcatgatttatagtcctttgggtatatacccagtaatgggatggctgggtcaaatggtatttccagttctagatcccggaggaatcgccacactgacttccacaatggttgaactagttgacagtcccaccaacagtgtaaaagggttcc

SEQ ID NO: 326810 - DNA, 4017 bp, Homo sapiens
tgaggcctgaggcctggggcgggtggcggccgggctggccttggcctcgcgccttcccctgcggccgccgcgggctccgcgggcggtatcggagtgtcgtgcggcgcgtggccgcgtgacacgcgcacttgtcggagtgacgggccctgcggaagaggaggtgcggcccagggcgcaggggagccctcgggagcgggcccggccctcagcgccgccccggccgtgtcccggaggagcggcctgcgccgccgcgcgagaggaagcacccaggcatgtggaatatgctcatagtggcgatgtgcttggcccttctgggctgcctgcaagcccaggagctccagggacatgtctccataatcctgctgggagcaactggggacctggctaagaagtacttatggcagggactgttccagctgtacctggatgaagcggggaggggtcacagttttagcttccatggagctgctctgacagcccccaagcagggtcaagagctcatggccaaggccctggaatccctctcctgccccaaggacatggcacccagtcactgtgcagagcacaaggatcagttcctgcagctgagccagtaccgccaactgaagacggccgaggactatcaggccctgaacaaggacatcgaggcacagctccagcacgcaggcctccgggaggctggcaggatcttctacttctcagtgccacccttcgcctatgaagacattgcccgcaacatcaacagtagctgccggccaggcccgggcgcctggctgcgggttgtccttgagaaaccctttggccatgaccacttctcagcccagcagctggccacagaactcgggacctttttccaggaggaggagatgtaccgggtggaccattacttaggcaagcaggctgtggcgcagatcctgcctttccgagaccagaaccgcaaggctttggacggcctctggaaccggcaccatgtggagcgggtggagatcatcatgaaagagaccgtggatgctgaaggccgcaccagcttctatgaggagtacggtgtcattcgcgacgtcctccagaaccatctgacggaggtcctcaccctcgtggccatggagctgccccacaatgtcagcagtgcggaggctgtgctgcggcacaagcttcaggtcttccaggcgctgcggggcctgcagaggggcagtgccgtcgtgggccagtaccagtcttacagtgagcaggtgcgcagagagctgcagaagccagacagcttccacagcctgacgccgaccttcgcagccgtcctagtgcacattgacaaccttcgctgggagggcgtgcctttcatcctgatgtctggcaaagccttggacgagagagtgggctacgctcggatcttgttcaagaaccaggcctgctgtgtgcagagcgaaaagcactgggccgcggcgcagagccagtgcctgccccggcagctcgtcttccacatcggccatggcgacctgggcagccctgccgtgctggtcagcaggaacctgttcaggccctccctgccctccagctggaaggaaatggagggaccacctgggctccgccttttcggcagccctctgtccgattactacgcctacagccctgtgcgggagcgggacgcccactccgtcctcttatcccatatcttccatggccggaagaatttcttcatcaccacagagaacttgctggcctcctggaacttctggacccctctgctggagagcctggcccataaggccccacgcctctaccctggaggagctgagaatggccgtctgttggactttgagttcagtagcggccggttgttcttttcccagcagcagccggagcagctggtgccagggccagggccggccccaatgcccagtgacttccaggtcctcagggccaagtaccgagagagcccgctggtctccgcctggtccgaggagctgatctctaagctggctaatgacatcgaggccaccgctgtgcgagccgtgcggcgctttggccagttccacctggcactgtcggggggctcgagccccgtggccctgttccagcagctggccacggcgcactatggcttcccctgggcccacacgcacctgtggctggttgacgagcgctgcgtcccactctcagacccggagtccaacttccagggcctgcaggcccacctgctgcagcacgtccggatcccctactacaacatccaccccatgcctgtgcacctgcagcagcggctctgcgccgaggaggaccagggcgcccagatctatgccagggagatctcagccctggtggccaacagcagcttcgacctggtgctgctgggcatgggtgccgacgggcacacagcctccctcttcccacagtcacccactggcctggatggcgagcagctggtcgtgctgaccacgagcccctcccagccacaccgccgcatgagccttagcctgcctctcatcaaccgcgccaagaaggtggcagtcctggtcatgggcaggatgaagcgtgagatcaccacgctggtgagccgggtgggccatgagcccaagaagtggcccatctcgggtgtcctgccgcactccggccagctggtgtggtacatggactacgacgccttcctgggatgagggcgcctgtgccccttgcccgcttcgctcctgtgctttccttcgcccgtgtcttccctcccttctcggccccgccacctgcccagcgtgccctggctctccagaaccttctatcccacagtcaggccccagagagggcaggacaagccttgtcccgatgcctttgaccggcagctctgtgtattggtggatagatgcagaaacaaggaagaaatggagtctgctcctgagaagcttcaaattcaggccaggagagaagtcttaagaaaagacctccagcagttacacattcatatcaaccagcacaacacgggatggcgcccaaactccggcgtttacaagaggagacgtgacgtggtgggctgaggttaatcagggaaggtttcctgggggaggtgatccttgaactggctcccggggaacattcagagcatgattggtagacagaagggtgcagaggcgcccaggggagtacattgccccgtgcaaagcaggggcattggggactgtcttgagaccctgagggggtcaagcccctccttccccagctgcccctccttctagaacctctgcacatctagcctctggccctcctcttcactgcctccacctgctcccgcttgccatccctgtctcctccatcctggctgtgcagtaggaattccaggctcctccctgtgtctttgctgttcttcagactccatttatagagaatgagggctgataacaggaatacagtggcaaagactagactgtggaaagggttccagaaatctttttttcttttttaattaaaaaaaatatttgcagagatgagctcttgctatgttgcccaggctggtctcaaactcctgggctcaagcgatcctcccatctcagcctcccagagtgctgggattacaggtgtgagctactgcgcccagccccagaaatctcagtgctgtttggagctccatttctcatttgatgacttgctctgcgtggggaggtggggtctcattcccccaacttcctcagggaggacccctgccctccgctgctcctctgtcctgctagccttcctccaggaagcacactgggtgcagataatcaggacattccagagagagcgtcgacgctctctctgtggggcctggggcggcggtgctggaggttgcggcggcggcggcgaaggcgcagcccgaggcggcgggtgggaagaggactgccagaggggcctgcgggagacccaggttcggacccataggagtcctgtggtgaggacctccttgatcgctcttctgcttcggttcccactgaaggaggagcttcggggtgccggctgtgctgcgcggactcctcttggggtccgatgatggatcccagcggg

SEQ ID NO: 326811 - DNA, 7006 bp, Homo sapiens
tgaggcctgaggcctggggcgggtggcggccgggctggccttggcctcgcgccttcccctgcggccgccgcgggctccgcgggcggtatcggagtgtcgtgcggcgcgtggccgcgtgacacgcgcacttgtcggagtgacgggccctgcggaagaggaggtgcggcccagggcgcaggggagccctcgggagcgggcccggccctcagcgccgccccggccgtgtcccggaggagcggcctgcgccgccgcgcgagaggaagcacccaggcatgtggaatatgctcatagtggcgatgtgcttggcccttctgggctgcctgcaagcccaggagctccagggacatgtctccataatcctgctgggagcaactggggacctggctaagaagtacttatggcagggactgttccagctgtacctggatgaagcggggaggggtcacagttttagcttccatggagctgctctgacagcccccaagcagggtcaagagctcatggccaaggccctggaatccctctcctgccccaaggacatggcacccagtcactgtgcagagcacaaggatcagttcctgcagctgagccagtaccgccaactgaagacggccgaggactatcaggccctgaacaaggacatcgaggcacagctccagcacgcaggcctccgggaggctggcaggatcttctacttctcagtgccacccttcgcctatgaagacattgcccgcaacatcaacagtagctgccggccaggcccgggcgcctggctgcgggttgtccttgagaaaccctttggccatgaccacttctcagcccagcagctggccacagaactcgggacctttttccaggaggaggagatgtaccgggtggaccattacttaggcaagcaggctgtggcgcagatcctgcctttccgagaccagaaccgcaaggctttggacggcctctggaaccggcaccatgtggagcgggtggagatcatcatgaaagagaccgtggatgctgaaggccgcaccagcttctatgaggagtacggtgtcattcgcgacgtcctccagaaccatctgacggaggtcctcaccctcgtggccatggagctgccccacaatgtcagcagtgcggaggctgtgctgcggcacaagcttcaggtcttccaggcgctgcggggcctgcagaggggcagtgccgtcgtgggccagtaccagtcttacagtgagcaggtgcgcagagagctgcagaagccagacagcttccacagcctgacgccgaccttcgcagccgtcctagtgcacattgacaaccttcgctgggagggcgtgcctttcatcctgatgtctggcaaagccttggacgagagagtgggctacgctcggatcttgttcaagaaccaggcctgctgtgtgcagagcgaaaagcactgggccgcggcgcagagccagtgcctgccccggcagctcgtcttccacatcggccatggcgacctgggcagccctgccgtgctggtcagcaggaacctgttcaggccctccctgccctccagctggaaggaaatggagggaccacctgggctccgccttttcggcagccctctgtccgattactacgcctacagccctgtgcgggagcgggacgcccactccgtcctcttatcccatatcttccatggccggaagaatttcttcatcaccacagagaacttgctggcctcctggaacttctggacccctctgctggagagcctggcccataaggccccacgcctctaccctggaggagctgagaatggccgtctgttggactttgagttcagtagcggccggttgttcttttcccagcagcagccggagcagctggtgccagggccagggccggccccaatgcccagtgacttccaggtcctcagggccaagtaccgagagagcccgctggtctccgcctggtccgaggagctgatctctaagctggctaatgacatcgaggccaccgctgtgcgagccgtgcggcgctttggccagttccacctggcactgtcggggggctcgagccccgtggccctgttccagcagctggccacggcgcactatggcttcccctgggcccacacgcacctgtggctggttgacgagcgctgcgtcccactctcagacccggagtccaacttccagggcctgcaggcccacctgctgcagcacgtccggatcccctactacaacatccaccccatgcctgtgcacctgcagcagcggctctgcgccgaggaggaccagggcgcccagatctatgccagggagatctcagccctggtggccaacagcagcttcgacctggtgctgctgggcatgggtgccgacgggcacacagcctccctcttcccacagtcacccactggcctggatggcgagcagctggtcgtgctgaccacgagcccctcccagccacaccgccgcatgagccttagcctgcctctcatcaaccgcgccaagaaggtggcagtcctggtcatgggcaggatgaagcgtgagatcaccacgctggtgagccgggtgggccatgagcccaagaagtggcccatctcgggtgtcctgccgcactccggccagctggtgtggtacatggactacgacgccttcctgggatgagggcgcctgtgccccttgcccgcttcgctcctgtgctttccttcgcccgtgtcttccctcccttctcggccccgccacctgcccagcgtgccctggctctccagaaccttctatcccacagtcaggccccagagagggcaggacaagccttgtcccgatgcctttgaccggcagctctgtgtattggtggatagatgcagaaacaaggaagaaatggagtctgctcctgagaagcttcaaattcaggccaggagagaagtcttaagaaaagacctccagcagttacacattcatatcaaccagcacaacacgggatggcgcccaaactccggcgtttacaagaggagacgtgacgtggtgggctgaggttaatcagggaaggtttcctgggggaggtgatccttgaactggctcccggggaacattcagagcatgattggtagacagaagggtgcagaggcgcccaggggagtacattgccccgtgcaaagcaggggcattggggactgtcttgagaccctgagggggtcaagcccctccttccccagctgcccctccttctagaacctctgcacatctagcctctggccctcctcttcactgcctccacctgctcccgcttgccatccctgtctcctccatcctggctgtgcagtaggaattccaggctcctccctgtgtctttgctgttcttcagactccatttatagagaatgagggctgataacaggaatacagtggcaaagactagactgtggaaagggttccagaaatctttttttcttttttaattaaaaaaaatatttgcagagatgagctcttgctatgttgcccaggctggtctcaaactcctgggctcaagcgatcctcccatctcagcctcccagagtgctgggattacaggtgtgagctactgcgcccagccccagaaatctcagtgctgtttggagctccatttctcatttgatgacttgctctgcgtggggaggtggggtctcattcccccaacttcctcagggaggacccctgccctccgctgctcctctgtcctgctagccttcctccaggaagcacactgggtgcagataatcaggacattccagagatccccaatttaagagggtcatttccatctcaggggactcccggatgggtgtttccgctctcaatagcccctcttgttttaccaggaaagatccagttaaatcacccactgaggtgacagctcattagcggggagagagatggagcatcgagtgacactgggccatccaggcggctctgctcccaccagacaggagctaggcctcactggcaggggggctgcccacagccttttcaggggctcgcttggcgggtgacggggccgcagccaggccttctctccctgccccttggtgaccccgtggcttcctgtctgctggcctctcctgctacttatcacttcaccacgaactctctgcctgagactggggaagtaagcgggtatcttctcagtgagcataggttggggactgtgatcttgagaagccatgggccagcaatacctgcttttctgaagcccccaaggagggctctgacattctttttaaaaacaccacaaagcaaaattcccaggacatgtgtagttttgtttgttcagtatcccacaacttaaggctgggagatggaactcttggttaaggtcgatttttctgtctggcttctccgcaccttccacttgctctctggatcaggcagatataaactttctagcgcattttgagagagggctttcttgggtgagggagcatggcaaagtcggtttctctctggactgtttacacttcaaggcggtggatttagaggaatcctggctttcattttcaatgccagtctgagacatgttcccaagccggggctcttgttcacaccacttactctggccaccaacaacaacccaggccagacagagcatctcttttttttttttgagacagagtctctgtcgcccaggctggagcccagtggcgagatcttggctcactacaacctccacctcccgggttcaggcaattctcgtgcctaagcctcccgagtagctgcgactacaggcgccggccagcatgcctgtctaatttttgtattttagtagagacagggtttcaccatgttgcccaggctggtctcgaactcctgagctcgggcagtctacccacctcagcctcccaaagtgctgggattacaggcgtgagccaccgcgcccagccagaacatctgtttttacacccagagagcgcccctcgttaggacagaaccacggtgcccagagccaggaagccgccctcctggcgcccagcatctgagcttctacacgtgatgggcgggctcaggagaggacagggagtcgtggtggaagttccacagctggccgcgtgggggggcccttgcaccgcactgccgcctcctgactgcccctatccccgcagcccctgtgccggatttcatttccctcctctctcccagggtacctggccccagcactctcccatctgttcttcaggaaccgactcctctccagttgcaacaccagggagaaaggggcctccacatgcccaagtacccctgcaggatgaagggcaggccggcccttgatgtgccatttctgaataatagtcactgccgccgagtctaggatgtcctgttctaactcagccctgcctcggatgcaccaccgatctgtgcagagtgggtgtgggagtgtgggtgagggtcgaaatgccaaaggtctactttccagaatcaagtgccttctgcaaatcatgttggaaaagtccaaacctggagatgtccctgtgcctccgcccctacccaccccttttccttcagctgtgttaggaaggagaagttttcagaaccctctaggctggtggctttcaaacttcagaccatgatctgcagcaagaaacgtgccttccatcataaatcagtccatttgtttacaactgtgttccaagcaggtttcataaagaaattcttacccttagaacctcggatatcctctatgttttagttttcatttttttaaaatgcttcttaaaattcactaaattgggctaggtgtggctcatgcctgtaatcccagcactatgggaggctgaggtgagaggatcacttgagcccagaaggttgaaaccagcctgggcaacatagtgagaccccatctctacaaaaagttttaaaaccaggtatggtggtgccctcctgtggtcccagctactcgggagtctgaggtgggaggatcacctgagcccaggagactgaggctgcagtgaggtgtgattgcactattgctctctagcctggaaaacagagtgagaccctatctcaaaaaaaaaaaaaaaaaaaaaggaaagagtgatgacaacagcccagggagcagccccgctcagaacccaagtcccaagttccagcactgtgttcccaggcaggctgtttgcctcttcctggtctggaagcccttgggtcctatggtggcggcagctcccacagtccaggttccctggtggggaccaatgattccatccgcatggaagcccacgtgtgcacttaggggcccataaatggcagaagggcccctcctttgggagaccttgtcagtcagcatctctagggcaaccgtgattgccatttgtagaggggaaggaatcaagggactttaagctagatcaaaatctggggacaaattctcctgctaactgcaagttaaaataggcccttcttactgaatttccctgtttgtttctctgcagacaatgctttagccctactcttgggcccccaagttagcagagtaatcaaagcttcctaccgtttggcctactattccagactagtccctcgaggggactggtttttgtggaaacaatggaaacttacagatgcctgcctgggatgatgaggcacattcagaacaaatgcttttttttttttgagacagagtctcgctctgacgcccaggctggagtgcagtggcgcgatctcggctcactgcaaactttgcctcccaggttcaagtgattctcctacctcagcctcccgagtagctgggattacaccaccatgcccagcaaatttttgtgtttttagtagagacggagtttcaccatgttggccaggctggtctcgaactcctgacctcaggtgatccatccgccttggcctcccaaagtgctgggattacaggcgggagccaccatgcctggccagaacaaatgcctttttaaaccttttaagaacatttttaaaatgtctttttctatgtcaaatgtaacgtttatttttttaaacaataaaattgatttgccaaaatccgggct

SEQ ID NO: 326812 - DNA, 5673 bp, Homo sapiens
tgaggcctgaggcctggggcgggtggcggccgggctggccttggcctcgcgccttcccctgcggccgccgcgggctccgcgggcggtatcggagtgtcgtgcggcgcgtggccgcgtgacacgcgcacttgtcggagtgacgggccctgcggaagaggaggtgcggcccagggcgcaggggagccctcgggagcgggcccggccctcagcgccgccccggccgtgtcccggaggagcggcctgcgccgccgcgcgagaggaagcacccaggcatgtggaatatgctcatagtggcgatgtgcttggcccttctgggctgcctgcaagcccaggagctccagggacatgtctccataatcctgctgggagcaactggggacctggctaagaagtacttatggcagggactgttccagctgtacctggatgaagcggggaggggtcacagttttagcttccatggagctgctctgacagcccccaagcagggtcaagagctcatggccaaggccctggaatccctctcctgccccaaggacatggcacccagtcactgtgcagagcacaaggatcagttcctgcagctgagccagtaccgccaactgaagacggccgaggactatcaggccctgaacaaggacatcgaggcacagctccagcacgcaggcctccgggaggctggcaggatcttctacttctcagtgccacccttcgcctatgaagacattgcccgcaacatcaacagtagctgccggccaggcccgggcgcctggctgcgggttgtccttgagaaaccctttggccatgaccacttctcagcccagcagctggccacagaactcgggacctttttccaggaggaggagatgtaccgggtggaccattacttaggcaagcaggctgtggcgcagatcctgcctttccgagaccagaaccgcaaggctttggacggcctctggaaccggcaccatgtggagcgggtggagatcatcatgaaagagaccgtggatgctgaaggccgcaccagcttctatgaggagtacggtgtcattcgcgacgtcctccagaaccatctgacggaggtcctcaccctcgtggccatggagctgccccacaatgtcagcagtgcggaggctgtgctgcggcacaagcttcaggtcttccaggcgctgcggggcctgcagaggggcagtgccgtcgtgggccagtaccagtcttacagtgagcaggtgcgcagagagctgcagaagccagacagcttccacagcctgacgccgaccttcgcagccgtcctagtgcacattgacaaccttcgctgggagggcgtgcctttcatcctgatgtctggcaaagccttggacgagagagtgggctacgctcggatcttgttcaagaaccaggcctgctgtgtgcagagcgaaaagcactgggccgcggcgcagagccagtgcctgccccggcagctcgtcttccacatcggccatggcgacctgggcagccctgccgtgctggtcagcaggaacctgttcaggccctccctgccctccagctggaaggaaatggagggaccacctgggctccgccttttcggcagccctctgtccgattactacgcctacagccctgtgcgggagcgggacgcccactccgtcctcttatcccatatcttccatggccggaagaatttcttcatcaccacagagaacttgctggcctcctggaacttctggacccctctgctggagagcctggcccataaggccccacgcctctaccctggaggagctgagaatggccgtctgttggactttgagttcagtagcggccggttgttcttttcccagcagcagccggagcagctggtgccagggccagggccggccccaatgcccagtgacttccaggtcctcagggccaagtaccgagagagcccgctggtctccgcctggtccgaggagctgatctctaagctggctaatgacatcgaggccaccgctgtgcgagccgtgcggcgctttggccagttccacctggcactgtcggggggctcgagccccgtggccctgttccagcagctggccacggcgcactatggcttcccctgggcccacacgcacctgtggctggttgacgagcgctgcgtcccactctcagacccggagtccaacttccagggcctgcaggcccacctgctgcagcacgtccggatcccctactacaacatccaccccatgcctgtgcacctgcagcagcggctctgcgccgaggaggaccagggcgcccagatctatgccagggagatctcagccctggtggccaacagcagcttcgacctggtgctgctgggcatgggtgccgacgggcacacagcctccctcttcccacagtcacccactggcctggatggcgagcagctggtcgtgctgaccacgagcccctcccagccacaccgccgcatgagccttagcctgcctctcatcaaccgcgccaagaaggtggcagtcctggtcatgggcaggatgaagcgtgagatcaccacgctggtgagccgggtgggccatgagcccaagaagtggcccatctcgggtgtcctgccgcactccggccagctggtgtggtacatggactacgacgccttcctgggatgagggcgcctgtgccccttgcccgcttcgctcctgtgctttccttcgcccgtgtcttccctcccttctcggccccgccacctgcccagcgtgccctggctctccagaaccttctatcccacagtcaggccccagagagggcaggacaagccttgtcccgatgcctttgaccggcagctctgtgtattggtggatagatgcagaaacaaggaagaaatggagtctgctcctgagaagcttcaaattcaggccaggagagaagtcttaagaaaagacctccagcagttacacattcatatcaaccagcacaacacgggatggcgcccaaactccggcgtttacaagaggagacgtgacgtggtgggctgaggttaatcagggaaggtttcctgggggaggtgatccttgaactggctcccggggaacattcagagcatgattggtagacagaagggtgcagaggcgcccaggggagtacattgccccgtgcaaagcaggggcattggggactgtcttgagaccctgagggggtcaagcccctccttccccagctgcccctccttctagaacctctgcacatctagcctctggccctcctcttcactgcctccacctgctcccgcttgccatccctgtctcctccatcctggctgtgcagtaggaattccaggctcctccctgtgtctttgctgttcttcagactccatttatagagaatgagggctgataacaggaatacagtggcaaagactagactgtggaaagggttccagaaatctttttttcttttttaattaaaaaaaatatttgcagagatgagctcttgctatgttgcccaggctggtctcaaactcctgggctcaagcgatcctcccatctcagcctcccagagtgctgggattacaggtgtgagctactgcgcccagccccagaaatctcagtgctgtttggagctccatttctcatttgatgacttgctctgcgtggggaggtggggtctcattcccccaacttcctcagggaggacccctgccctccgctgctcctctgtcctgctagccttcctccaggaagcacactgggtgcagataatcaggacattccagagatccccaatttaagagggtcatttccatctcaggggactcccggatgggtgtttccgctctcaatagcccctcttgttttaccaggaaagatccagttaaatcacccactgaggtgacagctcattagcggggagagagatggagcatcgagtgacactgggccatccaggcggctctgctcccaccagacaggagctaggcctcactggcaggggggctgcccacagccttttcaggggctcgcttggcgggtgacggggccgcagccaggccttctctccctgccccttggtgaccccgtggcttcctgtctgctggcctctcctgctacttatcacttcaccacgaactctctgcctgagactggggaagtaagcgggtatcttctcagtgagcataggttggggactgtgatcttgagaagccatgggccagcaatacctgcttttctgaagcccccaaggagggctctgacattctttttaaaaacaccacaaagcaaaattcccaggacatgtgtagttttgtttgttcagtatcccacaacttaaggctgggagatggaactcttggttaaggtcgatttttctgtctggcttctccgcaccttccacttgctctctggatcaggcagatataaactttctagcgcattttgagagagggctttcttgggtgagggagcatggcaaagtcggtttctctctggactgtttacacttcaaggcggtggatttagaggaatcctggctttcattttcaatgccagtctgagacatgttcccaagccggggctcttgttcacaccacttactctggccaccaacaacaacccaggccagacagagcatctcttttttttttttgagacagagtctctgtcgcccaggctggagcccagtggcgagatcttggctcactacaacctccacctcccgggttcaggcaattctcgtgcctaagcctcccgagtagctgcgactacaggcgccggccagcatgcctgtctaatttttgtattttagtagagacagggtttcaccatgttgcccaggctggtctcgaactcctgagctcgggcagtctacccacctcagcctcccaaagtgctgggattacaggcgtgagccaccgcgcccagccagaacatctgtttttacacccagagagcgcccctcgttaggacagaaccacggtgcccagagccaggaagccgccctcctggcgcccagcatctgagcttctacacgtgatgggcgggctcaggagaggacagggagtcgtggtggaagttccacagctggccgcgtgggggggcccttgcaccgcactgccgcctcctgactgcccctatccccgcagcccctgtgccggatttcatttccctcctctctcccagggtacctggccccagcactctcccatctgttcttcaggaaccgactcctctccagttgcaacaccagggagaaaggggcctccacatgcccaagtacccctgcaggatgaagggcaggccggcccttgatgtgccatttctgaataatagtcactgccgccgagtctaggatgtcctgttctaactcagccctgcctcggatgcaccaccgatctgtgcagagtgggtgtgggagtgtgggtgagggtcgaaatgccaaaggtctactttccagaatcaagtgccttctgcaaatcatgttggaaaagtccaaacctggagatgtccctgtgcctccgcccctacccaccccttttccttcagctgtgttaggaaggagaagttttcagaaccctctaggctggtggctttcaaacttcagaccatgatctgcagcaagaaacgtgccttccatcataaatcagtccatttgtttacaactgtgttccaagcaggtttcataaagaaattcttaccctta

SEQ ID NO: 326813 - DNA, 5359 bp, Homo sapiens
tgaggcctgaggcctggggcgggtggcggccgggctggccttggcctcgcgccttcccctgcggccgccgcgggctccgcgggcggtatcggagtgtcgtgcggcgcgtggccgcgtgacacgcgcacttgtcggagtgacgggccctgcggaagaggaggtgcggcccagggcgcaggggagccctcgggagcgggcccggccctcagcgccgccccggccgtgtcccggaggagcggcctgcgccgccgcgcgagaggaagcacccaggcatgtggaatatgctcatagtggcgatgtgcttggcccttctgggctgcctgcaagcccaggagctccagggacatgtctccataatcctgctgggagcaactggggacctggctaagaagtacttatggcagggactgttccagctgtacctggatgaagcggggaggggtcacagttttagcttccatggagctgctctgacagcccccaagcagggtcaagagctcatggccaaggccctggaatccctctcctgccccaaggacatggcacccagtcactgtgcagagcacaaggatcagttcctgcagctgagccagtaccgccaactgaagacggccgaggactatcaggccctgaacaaggacatcgaggcacagctccagcacgcaggcctccgggaggctggcaggatcttctacttctcagtgccacccttcgcctatgaagacattgcccgcaacatcaacagtagctgccggccaggcccgggcgcctggctgcgggttgtccttgagaaaccctttggccatgaccacttctcagcccagcagctggccacagaactcgggacctttttccaggaggaggagatgtaccgggtggaccattacttaggcaagcaggctgtggcgcagatcctgcctttccgagaccagaaccgcaaggctttggacggcctctggaaccggcaccatgtggagcgggtggagatcatcatgaaagagaccgtggatgctgaaggccgcaccagcttctatgaggagtacggtgtcattcgcgacgtcctccagaaccatctgacggaggtcctcaccctcgtggccatggagctgccccacaatgtcagcagtgcggaggctgtgctgcggcacaagcttcaggtcttccaggcgctgcggggcctgcagaggggcagtgccgtcgtgggccagtaccagtcttacagtgagcaggtgcgcagagagctgcagaagccagacagcttccacagcctgacgccgaccttcgcagccgtcctagtgcacattgacaaccttcgctgggagggcgtgcctttcatcctgatgtctggcaaagccttggacgagagagtgggctacgctcggatcttgttcaagaaccaggcctgctgtgtgcagagcgaaaagcactgggccgcggcgcagagccagtgcctgccccggcagctcgtcttccacatcggccatggcgacctgggcagccctgccgtgctggtcagcaggaacctgttcaggccctccctgccctccagctggaaggaaatggagggaccacctgggctccgccttttcggcagccctctgtccgattactacgcctacagccctgtgcgggagcgggacgcccactccgtcctcttatcccatatcttccatggccggaagaatttcttcatcaccacagagaacttgctggcctcctggaacttctggacccctctgctggagagcctggcccataaggccccacgcctctaccctggaggagctgagaatggccgtctgttggactttgagttcagtagcggccggttgttcttttcccagcagcagccggagcagctggtgccagggccagggccggccccaatgcccagtgacttccaggtcctcagggccaagtaccgagagagcccgctggtctccgcctggtccgaggagctgatctctaagctggctaatgacatcgaggccaccgctgtgcgagccgtgcggcgctttggccagttccacctggcactgtcggggggctcgagccccgtggccctgttccagcagctggccacggcgcactatggcttcccctgggcccacacgcacctgtggctggttgacgagcgctgcgtcccactctcagacccggagtccaacttccagggcctgcaggcccacctgctgcagcacgtccggatcccctactacaacatccaccccatgcctgtgcacctgcagcagcggctctgcgccgaggaggaccagggcgcccagatctatgccagggagatctcagccctggtggccaacagcagcttcgacctggtgctgctgggcatgggtgccgacgggcacacagcctccctcttcccacagtcacccactggcctggatggcgagcagctggtcgtgctgaccacgagcccctcccagccacaccgccgcatgagccttagcctgcctctcatcaaccgcgccaagaaggtggcagtcctggtcatgggcaggatgaagcgtgagatcaccacgctggtgagccgggtgggccatgagcccaagaagtggcccatctcgggtgtcctgccgcactccggccagctggtgtggtacatggactacgacgccttcctgggatgagggcgcctgtgccccttgcccgcttcgctcctgtgctttccttcgcccgtgtcttccctcccttctcggccccgccacctgcccagcgtgccctggctctccagaaccttctatcccacagtcaggccccagagagggcaggacaagccttgtcccgatgcctttgaccggcagctctgtgtattggtggatagatgcagaaacaaggaagaaatggagtctgctcctgagaagcttcaaattcaggccaggagagaagtcttaagaaaagacctccagcagttacacattcatatcaaccagcacaacacgggatggcgcccaaactccggcgtttacaagaggagacgtgacgtggtgggctgaggttaatcagggaaggtttcctgggggaggtgatccttgaactggctcccggggaacattcagagcatgattggtagacagaagggtgcagaggcgcccaggggagtacattgccccgtgcaaagcaggggcattggggactgtcttgagaccctgagggggtcaagcccctccttccccagctgcccctccttctagaacctctgcacatctagcctctggccctcctcttcactgcctccacctgctcccgcttgccatccctgtctcctccatcctggctgtgcagtaggaattccaggctcctccctgtgtctttgctgttcttcagactccatttatagagaatgagggctgataacaggaatacagtggcaaagactagactgtggaaagggttccagaaatctttttttcttttttaattaaaaaaaatatttgcagagatgagctcttgctatgttgcccaggctggtctcaaactcctgggctcaagcgatcctcccatctcagcctcccagagtgctgggattacaggtgtgagctactgcgcccagccccagaaatctcagtgctgtttggagctccatttctcatttgatgacttgctctgcgtggggaggtggggtctcattcccccaacttcctcagggaggacccctgccctccgctgctcctctgtcctgctagccttcctccaggaagcacactgggtgcagataatcaggacattccagagatccccaatttaagagggtcatttccatctcaggggactcccggatgggtgtttccgctctcaatagcccctcttgttttaccaggaaagatccagttaaatcacccactgaggtgacagctcattagcggggagagagatggagcatcgagtgacactgggccatccaggcggctctgctcccaccagacaggagctaggcctcactggcaggggggctgcccacagccttttcaggggctcgcttggcgggtgacggggccgcagccaggccttctctccctgccccttggtgaccccgtggcttcctgtctgctggcctctcctgctacttatcacttcaccacgaactctctgcctgagactggggaagtaagcgggtatcttctcagtgagcataggttggggactgtgatcttgagaagccatgggccagcaatacctgcttttctgaagcccccaaggagggctctgacattctttttaaaaacaccacaaagcaaaattcccaggacatgtgtagttttgtttgttcagtatcccacaacttaaggctgggagatggaactcttggttaaggtcgatttttctgtctggcttctccgcaccttccacttgctctctggatcaggcagatataaactttctagcgcattttgagagagggctttcttgggtgagggagcatggcaaagtcggtttctctctggactgtttacacttcaaggcggtggatttagaggaatcctggctttcattttcaatgccagtctgagacatgttcccaagccggggctcttgttcacaccacttactctggccaccaacaacaacccaggccagacagagcatctcttttttttttttgagacagagtctctgtcgcccaggctggagcccagtggcgagatcttggctcactacaacctccacctcccgggttcaggcaattctcgtgcctaagcctcccgagtagctgcgactacaggcgccggccagcatgcctgtctaatttttgtattttagtagagacagggtttcaccatgttgcccaggctggtctcgaactcctgagctcgggcagtctacccacctcagccactatgggaggctgaggtgagaggatcacttgagcccagaaggttgaaaccagcctgggcaacatagtgagaccccatctctacaaaaagttttaaaaccaggtatggtggtgccctcctgtggtcccagctactcgggagtctgaggtgggaggatcacctgagcccaggagactgaggctgcagtgaggtgtgattgcactattgctctctagcctggaaaacagagtgagaccctatctcaaaaaaaaaaaaaaaaaaaaaggaaagagtgatgacaacagcccagggagcagccccgctcagaacccaagtcccaagttccagcactgtgttcccaggcaggctgtttgcctcttcctggtctggaagcccttgggtcctatggtggcggcagctcccacagtccaggttccctggtggggaccaatgattccatccgcatggaagcccacgtgtgcacttaggggcccataaatggcagaagggcccctcctttgggagac

SEQ ID NO: 326814 - DNA, 2683 bp, Homo sapiens
  misc_feature (14)..(14): n is a, c, g, or t
ctgccaggtgaggngcagagagactgttcccttgggtggagaggtgtgggcatgagagccacccattgccaagcagcaagaatgttcgtgcttttttcccttccaaaatatgcagggctcaggctcccaattccgggcctgtctgctttgcttgtgtttctcctgtccctgttctcccggagggcccaggtggaactcacgacagggagggagacgcttcccaaaaacctgcagggctatttcccagaatttggttttcaagtacaaaactttttgtcctgtaagatatatgcagcctcacagaagcagcctctgcctccactttaccagctacgtttttatcttaagcacatggggctcccttagaacttactccactgatttaaaaaaaaaaaactgcctggcagcatctcagtgtcagagtgagcacggcacaggaaaggcccgtggtgacgagggtgaggtggccacagtgaccggacgacaaatgagactctgcaaatgagactccagagggtgaagatctgcggtctccagacatcataggccatgtgacccactaggggccgcttacccctggccgtccgctggctgaactgaacgcattccctctctccgcaactctcccgtgaggctgcacccgtgtgggtagcactggaagcggcactgtttgcattgtacataggaaggaaggaagttcttccagcctcaccagcacctggcagcgagtcagagcctgtgagggcatccgaagcagtgatgcagtgtcaacctcccagctggtgccactctgccctcgggggctccaagcattgtaactcagtcatgggagctgcctctttggaagtgcagatttattcctgtaataatcctgcctgcttttacctctcgtccactgaccagcaagtgtgagtcccggtgtcagtcggcacagtccagtgtccatctgcatttgctcatgcagagggggtgagttgggcactccctgttgttggttttccttttgcagcacactgggcagtctccctataaaacaaaaaccccaccttctgtgccttctgctttagagcagagctccccctcccatttcctcagtcttccctgcaaaatctgtccaccggggaaggcagcaggaaccctgggcagcgggtgttctgggaaggctagtgacagcagatgtcatccaggaacagccacacacggttctccaggccgccgtcagcagctcaaggtggggtatgagtgagaagctgaggatctcgcagcttgttgctgagcaaggtgcaaccgggctcatgctgtcatcagcacaagacgggatggcaagggctttcagacgcatttccaagagtccagcaagccagggggaagatgatccctttgccgaagtgtaccctctagccaacttttgggagcgcttctgtttgcaaagcgctggggatgtgcctgtctctgtgtgacccacgaacgggaagggagagcactggagtaatgacacttctgctgctgctttgattctcaaggctgatctttaaaaccctcgccttgctgacaggtgctttaaaggcagtctgcatcttttcttcccttggtgtgggagaggtaaacactttgatttgctgaaagctgtatggagtatatttgaacagctagtagttagctttgaaagtggaagtgtgaacagacactacttgtgtcgctttgggtccttcactttacccccacagaagtctagaggcgtctgttataaagcgttacggggcgcctgcatgcaggaggaaggacctgtattagctggaaatcatcaggaacccagcttgcctccatctctctgagatgtgctgggtacagcctgcccctcctagttctgtccaccgggaagagccggctggcggcagatccccaggggcagagcccctgctggatcctgggagctcatctttacctgtgccggagtgggaactgtgattccagccgggcaggtcagagtggagcagtgctaagaggctgttgcaggagaactagacgggcggggcctgctgcatctggatcatgtttctgtgctctgccccgcgctagggactcagggtctgggcttctgccaggtgaggagcagagagactgttcccttgggtggagaggtgtgggcatgagagccacccattgccaagcagcaagaatgttcgtgcttttttccagagaggggaaccccactggtttttgtggaaacaatggaaacttacagatgcctgcctgggatgatgaggcacattcagaacaaatgcttttttttttttgagacagagtctcgctctgacgcccaggctggagtgcagtggcgcgatctcggctcactgcaaactttgcctcccaggttcaagtgattctcctacctcagcctcccgagtagctgggattacaccaccatgcccagcaaatttttgtgtttttagtagagacggagtttcaccatgttggccaggctggtctcgaactcctgacctcaggtgatccatccgccttggcctcccaaagtgctgggattacaggcgggagccaccatgcctggccagaacaaatgcctttttaaaccttttaagaacatttttaaaatgtctttttctatgtcaaatgtaacgtttatttttttaaacaataaaattgatttgccaaaatccgggct

SEQ ID NO: 326815 - DNA, 9123 bp, Homo sapiens
tgaggcctgaggcctggggcgggtggcggccgggctggccttggcctcgcgccttcccctgcggccgccgcgggctccgcgggcggtatcggagtgtcgtgcggcgcgtggccgcgtgacacgcgcacttgtcggagtgacgggccctgcggaagaggaggtgcggcccagggcgcaggggagccctcgggagcgggcccggccctcagcgccgccccggccgtgtcccggaggagcggcctgcgccgccgcgcgagaggaagcacccaggcatgtggaatatgctcatagtggcgatgtgcttggcccttctgggctgcctgcaagcccaggagctccagggacatgtctccataatcctgctgggagcaactggggacctggctaagaagtacttatggcagggactgttccagctgtacctggatgaagcggggaggggtcacagttttagcttccatggagctgctctgacagcccccaagcagggtcaagagctcatggccaaggccctggaatccctctcctgccccaaggacatggcacccagtcactgtgcagagcacaaggatcagttcctgcagctgagccagtaccgccaactgaagacggccgaggactatcaggccctgaacaaggacatcgaggcacagctccagcacgcaggcctccgggaggctggcaggatcttctacttctcagtgccacccttcgcctatgaagacattgcccgcaacatcaacagtagctgccggccaggcccgggcgcctggctgcgggttgtccttgagaaaccctttggccatgaccacttctcagcccagcagctggccacagaactcgggacctttttccaggaggaggagatgtaccgggtggaccattacttaggcaagcaggctgtggcgcagatcctgcctttccgagaccagaaccgcaaggctttggacggcctctggaaccggcaccatgtggagcgggtggagatcatcatgaaagagaccgtggatgctgaaggccgcaccagcttctatgaggagtacggtgtcattcgcgacgtcctccagaaccatctgacggaggtcctcaccctcgtggccatggagctgccccacaatgtcagcagtgcggaggctgtgctgcggcacaagcttcaggtcttccaggcgctgcggggcctgcagaggggcagtgccgtcgtgggccagtaccagtcttacagtgagcaggtgcgcagagagctgcagaagccagacagcttccacagcctgacgccgaccttcgcagccgtcctagtgcacattgacaaccttcgctgggagggcgtgcctttcatcctgatgtctggcaaagccttggacgagagagtgggctacgctcggatcttgttcaagaaccaggcctgctgtgtgcagagcgaaaagcactgggccgcggcgcagagccagtgcctgccccggcagctcgtcttccacatcggccatggcgacctgggcagccctgccgtgctggtcagcaggaacctgttcaggccctccctgccctccagctggaaggaaatggagggaccacctgggctccgccttttcggcagccctctgtccgattactacgcctacagccctgtgcgggagcgggacgcccactccgtcctcttatcccatatcttccatggccggaagaatttcttcatcaccacagagaacttgctggcctcctggaacttctggacccctctgctggagagcctggcccataaggccccacgcctctaccctggaggagctgagaatggccgtctgttggactttgagttcagtagcggccggttgttcttttcccagcagcagccggagcagctggtgccagggccagggccggccccaatgcccagtgacttccaggtcctcagggccaagtaccgagagagcccgctggtctccgcctggtccgaggagctgatctctaagctggctaatgacatcgaggccaccgctgtgcgagccgtgcggcgctttggccagttccacctggcactgtcggggggctcgagccccgtggccctgttccagcagctggccacggcgcactatggcttcccctgggcccacacgcacctgtggctggttgacgagcgctgcgtcccactctcagacccggagtccaacttccagggcctgcaggcccacctgctgcagcacgtccggatcccctactacaacatccaccccatgcctgtgcacctgcagcagcggctctgcgccgaggaggaccagggcgcccagatctatgccagggagatctcagccctggtggccaacagcagcttcgacctggtgctgctgggcatgggtgccgacgggcacacagcctccctcttcccacagtcacccactggcctggatggcgagcagctggtcgtgctgaccacgagcccctcccagccacaccgccgcatgagccttagcctgcctctcatcaaccgcgccaagaaggtggcagtcctggtcatgggcaggatgaagcgtgagatcaccacgctggtgagccgggtgggccatgagcccaagaagtggcccatctcgggtgtcctgccgcactccggccagctggtgtggtacatggactacgacgccttcctgggatgagggcgcctgtgccccttgcccgcttcgctcctgtgctttccttcgcccgtgtcttccctcccttctcggccccgccacctgcccagcgtgccctggctctccagaaccttctatcccacagtcaggccccagagagggcaggacaagccttgtcccgatgcctttgaccggcagctctgtgtattggtggatagatgcagaaacaaggaagaaatggagtctgctcctgagaagcttcaaattcaggccaggagagaagtcttaagaaaagacctccagcagttacacattcatatcaaccagcacaacacgggatggcgcccaaactccggcgtttacaagaggagacgtgacgtggtgggctgaggttaatcagggaaggtttcctgggggaggtgatccttgaactggctcccggggaacattcagagcatgattggtagacagaagggtgcagaggcgcccaggggagtacattgccccgtgcaaagcaggggcattggggactgtcttgagaccctgagggggtcaagcccctccttccccagctgcccctccttctagaacctctgcacatctagcctctggccctcctcttcactgcctccacctgctcccgcttgccatccctgtctcctccatcctggctgtgcagtaggaattccaggctcctccctgtgtctttgctgttcttcagactccatttatagagaatgagggctgataacaggaatacagtggcaaagactagactgtggaaagggttccagaaatctttttttcttttttaattaaaaaaaatatttgcagagatgagctcttgctatgttgcccaggctggtctcaaactcctgggctcaagcgatcctcccatctcagcctcccagagtgctgggattacaggtgtgagctactgcgcccagccccagaaatctcagtgctgtttggagctccatttctcatttgatgacttgctctgcgtggggaggtggggtctcattcccccaacttcctcagggaggacccctgccctccgctgctcctctgtcctgctagccttcctccaggaagcacactgggtgcagataatcaggacattccagagatccccaatttaagagggtcatttccatctcaggggactcccggatgggtgtttccgctctcaatagcccctcttgttttaccaggaaagatccagttaaatcacccactgaggtgacagctcattagcggggagagagatggagcatcgagtgacactgggccatccaggcggctctgctcccaccagacaggagctaggcctcactggcaggggggctgcccacagccttttcaggggctcgcttggcgggtgacggggccgcagccaggccttctctccctgccccttggtgaccccgtggcttcctgtctgctggcctctcctgctacttatcacttcaccacgaactctctgcctgagactggggaagtaagcgggtatcttctcagtgagcataggttggggactgtgatcttgagaagccatgggccagcaatacctgcttttctgaagcccccaaggagggctctgacattctttttaaaaacaccacaaagcaaaattcccaggacatgtgtagttttgtttgttcagtatcccacaacttaaggctgggagatggaactcttggttaaggtcgatttttctgtctggcttctccgcaccttccacttgctctctggatcaggcagatataaactttctagcgcattttgagagagggctttcttgggtgagggagcatggcaaagtcggtttctctctggactgtttacacttcaaggcggtggatttagaggaatcctggctttcattttcaatgccagtctgagacatgttcccaagccggggctcttgttcacaccacttactctggccaccaacaacaacccaggccagacagagcatctcttttttttttttgagacagagtctctgtcgcccaggctggagcccagtggcgagatcttggctcactacaacctccacctcccgggttcaggcaattctcgtgcctaagcctcccgagtagctgcgactacaggcgccggccagcatgcctgtctaatttttgtattttagtagagacagggtttcaccatgttgcccaggctggtctcgaactcctgagctcgggcagtctacccacctcagcctcccaaagtgctgggattacaggcgtgagccaccgcgcccagccagaacatctgtttttacacccagagagcgcccctcgttaggacagaaccacggtgcccagagccaggaagccgccctcctggcgcccagcatctgagcttctacacgtgatgggcgggctcaggagaggacagggagtcgtggtggaagttccacagctggccgcgtgggggggcccttgcaccgcactgccgcctcctgactgcccctatccccgcagcccctgtgccggatttcatttccctcctctctcccagggtacctggccccagcactctcccatctgttcttcaggaaccgactcctctccagttgcaacaccagggagaaaggggcctccacatgcccaagtacccctgcaggatgaagggcaggccggcccttgatgtgccatttctgaataatagtcactgccgccgagtctaggatgtcctgttctaactcagccctgcctcggatgcaccaccgatctgtgcagagtgggtgtgggagtgtgggtgagggtcgaaatgccaaaggtctactttccagaatcaagtgccttctgcaaatcatgttggaaaagtccaaacctggagatgtccctgtgcctccgcccctacccaccccttttccttcagctgtgttaggaaggagaagttttcagaaccctctaggctggtggctttcaaacttcagaccatgatctgcagcaagaaacgtgccttccatcataaatcagtccatttgtttacaactgtgttccaagcaggtttcataaagaaattcttacccttagaacctcggatatcctctatgttttagttttcatttttttaaaatgcttcttaaaattcactaaattgggctaggtgtggctcatgcctgtaatcccagcactatgggaggctgaggtgagaggatcacttgagcccagaaggttgaaaccagcctgggcaacatagtgagaccccatctctacaaaaagttttaaaaccaggtatggtggtgccctcctgtggtcccagctactcgggagtctgaggtgggaggatcacctgagcccaggagactgaggctgcagtgaggtgtgattgcactattgctctctagcctggaaaacagagtgagaccctatctcaaaaaaaaaaaaaaaaaaaaaggaaagagtgatgacaacagcccagggagcagccccgctcagaacccaagtcccaagttccagcactgtgttcccaggcaggctgtttgcctcttcctggtctggaagcccttgggtcctatggtggcggcagctcccacagtccaggttccctggtggggaccaatgattccatccgcatggaagcccacgtgtgcacttaggggcccataaatggcagaagggcccctcctttgggagaccttgtcagtcagcatctctagggcaaccgtgattgccatttgtagaggggaaggaatcaagggactttaagctagatcaaaatctggggacaaattctcctgctaactgcaagttaaaataggcccttcttactgaatttccctgtttgtttctctgcagacaatgctttagccctactcttgggcccccaagttagcagagtaatcaaagcttcctaccgtttggcctactattccagactagtccctcgaggggttcccttccaaaatatgcagggctcaggctcccaattccgggcctgtctgctttgcttgtgtttctcctgtccctgttctcccggagggcccaggtggaactcacgacagggagggagacgcttcccaaaaacctgcagggctatttcccagaatttggttttcaagtacaaaactttttgtcctgtaagatatatgcagcctcacagaagcagcctctgcctccactttaccagctacgtttttatcttaagcacatggggctcccttagaacttactccactgatttaaaaaaaaaaaactgcctggcagcatctcagtgtcagagtgagcacggcacaggaaaggcccgtggtgacgagggtgaggtggccacagtgaccggacgacaaatgagactctgcaaatgagactccagagggtgaagatctgcggtctccagacatcataggccatgtgacccactaggggccgcttacccctggccgtccgctggctgaactgaacgcattccctctctccgcaactctcccgtgaggctgcacccgtgtgggtagcactggaagcggcactgtttgcattgtacataggaaggaaggaagttcttccagcctcaccagcacctggcagcgagtcagagcctgtgagggcatccgaagcagtgatgcagtgtcaacctcccagctggtgccactctgccctcgggggctccaagcattgtaactcagtcatgggagctgcctctttggaagtgcagatttattcctgtaataatcctgcctgcttttacctctcgtccactgaccagcaagtgtgagtcccggtgtcagtcggcacagtccagtgtccatctgcatttgctcatgcagagggggtgagttgggcactccctgttgttggttttccttttgcagcacactgggcagtctccctataaaacaaaaaccccaccttctgtgccttctgctttagagcagagctccccctcccatttcctcagtcttccctgcaaaatctgtccaccggggaaggcagcaggaaccctgggcagcgggtgttctgggaaggctagtgacagcagatgtcatccaggaacagccacacacggttctccaggccgccgtcagcagctcaaggtggggtatgagtgagaagctgaggatctcgcagcttgttgctgagcaaggtgcaaccgggctcatgctgtcatcagcacaagacgggatggcaagggctttcagacgcatttccaagagtccagcaagccagggggaagatgatccctttgccgaagtgtaccctctagccaacttttgggagcgcttctgtttgcaaagcgctggggatgtgcctgtctctgtgtgacccacgaacgggaagggagagcactggagtaatgacacttctgctgctgctttgattctcaaggctgatctttaaaaccctcgccttgctgacaggtgctttaaaggcagtctgcatcttttcttcccttggtgtgggagaggtaaacactttgatttgctgaaagctgtatggagtatatttgaacagctagtagttagctttgaaagtggaagtgtgaacagacactacttgtgtcgctttgggtccttcactttacccccacagaagtctagaggcgtctgttataaagcgttacggggcgcctgcatgcaggaggaaggacctgtattagctggaaatcatcaggaacccagcttgcctccatctctctgagatgtgctgggtacagcctgcccctcctagttctgtccaccgggaagagccggctggcggcagatccccaggggcagagcccctgctggatcctgggagctcatctttacctgtgccggagtgggaactgtgattccagccgggcaggtcagagtggagcagtgctaagaggctgttgcaggagaactagacgggcggggcctgctgcatctggatcatgtttctgtgctctgccccgcgctagggactcagggtctgggcttctgccaggtgaggagcagagagactgttcccttgggtggagaggtgtgggcatgagagccacccattgccaagcagcaagaatgttcgtgcttttttccagagaggggaaccccactggtttttgtggaaacaatggaaacttacagatgcctgcctgggatgatgaggcacattcagaacaaatgcttttttttttttgagacagagtctcgctctgacgcccaggctggagtgcagtggcgcgatctcggctcactgcaaactttgcctcccaggttcaagtgattctcctacctcagcctcccgagtagctgggattacaccaccatgcccagcaaatttttgtgtttttagtagagacggagtttcaccatgttggccaggctggtctcgaactcctgacctcaggtgatccatccgccttggcctcccaaagtgctgggattacaggcgggagccaccatgcctggccagaacaaatgcctttttaaaccttttaagaacatttttaaaatgtctttttctatgtcaaatgtaacgtttatttttttaaacaataaaattgatttgccaaaatccgggct

SEQ ID NO: 326816 - DNA, 304 bp, Homo sapiens
agcttaggatgtacaggaatcatctaggaacagctcaagggctaggcatgatctttgtggggctgggatgagctttccagacagaaacgagggagtgtgacacaggtggcagtggaaagaggatgtttgggatgcgagatggggctggaggagtgggcagggaccaggctgggggtgcctttggtgtcctgtttagagggttggtgtctgcctttggagtggtgggaagacactggaggtctctaagggtgcatggggcagggatgggagtagggatccacgatcacatttgtctgtttttttt

SEQ ID NO: 326817 - DNA, 432 bp, Homo sapiens
gcagggaccggtccggaaattcccgggtccgactactactattaaattcgcggccgcgtcgacaagatgttgaaattgttcctgtgcttggtaactactttcctctgccaggctatgggaaagaggatgtaattgtgaataatatacaccatccagtctttaatgtgctgcaacaatgtagtaatttgtttttttcatttgttcccactgcctttgtgtacatagaaaacttaaaaatttcccccagtctattagaagttaagatgttccctaatttattaaatatgcctttattcacaatttgtttttttaggttattcttaatgcattatagaattaagtatgactttgtttatttttattacagtatgtagttattgacatattgtggtttgcagaattatcaattgtataaactaaacctttaaatta

SEQ ID NO: 326818 - DNA, 3986 bp, Homo sapiens
agggcattgtgggaagggcggccggtgcagccgcagctgccatcttaggggcgcctggcgctacgggtttctcgttggaggcggccttcgtggcagctgtagacgccgggaaaaggcataaagtccgttggccgacacctttctttcctccggcctcggtagaaccgccagcccgcgtccgaaggcggaggcgaggggaactggccgcgtgaggggcctgaggcgagcggttagagcgtctcccggaaggatgggccggtctcggagccggagctcgtcccgctccaagcacaccaagagcagcaagcacaacaagaagcgcagccggtcccggtcgcgatcccgggacaaggagcgcgtgcggaagcgttccaaatctcgggaaagtaaacggaaccggcggcgggagtcgcggtcccgttcgcgctccaccaacacggccgtgtcccggcgcgagcgggaccgggagcgcgcctcgtccccgcccgaccgcatcgacatcttcgggcgcacggtgagcaagcgcagcagcctggacgagaagcagaagcgagaggaggaggagaagaaagcggagttcgagcggcagcgaaaaattcgacagcaagaaatagaagaaaaactcatcgaggaagaaacagcacgaagagtagaagaattggtagcaaaaagggtggaggaagaactggagaaaaggaaggatgaaattgaacgagaagttctccgaagggtggaggaagccaaacgcatcatggaaaagcagttgctcgaagaactcgagcgacagagacaagctgagcttgccgcacaaaaagctagagaggtaacgctcggtcgtttggaaagtagagacagtccatggcaaaactttcagtgttgggttctgcctcctgctcagttcagaaagagatggaatacagactatctaattcctttctcgtctaaacttaacattgctgcgaaagttaattttttagcctattcagaagtgctgactgataacttaaaagttggaagcttttataaaacatattcaaggatactttttgatttaatggaactggctatttgagaagtgtttgaaacttttgccatggctgcaggacttacattcttttttgggaggacggtggggagacagggagtggtaaagggaaaaggttaaaaatccacctgtggttgtatattcttctattctgtcactctgttacctagactgtgagaggcttttgccttcagtcagattaaaaagagcagggcctaacattgagtgatagcacctgctttgataaataggttttctcactcttctttttttccttcttttatccctcactccctcccctaaaccctgcttcagcacaatggactaattctagcattctgatcataaggccctccattttcctaatgtgtttcaaggaatctttttaggaaaaatatccagattattcatccactttttttagtatctactaacaactcctttttttctctagagagttatgaaggaacaggttgtccttgtctggagtcaagctaaacacatgatttgttttatcagcagctggagcagaagttgaaaatgtctttctgtgagacagtaatttgctactgaagctttatggcttgtttgcactgattactccaggatccaatgtctgtcaccatagtttgcataatgaatatgaatcccattggtgtgtgatgtaggaaatcctgtagttgtattttcttgaactgaaatatttgactcaaaataattaagactcattgtcatttttcatcttggcattattgtggacaagttgacatattaaatctctttgctttctggtaagcttagcttttaaaatgcattttcccttgtcctgtctttaactagatatacatgcttatatttatagtgggtttcacagactataaaattgaatgtatgaaatttttatttatatcagtgcttttaataatgaagatatttttggagtaatggtgctgtcttgtagcgagttattaatcatagtaagatttttttctcttcatttgctttttttgtttcatattaacaattttttttttacacggacacaaccctctgacagtctttccaaatattaaaatcatttgaatatgtatgctgtgatctgaacactgctcaagccatcaagcagtcttcatacagtttgcattataaaatctcattaaattctccaagaaaaaataagttgaagaattttatttcctgaccatgcatcccctggatttctgagtttcagttcagattgtagatgacaatataagctgccttccgaaattgtcaacatctgaatgttaagtccattttccccatggaagaagcccgtagttccatgaagtatggattaccatttgtatttttcactaacagtaaatgtatttttcttattaattgtttgccttaggaatgatgaattacattttttgttccttcttaccataaacatctgcattcctcagctcagccttccttgtatgttgtttctttataaatggttgagctgctgatgcaggtattgccaagctaacagtacaaatcattttaaagaggaagctggcgcgtatggcagccgaggagcacactctgcaggacactggacaagacagtaaatattcaacttttaatgctgattaaaggagtataggtaaagaatacgtaggtatacataattggtgagacaaatattcactttatttatattttatatattatttttttaatttggtaaatactatccagttttgtagttgtccttgttgatttgtgtgatattaaagtattagtaataattgccaggaaactatcattagggagggtttagttggttgctgtttggactgggagggatgatttaaatttagtgctagaaaccaattttagtgactgcacagtttatcatttgtcagacagaaggtagctataaagctaccctgtaagtcatatcaaaaaagttcagaggaagattagtaaatatttatcaataaaaataaacattttgtttttctaatatcttaacatatcctcccctttaggaggaagaacgtgcaaaacgtgaggagctagagcgaatactggaagagaataaccgaaaaattgcagaagcacaagccaaactggccgaagaacagttgagaattgttgaagaacaaagaaagattcatgaggaaaggatgaaactagaacaagaacgacaacgtcaacaaaaagaagaacaaaaaattatcctgggcaaggggaagtccaggccaaaactgtccttctcattaaaaacccaggattaaattgcaaactctgaactttttacaaagaaaaatggaaaaactttgtatggtagcttcatgttgaagtggttttttgtttttgtttttgtttttttaatttgtaaaatctggaaagttagcttgttctaataggggctatgctctgcaattcccttttttttttttttttccttccactaagtcaaatccttatcagatcattgttgtattctaaggagtgacgtatttttcacctgtttggattctatattagtggtctgaggaagagcagatcacattgtaaaactatggatggtctgataaggcttttactgaccccactgacttcagagttatactctgtttgctacatcataatgctggttttgctgactttttgtttttttatatatttataaaaaaagaaaaagttggtgattgcattgggaaattcccagggtattactggacctatgtggtgtattgttaaaccagtgtccttgtgatactgttgctcttgatgttcctgatacaggtaaggaaacagttggtcaactctgatacaaagtatatatacagttcagtattgtctctgttcattttgtttttatttcattgacaaaatcaaaccagcattccccattgtgtaaataaatgattttgctgaataaagtaaagtcttaaattca

SEQ ID NO: 326819 - DNA, 3987 bp, Homo sapiens
agggcattgtgggaagggcggccggtgcagccgcagctgccatcttaggggcgcctggcgctacgggtttctcgttggaggcggccttcgtggcagctgtagacgccgggaaaaggcataaagtccgttggccgacacctttctttcctccggcctcggtagaaccgccagcccgcgtccgaaggcggaggcgaggggaactggccgcgtgaggggcctgaggcgagcggttagagcgtctcccggaaggatgggccggtctcggagccggagctcgtcccgctccaagcacaccaagagcagcaagcacaacaagaagcgcagccggtcccggtcgcgatcccgggacaaggagcgcgtgcggaagcgttccaaatctcgggaaagtaaacggaaccggcggcgggagtcgcggtcccgttcgcgctccaccaacacggccgtgtcccggcgcgagcgggaccgggagcgcgcctcgtccccgcccgaccgcatcgacatcttcgggcgcacggtgagcaagcgcagcagcctggacgagaagcagaagcgagaggaggaggagaagaaagcggagttcgagcggcagcgaaaaattcgacagcaagaaatagaagaaaaactcatcgaggaagaaacagcacgaagagtagaagaattggtagcaaaaagggtggaggaagaactggagaaaaggaaggatgaaattgaacgagaagttctccgaagggtggaggaagccaaacgcatcatggaaaagcagttgctcgaagaactcgagcgacagagacaagctgagcttgccgcacaaaaagctagagaggtaacgctcggtcgtttggaaagtagagacagtccatggcaaaactttcagtgttgggttctgcctcctgctcagttcagaaagagatggaatacagactatctaattcctttctcgtctaaacttaacattgctgcgaaagttaattttttagcctattcagaagtgctgactgataacttaaaagttggaagcttttataaaacatattcaaggatactttttgatttaatggaactggctatttgagaagtgtttgaaacttttgccatggctgcaggacttacattcttttttgggaggacggtggggagacagggagtggtaaagggaaaaggttaaaaatccacctgtggttgtatattcttctattctgtcactctgttacctagactgtgagaggcttttgccttcagtcagattaaaaagagcagggcctaacattgagtgatagcacctgctttgataaataggttttctcactcttctttttttccttcttttatccctcactccctcccctaaaccctgcttcagcacaatggactaattctagcattctgatcataaggccctccattttcctaatgtgtttcaaggaatctttttaggaaaaatatccagattattcatccactttttttagtatctactaacaactcctttttttctctagagagttatgaaggaacaggttgtccttgtctggagtcaagctaaacacatgatttgttttatcagcagctggagcagaagttgaaaatgtctttctgtgagacagtaatttgctactgaagctttatggcttgtttgcactgattactccaggatccaaaaacttggtgaaagtcactgaaacactcaaggcaaattactttacagccctgagtgtctgtcaccatagtttgcataatgaatatgaatcccattggtgtgtgatgtaggaaatcctgtagttgtattttcttgaactgaaatatttgactcaaaataattaagactcattgtcatttttcatcttggcattattgtggacaagttgacatattaaatctctttgctttctggtaagcttagcttttaaaatgcattttcccttgtcctgtctttaactagatatacatgcttatatttatagtgggtttcacagactataaaattgaatgtatgaaatttttatttatatcagtgcttttaataatgaagatatttttggagtaatggtgctgtcttgtagcgagttattaatcatagtaagatttttttctcttcatttgctttttttgtttcatattaacaattttttttttacacggacacaaccctctgacagtctttccaaatattaaaatcatttgaatatgtatgctgtgatctgaacactgctcaagccatcaagcagtcttcatacagtttgcattataaaatctcattaaattctccaagaatttcagttcagattgtagatgacaatataagctgccttccgaaattgtcaacatctgaatgttaagtccattttccccatggaagaagcccgtagttccatgaagtatggattaccatttgtatttttcactaacagtaaatgtatttttcttattaattgtttgccttaggaatgatgaattacattttttgttccttcttaccataaacatctgcattcctcagctcagccttccttgtatgttgtttctttataaatggttgagctgctgatgcaggtattgccaagctaacagtacaaatcattttaaagaggaagctggcgcgtatggcagccgaggagcacactctgcaggacactggacaagacagtaaatattcaacttttaatgctgattaaaggagtataggtaaagaatacgtaggtatacataattggtgagacaaatattcactttatttatattttatatattatttttttaatttggtaaatactatccagttttgtagttgtccttgttgatttgtgtgatattaaagtattagtaataattgccaggaaactatcattagggagggtttagttggttgctgtttggactgggagggatgatttaaatttagtgctagaaaccaattttagtgactgcacagtttatcatttgtcagacagaaggtagctataaagctaccctgtaagtcatatcaaaaaagttcagaggaagattagtaaatatttatcaataaaaataaacattttgtttttctaatatcttaacatatcctcccctttaggaggaagaacgtgcaaaacgtgaggagctagagcgaatactggaagagaataaccgaaaaattgcagaagcacaagccaaactggccgaagaacagttgagaattgttgaagaacaaagaaagattcatgaggaaaggatgaaactagaacaagaacgacaacgtcaacaaaaagaagaacaaaaaattatcctgggcaaggggaagtccaggccaaaactgtccttctcattaaaaacccaggattaaattgcaaactctgaactttttacaaagaaaaatggaaaaactttgtatggtagcttcatgttgaagtggttttttgtttttgtttttgtttttttaatttgtaaaatctggaaagttagcttgttctaataggggctatgctctgcaattcccttttttttttttttttccttccactaagtcaaatccttatcagatcattgttgtattctaaggagtgacgtatttttcacctgtttggattctatattagtggtctgaggaagagcagatcacattgtaaaactatggatggtctgataaggcttttactgaccccactgacttcagagttatactctgtttgctacatcataatgctggttttgctgactttttgtttttttatatatttataaaaaaagaaaaagttggtgattgcattgggaaattcccagggtattactggacctatgtggtgtattgttaaaccagtgtccttgtgatactgttgctcttgatgttcctgatacaggtaaggaaacagttggtcaactctgatacaaagtatatatacagttcagtattgtctctgttcattttgtttttatttcattgacaaaatcaaaccagcattccccattgtgtaaataaatgattttgctgaataaagtaaagtcttaaattca

SEQ ID NO: 326820 - DNA, 3987 bp, Homo sapiens
agggcattgtgggaagggcggccggtgcagccgcagctgccatcttaggggcgcctggcgctacgggtttctcgttggaggcggccttcgtggcagctgtagacgccgggaaaaggcataaagtccgttggccgacacctttctttcctccggcctcggtagaaccgccagcccgcgtccgaaggcggaggcgaggggaactggccgcgtgaggggcctgaggcgagcggttagagcgtctcccggaaggatgggccggtctcggagccggagctcgtcccgctccaagcacaccaagagcagcaagcacaacaagaagcgcagccggtcccggtcgcgatcccgggacaaggagcgcgtgcggaagcgttccaaatctcgggaaagtaaacggaaccggcggcgggagtcgcggtcccgttcgcgctccaccaacacggccgtgtcccggcgcgagcgggaccgggagcgcgcctcgtccccgcccgaccgcatcgacatcttcgggcgcacggtgagcaagcgcagcagcctggacgagaagcagaagcgagaggaggaggagaagaaagcggagttcgagcggcagcgaaaaattcgacagcaagaaatagaagaaaaactcatcgaggaagaaacagcacgaagagtagaagaattggtagcaaaaagggtggaggaagaactggagaaaaggaaggatgaaattgaacgagaagttctccgaagggtggaggaagccaaacgcatcatggaaaagcagttgctcgaagaactcgagcgacagagacaagctgagcttgccgcacaaaaagctagagaggtaacgctcggtcgtttggaaagtagagacagtccatggcaaaactttcagtgttgggttctgcctcctgctcagttcagaaagagatggaatacagactatctaattcctttctcgtctaaacttaacattgctgcgaaagttaattttttagcctattcagaagtgctgactgataacttaaaagttggaagcttttataaaacatattcaaggatactttttgatttaatggaactggctatttgagaagtgtttgaaacttttgccatggctgcaggacttacattcttttttgggaggacggtggggagacagggagtggtaaagggaaaaggttaaaaatccacctgtggttgtatattcttctattctgtcactctgttacctagactgtgagaggcttttgccttcagtcagattaaaaagagcagggcctaacattgagtgatagcacctgctttgataaataggttttctcactcttctttttttccttcttttatccctcactccctcccctaaaccctgcttcagcacaatggactaattctagcattctgatcataaggccctccattttcctaatgtgtttcaaggaatctttttaggaaaaatatccagattattcatccactttttttagtatctactaacaactcctttttttctctagagagttatgaaggaacaggttgtccttgtctggagtcaagctaaacacatgatttgttttatcagcagctggagcagaagttgaaaatgtctttctgtgagacagtaatttgctactgaagctttatggcttgtttgcactgattactccaggatccaaaaacttggtgaaagtcactgaaacactcaaggcaaattactttacagccctgagtgtctgtcaccatagtttgcataatgaatatgaatcccattggtgtgtgatgtaggaaatcctgtagttgtattttcttgaactgaaatatttgactcaaaataattaagactcattgtcatttttcatcttggcattattgtggacaagttgacatattaaatctctttgctttctggtaagcttagcttttaaaatgcattttcccttgtcctgtctttaactagatatacatgcttatatttatagtgggtttcacagactataaaattgaatgtatgaaatttttatttatatcagtgcttttaataatgaagatatttttggagtaatggtgctgtcttgtagcgagttattaatcatagtaagatttttttctcttcatttgctttttttgtttcatattaacaattttttttttacacggacacaaccctctgacagtctttccaaatattaaaatcatttgaatatgtatgctgtgatctgaacactgctcaagccatcaagcagtcttcatacagtttgcattataaaatctcattaaattctccaagaaaaaataagttgaagaattttatttcctgaccatgcatcccctggatttctgagtttcagttcagattgtagatgacaatataagctgccttccgaaattgtcaacatctgaatgttaagtccattttccccatggaagaagcccgtagttccatgaagtatggattaccatttgtatttttcactaacagtaaatgtatttttcttattaattgtttgccttaggaatgatgaattacattttttgttccttcttaccataaacatctgcattcctcagctcagccttccttgtatgttgtttctttataaatggttgagctgctgatgcaggtattgccaagctaacagtacaaatcattttaaagaggaagctggcgcgtatggcagccgaggagcacactctgcaggacactggacaagacagtaaatattcaacttttaatgctgattaaaggagtataggtatttatatattatttttttaatttggtaaatactatccagttttgtagttgtccttgttgatttgtgtgatattaaagtattagtaataattgccaggaaactatcattagggagggtttagttggttgctgtttggactgggagggatgatttaaatttagtgctagaaaccaattttagtgactgcacagtttatcatttgtcagacagaaggtagctataaagctaccctgtaagtcatatcaaaaaagttcagaggaagattagtaaatatttatcaataaaaataaacattttgtttttctaatatcttaacatatcctcccctttaggaggaagaacgtgcaaaacgtgaggagctagagcgaatactggaagagaataaccgaaaaattgcagaagcacaagccaaactggccgaagaacagttgagaattgttgaagaacaaagaaagattcatgaggaaaggatgaaactagaacaagaacgacaacgtcaacaaaaagaagaacaaaaaattatcctgggcaaggggaagtccaggccaaaactgtccttctcattaaaaacccaggattaaattgcaaactctgaactttttacaaagaaaaatggaaaaactttgtatggtagcttcatgttgaagtggttttttgtttttgtttttgtttttttaatttgtaaaatctggaaagttagcttgttctaataggggctatgctctgcaattcccttttttttttttttttccttccactaagtcaaatccttatcagatcattgttgtattctaaggagtgacgtatttttcacctgtttggattctatattagtggtctgaggaagagcagatcacattgtaaaactatggatggtctgataaggcttttactgaccccactgacttcagagttatactctgtttgctacatcataatgctggttttgctgactttttgtttttttatatatttataaaaaaagaaaaagttggtgattgcattgggaaattcccagggtattactggacctatgtggtgtattgttaaaccagtgtccttgtgatactgttgctcttgatgttcctgatacaggtaaggaaacagttggtcaactctgatacaaagtatatatacagttcagtattgtctctgttcattttgtttttatttcattgacaaaatcaaaccagcattccccattgtgtaaataaatgattttgctgaataaagtaaagtcttaaattca

SEQ ID NO: 326821 - DNA, 3855 bp, Homo sapiens
agggcattgtgggaagggcggccggtgcagccgcagctgccatcttaggggcgcctggcgctacgggtttctcgttggaggcggccttcgtggcagctgtagacgccgggaaaaggcataaagtccgttggccgacacctttctttcctccggcctcggtagaaccgccagcccgcgtccgaaggcggaggcgaggggaactggccgcgtgaggggcctgaggcgagcggtcccgttcgcgctccaccaacacggccgtgtcccggcgcgagcgggaccgggagcgcgcctcgtccccgcccgaccgcatcgacatcttcgggcgcacggtgagcaagcgcagcagcctggacgagaagcagaagcgagaggaggaggagaagaaagcggagttcgagcggcagcgaaaaattcgacagcaagaaatagaagaaaaactcatcgaggaagaaacagcacgaagagtagaagaattggtagcaaaaagggtggaggaagaactggagaaaaggaaggatgaaattgaacgagaagttctccgaagggtggaggaagccaaacgcatcatggaaaagcagttgctcgaagaactcgagcgacagagacaagctgagcttgccgcacaaaaagctagagaggtaacgctcggtcgtttggaaagtagagacagtccatggcaaaactttcagtgttgggttctgcctcctgctcagttcagaaagagatggaatacagactatctaattcctttctcgtctaaacttaacattgctgcgaaagttaattttttagcctattcagaagtgctgactgataacttaaaagttggaagcttttataaaacatattcaaggatactttttgatttaatggaactggctatttgagaagtgtttgaaacttttgccatggctgcaggacttacattcttttttgggaggacggtggggagacagggagtggtaaagggaaaaggttaaaaatccacctgtggttgtatattcttctattctgtcactctgttacctagactgtgagaggcttttgccttcagtcagattaaaaagagcagggcctaacattgagtgatagcacctgctttgataaataggttttctcactcttctttttttccttcttttatccctcactccctcccctaaaccctgcttcagcacaatggactaattctagcattctgatcataaggccctccattttcctaatgtgtttcaaggaatctttttaggaaaaatatccagattattcatccactttttttagtatctactaacaactcctttttttctctagagagttatgaaggaacaggttgtccttgtctggagtcaagctaaacacatgatttgttttatcagcagctggagcagaagttgaaaatgtctttctgtgagacagtaatttgctactgaagctttatggcttgtttgcactgattactccaggatccaaaaacttggtgaaagtcactgaaacactcaaggcaaattactttacagccctgagtgtctgtcaccatagtttgcataatgaatatgaatcccattggtgtgtgatgtaggaaatcctgtagttgtattttcttgaactgaaatatttgactcaaaataattaagactcattgtcatttttcatcttggcattattgtggacaagttgacatattaaatctctttgctttctggtaagcttagcttttaaaatgcattttcccttgtcctgtctttaactagatatacatgcttatatttatagtgggtttcacagactataaaattgaatgtatgaaatttttatttatatcagtgcttttaataatgaagatatttttggagtaatggtgctgtcttgtagcgagttattaatcatagtaagatttttttctcttcatttgctttttttgtttcatattaacaattttttttttacacggacacaaccctctgacagtctttccaaatattaaaatcatttgaatatgtatgctgtgatctgaacactgctcaagccatcaagcagtcttcatacagtttgcattataaaatctcattaaattctccaagaaaaaataagttgaagaattttatttcctgaccatgcatcccctggatttctgagtttcagttcagattgtagatgacaatataagctgccttccgaaattgtcaacatctgaatgttaagtccattttccccatggaagaagcccgtagttccatgaagtatggattaccatttgtatttttcactaacagtaaatgtatttttcttattaattgtttgccttaggaatgatgaattacattttttgttccttcttaccataaacatctgcattcctcagctcagccttccttgtatgttgtttctttataaatggttgagctgctgatgcaggtattgccaagctaacagtacaaatcattttaaagaggaagctggcgcgtatggcagccgaggagcacactctgcaggacactggacaagacagtaaatattcaacttttaatgctgattaaaggagtataggtaaagaatacgtaggtatacataattggtgagacaaatattcactttatttatattttatatattatttttttaatttggtaaatactatccagttttgtagttgtccttgttgatttgtgtgatattaaagtattagtaataattgccaggaaactatcattagggagggtttagttggttgctgtttggactgggagggatgatttaaatttagtgctagaaaccaattttagtgactgcacagtttatcatttgtcagacagaaggtagctataaagctaccctgtaagtcatatcaaaaaagttcagaggaagattagtaaatatttatcaataaaaataaacattttgtttttctaatatcttaacatatcctcccctttaggaggaagaacgtgcaaaacgtgaggagctagagcgaatactggaagagaataaccgaaaaattgcagaagcacaagccaaactggccgaagaacagttgagaattgttgaagaacaaagaaagattcatgaggaaaggatgaaactagaacaagaacgacaacgtcaacaaaaagaagaacaaaaaattatcctgggcaaggggaagtccaggccaaaactgtccttctcattaaaaacccaggattaaattgcaaactctgaactttttacaaagaaaaatggaaaaactttgtatggtagcttcatgttgaagtggttttttgtttttgtttttgtttttttaatttgtaaaatctggaaagttagcttgttctaataggggctatgctctgcaattcccttttttttttttttttccttccactaagtcaaatccttatcagatcattgttgtattctaaggagtgacgtatttttcacctgtttggattctatattagtggtctgaggaagagcagatcacattgtaaaactatggatggtctgataaggcttttactgaccccactgacttcagagttatactctgtttgctacatcataatgctggttttgctgactttttgtttttttatatatttataaaaaaagaaaaagttggtgattgcattgggaaattcccagggtattactggacctatgtggtgtattgttaaaccagtgtccttgtgatactgttgctcttgatgttcctgatacaggtaaggaaacagttggtcaactctgatacaaagtatatatacagttcagtattgtctctgttcattttgtttttatttcattgacaaaatcaaaccagcattccccattgtgtaaataaatgattttgctgaataaagtaaagtcttaaattca

SEQ ID NO: 326822 - DNA, 2498 bp, Homo sapiens
ctcggtacccggctcatttcagtttgaaaatgtgtgcacagaagagtagctgtgaacaacatctaagttagcacttgtcagtgtacgtttttcaaacgctattttaattatttgtatggtgacaagctgtttgctcaattatgggacttcggggactattctgtcaatcatgtctgtcaccatagtttgcataatgaatatgaatcccattggtgtgtgatgtaggaaatcctgtagttgtattttcttgaactgaaatatttgactcaaaataattaagactcattgtcatttttcatcttggcattattgtggacaagttgacatattaaatctctttgctttctggtaagcttagcttttaaaatgcattttcccttgtcctgtctttaactagatatacatgcttatatttatagtgggtttcacagactataaaattgaatgtatgaaatttttatttatatcagtgcttttaataatgaagatatttttggagtaatggtgctgtcttgtagcgagttattaatcatagtaagatttttttctcttcatttgctttttttgtttcatattaacaattttttttttacacggacacaaccctctgacagtctttccaaatattaaaatcatttgaatatgtatgctgtgatctgaacactgctcaagccatcaagcagtcttcatacagtttgcattataaaatctcattaaattctccaagaaaaaataagttgaagaattttatttcctgaccatgcatcccctggatttctgagtttcagttcagattgtagatgacaatataagctgccttccgaaattgtcaacatctgaatgttaagtccattttccccatggaagaagcccgtagttccatgaagtatggattaccatttgtatttttcactaacagtaaatgtatttttcttattaattgtttgccttaggaatgatgaattacattttttgttccttcttaccataaacatctgcattcctcagctcagccttccttgtatgttgtttctttataaatggttgagctgctgatgcaggtattgccaagctaacagtacaaatcattttaaagaggaagctggcgcgtatggcagccgaggagcacactctgcaggacactggacaagacagtaaatattcaacttttaatgctgattaaaggagtataggtaaagaatacgtaggtatacataattggtgagacaaatattcactttatttatattttatatattatttttttaatttggtaaatactatccagttttgtagttgtccttgttgatttgtgtgatattaaagtattagtaataattgccaggaaactatcattagggagggtttagttggttgctgtttggactgggagggatgatttaaatttagtgctagaaaccaattttagtgactgcacagtttatcatttgtcagacagaaggtagctataaagctaccctgtaagtcatatcaaaaaagttcagaggaagattagtaaatatttatcaataaaaataaacattttgtttttctaatatcttaacatatcctcccctttaggaggaagaacgtgcaaaacgtgaggagctagagcgaatactggaagagaataaccgaaaaattgcagaagcacaagccaaactggccgaagaacagttgagaattgttgaagaacaaagaaagattcatgaggaaaggatgaaactagaacaagaacgacaacgtcaacaaaaagaagaacaaaaaattatcctgggcaaggggaagtccaggccaaaactgtccttctcattaaaaacccaggattaaattgcaaactctgaactttttacaaagaaaaatggaaaaactttgtatggtagcttcatgttgaagtggttttttgtttttgtttttgtttttttaatttgtaaaatctggaaagttagcttgttctaataggggctatgctctgcaattcccttttttttttttttttccttccactaagtcaaatccttatcagatcattgttgtattctaaggagtgacgtatttttcacctgtttggattctatattagtggtctgaggaagagcagatcacattgtaaaactatggatggtctgataaggcttttactgaccccactgacttcagagttatactctgtttgctacatcataatgctggttttgctgactttttgtttttttatatatttataaaaaaagaaaaagttggtgattgcattgggaaattcccagggtattactggacctatgtggtgtattgttaaaccagtgtccttgtgatactgttgctcttgatgttcctgatacaggtaaggaaacagttggtcaactctgatacaaagtatatatacagttcagtattgtctctgttcattttgtttttatttcattgacaaaatcaaaccagcattccccattgtgtaaataaatgattttgctgaataaagtaaagtcttaaattca

SEQ ID NO: 326823 - DNA, 3986 bp, Homo sapiens
agggcattgtgggaagggcggccggtgcagccgcagctgccatcttaggggcgcctggcgctacgggtttctcgttggaggcggccttcgtggcagctgtagacgccgggaaaaggcataaagtccgttggccgacacctttctttcctccggcctcggtagaaccgccagcccgcgtccgaaggcggaggcgaggggaactggccgcgtgaggggcctgaggcgagcggttagagcgtctcccggaaggatgggccggtctcggagccggagctcgtcccgctccaagcacaccaagagcagcaagcacaacaagaagcgcagccggtcccggtcgcgatcccgggacaaggagcgcgtgcggaagcgttccaaatctcgggaaagtaaacggaaccggcggcgggagtcgcggtcccgttcgcgctccaccaacacggccgtgtcccggcgcgagcgggaccgggagcgcgcctcgtccccgcccgaccgcatcgacatcttcgggcgcacggtgagcaagcgcagcagcctggacgagaagcagaagcgagaggaggaggagaagaaagcggagttcgagcggcagcgaaaaattcgacagcaagaaatagaagaaaaactcatcgaggaagaaacagcacgaagagtagaagaattggtagcaaaaagggtggaggaagaactggagaaaaggaaggatgaaattgaacgagaagttctccgaagggtggaggaagccaaacgcatcatggaaaagcagttgctcgaagaactcgagcgacagagacaagctgagcttgccgcacaaaaagctagagaggtaacgctcggtcgtttggaaagtagagacagtccatggcaaaactttcagtgttgggttctgcctcctgctcagttcagaaagagatggaatacagactatctaattcctttctcgtctaaacttaacattgctgcgaaagttaattttttagcctattcagaagtgctgactgataacttaaaagttggaagcttttataaaacatattcaaggatactttttgatttaatggaactggctatttgagaagtgtttgaaacttttgccatggctgcaggacttacattcttttttgggaggacggtggggagacagggagtggtaaagggaaaaggttaaaaatccacctgtggttgtatattcttctattctgtcactctgttacctagactgtgagaggcttttgccttcagtcagattaaaaagagcagggcctaacattgagtgatagcacctgctttgataaataggttttctcactcttctttttttccttcttttatccctcactccctcccctaaaccctgcttcagcacaatggactaattctagcattctgatcataaggccctccattttcctaatgtgtttcaaggaatctttttaggaaaaatatccagattattcatccactttttttagtatctactaacaactcctttttttctctagagagttatgaaggaacaggttgtccttgtctggagtcaagctaaacacatgatttgttttatcagcagctggagcagaagttgaaaatgtctttctgtgagacagtaatttgctactgaagctttatggcttgtttgcactgattactccaggatccaaaaacttggtgaaagtcactgaaacactcaaggcaaattactttacagccctgagtgtctgtcaccatagtttgcataatgaatatgaatcccattggtgtgtgatgtaggaaatcctgtagttgtattttcttgaactgaaatatttgactcaaaataattaagactcattgtcatttttcatcttggcattattgtggacaagttgacatattaaatctctttgctttctggtaagcttagcttttaaaatgcattttcccttgtcctgtctttaactagatatacatgcttatatttatagtgggtttcacagactataaaattgaatgtatgaaatttttatttatatcagtgcttttaataatgaagatatttttggagtaatggtgctgtcttgtagcgagttattaatcatagtaagatttttttctcttcatttgctttttttgtttcatattaacaattttttttttacacggacacaaccctctgacagtctttccaaatattaaaatcatttgaatatgtatgctgtgatctgaacactgctcaagccatcaagcagtcttcatacagtttgcattataaaatctcattaaattctccaagaaaaaataagttgaagaattttatttcctgaccatgcatcccctggatttctgagtttcagttcagattgtagatgacaatataagctgccttccgaaattgtcaacatctgaatgttaagtccattttccccatggaagaagcccgtagttccatgaagtatggattaccatttgtatttttcactaacagtaaatgtatttttcttattaattgtttgccttaggaatgatgaattacattttttgttccttcttaccataaacatctgcattcctcagctcagccttccttgtatgttgtttctttataaatggttgagctgctgatgcaggtattgccaagctaacagtacaaatcattttaaagaggaagctggcgcgtatggcagccgaggagcacactctgcaggacactggacaagacagtaaatattcaacttttaatgctgattaaaggagtataggtaaagaatacgtaggtatacataattggtgagacaaatattcactttatttatattttatatattatttttttaatttggtaaatactatccagttttgtagttgtccttgttgatttgtgtgatattaaagtattagtaataattgccaggaaactatcattagggagggtttagttggttgctgtttggactgggagggatgatttaaatttagtgctagaaaccaattttagtgactgcacagtttatcatttgtcagacagaaggtagctataaagctaccctgtaagtcatatcaaaaaagttcagaggaagattagtaaatatttatcaataaaaataaacattttgtttttctaatatcttaacatatcctcccctttaggaggaagaacgtgcaaaacgtgaggagctagagcgaatactggaagagaataaccgaaaacaaagaaagattcatgaggaaaggatgaaactagaacaagaacgacaacgtcaacaaaaagaagaacaaaaaattatcctgggcaaggggaagtccaggccaaaactgtccttctcattaaaaacccaggattaaattgcaaactctgaactttttacaaagaaaaatggaaaaactttgtatggtagcttcatgttgaagtggttttttgtttttgtttttgtttttttaatttgtaaaatctggaaagttagcttgttctaataggggctatgctctgcaattcccttttttttttttttttccttccactaagtcaaatccttatcagatcattgttgtattctaaggagtgacgtatttttcacctgtttggattctatattagtggtctgaggaagagcagatcacattgtaaaactatggatggtctgataaggcttttactgaccccactgacttcagagttatactctgtttgctacatcataatgctggttttgctgactttttgtttttttatatatttataaaaaaagaaaaagttggtgattgcattgggaaattcccagggtattactggacctatgtggtgtattgttaaaccagtgtccttgtgatactgttgctcttgatgttcctgatacaggtaaggaaacagttggtcaactctgatacaaagtatatatacagttcagtattgtctctgttcattttgtttttatttcattgacaaaatcaaaccagcattccccattgtgtaaataaatgattttgctgaataaagtaaagtcttaaattca

SEQ ID NO: 326824 - DNA, 5695 bp, Homo sapiens
agggcattgtgggaagggcggccggtgcagccgcagctgccatcttaggggcgcctggcgctacgggtttctcgttggaggcggccttcgtggcagctgtagacgccgggaaaaggcataaagtccgttggccgacacctttctttcctccggcctcggtagaaccgccagcccgcgtccgaaggcggaggcgaggggaactggccgcgtgaggggcctgaggcgagcggttagagcgtctcccggaaggatgggccggtctcggagccggagctcgtcccgctccaagcacaccaagagcagcaagcacaacaagaagcgcagccggtcccggtcgcgatcccgggacaaggagcgcgtgcggaagcgttccaaatctcgggaaagtaaacggaaccggcggcgggagtcgcggtcccgttcgcgctccaccaacacggccgtgtcccggcgcgagcgggaccgggagcgcgcctcgtccccgcccgaccgcatcgacatcttcgggcgcacggtgagcaagcgcagcagcctggacgagaagcagaagcgagaggaggaggagaagaaagcggagttcgagcggcagcgaaaaattcgacagcaagaaatagaagaaaaactcatcgaggaagaaacagcacgaagagtagaagaattggtagcaaaaagggtggaggaagaactggagaaaaggaaggatgaaattgaacgagaagttctccgaagggtggaggaagccaaacgcatcatggaaaagcagttgctcgaagaactcgagcgacagagacaagctgagcttgccgcacaaaaagctagagaggtaacgctcggtcgtttggaaagtagagacagtccatggcaaaactttcagtgttgggttctgcctcctgctcagttcagaaagagatggaatacagactatctaattcctttctcgtctaaacttaacattgctgcgaaagttaattttttagcctattcagaagtgctgactgataacttaaaagttggaagcttttataaaacatattcaaggatactttttgatttaatggaactggctatttgagaagtgtttgaaacttttgccatggctgcaggacttacattcttttttgggaggacggtggggagacagggagtggtaaagggaaaaggttaaaaatccacctgtggttgtatattcttctattctgtcactctgttacctagactgtgagaggcttttgccttcagtcagattaaaaagagcagggcctaacattgagtgatagcacctgctttgataaataggttttctcactcttctttttttccttcttttatccctcactccctcccctaaaccctgcttcagcacaatggactaattctagcattctgatcataaggccctccattttcctaatgtgtttcaaggaatctttttaggaaaaatatccagattattcatccactttttttagtatctactaacaactcctttttttctctagagagttatgaaggaacaggttgtccttgtctggagtcaagctaaacacatgatttgttttatcagcagctggagcagaagttgaaaatgtctttctgtgagacagtaatttgctactgaagctttatggcttgtttgcactgattactccaggatccaaaaacttggtgaaagtcactgaaacactcaaggcaaattactttacagccctgagtgtctgtcaccatagtttgcataatgaatatgaatcccattggtgtgtgatgtaggaaatcctgtagttgtattttcttgaactgaaatatttgactcaaaataattaagactcattgtcatttttcatcttggcattattgtggacaagttgacatattaaatctctttgctttctggtaagcttagcttttaaaatgcattttcccttgtcctgtctttaactagatatacatgcttatatttatagtgggtttcacagactataaaattgaatgtatgaaatttttatttatatcagtgcttttaataatgaagatatttttggagtaatggtgctgtcttgtagcgagttattaatcatagtaagatttttttctcttcatttgctttttttgtttcatattaacaattttttttttacacggacacaaccctctgacagtctttccaaatattaaaatcatttgaatatgtatgctgtgatctgaacactgctcaagccatcaagcagtcttcatacagtttgcattataaaatctcattaaattctccaagaaaaaataagttgaagaattttatttcctgaccatgcatcccctggatttctgagtttcagttcagattgtagatgacaatataagctgccttccgaaattgtcaacatctgaatgttaagtccattttccccatggaagaagcccgtagttccatgaagtatggattaccatttgtatttttcactaacagtaaatgtatttttcttattaattgtttgccttaggaatgatgaattacattttttgttccttcttaccataaacatctgcattcctcagctcagccttccttgtatgttgtttctttataaatggttgagctgctgatgcaggtattgccaagctaacagtacaaatcattttaaagaggaagctggcgcgtatggcagccgaggagcacactctgcaggacactggacaagacagtaaatattcaacttttaatgctgattaaaggagtataggtaaagaatacgtaggtatacataattggtgagacaaatattcactttatttatattttatatattatttttttaatttggtaaatactatccagttttgtagttgtccttgttgatttgtgtgatattaaagtattagtaataattgccaggaaactatcattagggagggtttagttggttgctgtttggactgggagggatgatttaaatttagtgctagaaaccaattttagtgactgcacagtttatcatttgtcagacagaaggtagctataaagctaccctgtaagtcatatcaaaaaagttcagaggaagattagtaaatatttatcaataaaaataaacattttgtttttctaatatcttaacatatcctcccctttaggaggaagaacgtgcaaaacgtgaggagctagagcgaatactggaagagaataaccgaaaaattgcagaagcacaagccaaactggccgaagaacagttgagaattgttgaagaacaaagaaagattcatgaggaaaggatgaaactagaacaagaacgacaacgtcaacaaaaagaagaacaaaaaattatcctgggcaaggggaagtccaggccaaaactgtccttctcattaaaaacccaggattaaattgcaaactctgaactttttacaaagaaaaatggaaaaactttgtatggtagcttcatgttgaagtggttttttgtttttgtttttgtttttttaatttgtaaaatctggaaagttagcttgttctaataggggctatgctctgcaattcccttttttttttttttttccttccactaagtcaaatccttatcagatcattgttgtattctaaggagtgacgtatttttcacctgtttggattctatattagtggtctgaggaagagcagatcacattgtaaaactatggatggtctgataaggcttttactgaccccactgacttcagagttatactctgtttgctacatcataatgctggttttgctgactttttgtttttttatatatttataaaaaaagaaaaagttggtgattgcattgggaaattcccagggtattactggacctatgtggtgtattgttaaaccagtgtccttgtgatactgttgctcttgatgttcctgatacaggtaaggaaacagttggtcaactctgatacaaagtatatatacagttcagtattgtctctgttcattttgtttttatttcattgacaaaatcaaaccagcattccccattgtgtaaataaatgattttgctgaataaagtaaagtcttaaattcaatatgttgaagcaattttttttaatgttatgttaagtcttaaagagggtggttcactttttgatggtcaaccatttagaagtcttagaactatatttcctcttgtttatacttttaacatagggtttatatgtacattaaatatacttgtgaattagtatttaatggctatttttacaaatatcaactttatgctgatagagcaaatggcatcagtgttacctttaagaaagactaacaacatccagaagatttaaattctcaaacctgtgcctctgttttaggatataagtattatcacaaagtatacttaataaaggctagaaaaatgcttttaaattatggaatctgagatcgttttcagagtgggccatcagaaagaacttagctttatactgtcaaaaaaaggctaagatggtcgagtcattttcattgtgtagtgtacttgcacgtttatttttaggacaaacacatttgaactttatgaatttttttttttttttgcatgtgaaatcttatgaatggctttcattttatacactagaatctgcctcatttactcttaacatatgtttaagtatactggtattaaaacattcaagaaaaggatattgatctaaaatgctacctgagatgcataaacatgtcatcaagtagagaaaatatttttatttttgcccaatattttttagacagtttgattattcttaaaaattgaaaacataagctaaagagatgactaaatggtagattattttgtgtgtgcatgctaggaaaaatgctgttgctttagttttgagctcttcaatgagtctaattgtggtaaggaacaatataaaatcagtttaaagatctttaaaggtagaattttaaataggcatgaaatatagtgagaacttttagtaaacatactacttactctaaaatcaaacattttattttcctaaagaatataggttgccaaaaaatattttatctctaaatataggttagctgtaattatttcatgaatttttttttttttcaatgtaactttttttggtgaagattcatggttcctaagttctgtattcaagtttttgggaaatgtttatttaaaaactgttctatacaagtgttcaaaacattgtatctaaagagagtagcctggacttaaaatatttgaaatcagcttatgcgtgccttttaattttttttttaagtttcttactgccacatatggtgtgaagtgacagtaagttgcttaatgacatcctgcagtatctgcttgcttttggagactccagtgagatgttgaaattgttcctgtgcttggtaactactttcctctgccaggctatgggaaagaggatgtaattgtgaataatatacaccatccagtctttaatgtgctgcaacaatgtagtaatttgtttttttcatttgttcccactgcctttgtgtacatagaaaacttaaaaatttcccccagtctattagaagttaagatgttccctaatttattaaatatgcctttattcacaatttgtttttttaggttattcttaatgcattatagaattaagtatgactttgtttatttttattacagtatgtagttattgacatattgtggtttgcagaattatcaattgtataaactaaacctttaaatta

SEQ ID NO: 326825 - DNA, 1322 bp, Homo sapiens
tgactccttagcagcggagcagcccacggcctgcctgtactgcctgttacatgggccctctggtttgatgtcatcagtggaaatagaagcagggaactgacattctgatttggcatttgcttcgacagcaagaaatagaagaaaaactcatcgaggaagaaacagcacgaagagtagaagaattggtagcaaaaagggtggaggaagaactggagaaaaggaaggatgaaattgaacgagaagttctccgaagggtggaggaagccaaacgcatcatggaaaagcagttgctcgaagaactcgagcgacagagacaagctgagcttgccgcacaaaaagctagagagaggaagctggcgcgtatggcagccgaggagcacactctgcaggacactggacaagacagaggaagaacgtgcaaaacgtgaggagctagagcgaatactggaagagaataaccgaaaaattgcagaagcacaagccaaactggccgaagaacagttgagaattgttgaagaacaaagaaagattcatgaggaaaggatgaaactagaacaagaacgacaacgtcaacaaaaagaagaacaaaaaattatcctgggcaaggggaagtccaggccaaaactgtccttctcattaaaaacccaggattaaattgcaaactctgaactttttacaaagaaaaatggaaaaactttgtatggtagcttcatgttgaagtggttttttgtttttgtttttgtttttttaatttgtaaaatctggaaagttagcttgttctaataggggctatgctctgcaattcccttttttttttttttttccttccactaagtcaaatccttatcagatcattgttgtattctaaggagtgacgtatttttcacctgtttggattctatattagtggtctgaggaagagcagatcacattgtaaaactatggatggtctgataaggcttttactgaccccactgacttcagagttatactctgtttgctacatcataatgctggttttgctgactttttgtttttttatatatttataaaaaaagaaaaagttggtgattgcattgggaaattcccagggtattactggacctatgtggtgtattgttaaaccagtgtccttgtgatactgttgctcttgatgttcctgatacaggtaaggaaacagttggtcaactctgatacaaagtatatatacagttcagtattgtctctgttcattttgtttttatttcattgacaaaatcaaaccagcattccccattgtgtaaataaatgattttgctgaataaagtaaagtcttaaattca

SEQ ID NO: 326826 - DNA, 2022 bp, Homo sapiens
ttgcatatcaacattattgtcaaggtagaaagacaaagcatatttacttaaccatttgtagcctatttataatgttaatatttagacacatagtatgtaggctttcatttgtcttgccctgagtcctaaaaatgttagagggtagatccagccaggtattttctttttttttctttttttctttgatttgtgtaaactgatttcctgatacaggtaaggaaacagttggtcaactctgatacaaagtatatatacagttcagtattgtctctgttcattttgtttttatttcattgacaaaatcaaaccagcattccccattgtgtaaataaatgattttgctgaataaagtaaagtcttaaattcaatatgttgaagcaattttttttaatgttatgttaagtcttaaagagggtggttcactttttgatggtcaaccatttagaagtcttagaactatatttcctcttgtttatacttttaacatagggtttatatgtacattaaatatacttgtgaattagtatttaatggctatttttacaaatatcaactttatgctgatagagcaaatggcatcagtgttacctttaagaaagactaacaacatccagaagatttaaattctcaaacctgtgcctctgttttaggatataagtattatcacaaagtatacttaataaaggctagaaaaatgcttttaaattatggaatctgagatcgttttcagagtgggccatcagaaagaacttagctttatactgtcaaaaaaaggctaagatggtcgagtcattttcattgtgtagtgtacttgcacgtttatttttaggacaaacacatttgaactttatgaatttttttttttttttgcatgtgaaatcttatgaatggctttcattttatacactagaatctgcctcatttactcttaacatatgtttaagtatactggtattaaaacattcaagaaaaggatattgatctaaaatgctacctgagatgcataaacatgtcatcaagtagagaaaatatttttatttttgcccaatattttttagacagtttgattattcttaaaaattgaaaacataagctaaagagatgactaaatggtagattattttgtgtgtgcatgctaggaaaaatgctgttgctttagttttgagctcttcaatgagtctaattgtggtaaggaacaatataaaatcagtttaaagatctttaaaggtagaattttaaataggcatgaaatatagtgagaacttttagtaaacatactacttactctaaaatcaaacattttattttcctaaagaatataggttgccaaaaaatattttatctctaaatataggttagctgtaattatttcatgaatttttttttttttcaatgtaactttttttggtgaagattcatggttcctaagttctgtattcaagtttttgggaaatgtttatttaaaaactgttctatacaagtgttcaaaacattgtatctaaagagagtagcctggacttaaaatatttgaaatcagcttatgcgtgccttttaattttttttttaagtttcttactgccacatatggtgtgaagtgacagtaagttgcttaatgacatcctgcagtatctgcttgcttttggagactccagtgagatgttgaaattgttcctgtgcttggtaactactttcctctgccaggctatgggaaagaggatgtaattgtgaataatatacaccatccagtctttaatgtgctgcaacaatgtagtaatttgtttttttcatttgttcccactgcctttgtgtacatagaaaacttaaaaatttcccccagtctattagaagttaagatgttccctaatttattaaatatgcctttattcacaatttgtttttttaggttattcttaatgcattatagaattaagtatgactttgtttatttttattacagtatgtagttattgacatattgtggtttgcagaattatcaattgtataaactaaacctttaaatta

SEQ ID NO: 326827 - DNA, 1015 bp, Homo sapiens
agggcattgtgggaagggcggccggtgcagccgcagctgccatcttaggggcgcctggcgctacgggtttctcgttggaggcggccttcgtggcagctgtagacgccgggaaaaggcataaagtccgttggccgacacctttctttcctccggcctcggtagaaccgccagcccgcgtccgaaggcggaggcgaggggaactggccgcgtgaggggcctgaggcgagcggttagagcgtctcccggaaggatgggccggtctcggagccggagctcgtcccgctccaagcacaccaagagcagcaagcacaacaagaagcgcagccggtcccggtcgcgatcccgggacaaggagcgcgtgcggaagcgttccaaatctcgggaaagtaaacggaaccggcggcgggagtcgcggtcccgttcgcgctccaccaacacggccgtgtcccggcgcgagcgggaccgggagcgcgcctcgtccccgcccgaccgcatcgacatcttcgggcgcacggtgagcaagcgcagcagcctggacgagaagcagaagcgagaggaggaggagaagaaagcggagttcgagcggcagcgaaaaattcgacagcaagaaatagaagaaaaactcatcgaggaagaaacagcacgaagagtagaagaattggtagcaaaaagggtggaggaagaactggagaaaaggaaggatgaaattgaacgagaagttctccgaagggtggaggaagccaaacgcatcatggaaaagcagttgctcgaagaactcgagcgacagagacaagctgagcttgccgcacaaaaagctagagagaggaagctggcgcgtatggcagccgaggagcacactctgcaggacactggacaagacaaggaagaacgtgcaaaacgtgaggaagttaaggacaaagaatgggtcatgtcacaagcaaatgtgtcgagagcaaaggcagtccgagccctgaagaacaacagtaatgatatggtaaatgcgattagggttaga

SEQ ID NO: 326828 - DNA, 1740 bp, Homo sapiens
agggcattgtgggaagggcggccggtgcagccgcagctgccatcttaggggcgcctggcgctacgggtttctcgttggaggcggccttcgtggcagctgtagacgccgggaaaaggcataaagtccgttggccgacacctttctttcctccggcctcggtagaaccgccagcccgcgtccgaaggcggaggcgaggggaactggccgcgtgaggggcctgaggcgagcggttagagcgtctcccggaaggatgggccggtctcggagccggagctcgtcccgctccaagcacaccaagagcagcaagcacaacaagaagcgcagccggtcccggtcgcgatcccgggacaaggagcgcgtgcggaagcgttccaaatctcgggaaagtaaacggaaccggcggcgggagtcgcggtcccgttcgcgctccaccaacacggccgtgtcccggcgcgagcgggaccgggagcgcgcctcgtccccgcccgaccgcatcgacatcttcgggcgcacggtgagcaagcgcagcagcctggacgagaagcagaagcgagaggaggaggagaagaaagcggagttcgagcggcagcgaaaaattcgacagcaagaaatagaagaaaaactcatcgaggaagaaacagcacgaagagtagaagaattggtagcaaaaagggtggaggaagaactggagaaaaggaaggatgaaattgaacgagaagttctccgaagggtggaggaagccaaacgcatcatggaaaagcagttgctcgaagaactcgagcgacagagacaagctgagcttgccgcacaaaaagctagagaggaggaagaacgtgcaaaacgtgaggagctagagcgaatactggaagagaataaccgaaaaattgcagaagcacaagccaaactggccgaagaacagttgagaattgttgaagaacaaagaaagattcatgaggaaaggatgaaactagaacaagaacgacaacgtcaacaaaaagaagaacaaaaaattatcctgggcaaggggaagtccaggccaaaactgtccttctcattaaaaacccaggattaaattgcaaactctgaactttttacaaagaaaaatggaaaaactttgtatggtagcttcatgttgaagtggttttttgtttttgtttttgtttttttaatttgtaaaatctggaaagttagcttgttctaataggggctatgctctgcaattcccttttttttttttttttccttccactaagtcaaatccttatcagatcattgttgtattctaaggagtgacgtatttttcacctgtttggattctatattagtggtctgaggaagagcagatcacattgtaaaactatggatggtctgataaggcttttactgaccccactgacttcagagttatactctgtttgctacatcataatgctggttttgctgactttttgtttttttatatatttataaaaaaagaaaaagttggtgattgcattgggaaattcccagggtattactggacctatgtggtgtattgttaaaccagtgtccttgtgatactgttgctcttgatgttcctgatacaggtaaggaaacagttggtcaactctgatacaaagtatatatacagttcagtattgtctctgttcattttgtttttatttcattgacaaaatcaaaccagcattccccattgtgtaaataaatgattttgctgaataaagtaaagtcttaaattca

SEQ ID NO: 326829 - DNA, 4040 bp, Homo sapiens
agggcattgtgggaagggcggccggtgcagccgcagctgccatcttaggggcgcctggcgctacgggtttctcgttggaggcggccttcgtggcagctgtagacgccgggaaaaggcataaagtccgttggccgacacctttctttcctccggcctcggtagaaccgccagcccgcgtccgaaggcggaggcgaggggaactggccgcgtgaggggcctgaggcgagcggttagagcgtctcccggaaggatgggccggtctcggagccggagctcgtcccgctccaagcacaccaagagcagcaagcacaacaagaagcgcagccggtcccggtcgcgatcccgggacaaggagcgcgtgcggaagcgttccaaatctcgggaaagtaaacggaaccggcggcgggagtcgcggtcccgttcgcgctccaccaacacggccgtgtcccggcgcgagcgggaccgggagcgcgcctcgtccccgcccgaccgcatcgacatcttcgggcgcacggtgagcaagcgcagcagcctggacgagaagcagaagcgagaggaggaggagaagaaagcggagttcgagcggcagcgaaaaattcgacagcaagaaatagaagaaaaactcatcgaggaagaaacagcacgaagagtagaagaattggtagcaaaaagggtggaggaagaactggagaaaaggaaggatgaaattgaacgagaagttctccgaagggtggaggaagccaaacgcatcatggaaaagcagttgctcgaagaactcgagcgacagagacaagctgagcttgccgcacaaaaagctagagaggtaacgctcggtcgtttggaaagtagagacagtccatggcaaaactttcagtgttgggttctgcctcctgctcagttcagaaagagatggaatacagactatctaattcctttctcgtctaaacttaacattgctgcgaaagttaattttttagcctattcagaagtgctgactgataacttaaaagttggaagcttttataaaacatattcaaggatactttttgatttaatggaactggctatttgagaagtgtttgaaacttttgccatggctgcaggacttacattcttttttgggaggacggtggggagacagggagtggtaaagggaaaaggttaaaaatccacctgtggttgtatattcttctattctgtcactctgttacctagactgtgagaggcttttgccttcagtcagattaaaaagagcagggcctaacattgagtgatagcacctgctttgataaataggttttctcactcttctttttttccttcttttatccctcactccctcccctaaaccctgcttcagcacaatggactaattctagcattctgatcataaggccctccattttcctaatgtgtttcaaggaatctttttaggaaaaatatccagattattcatccactttttttagtatctactaacaactcctttttttctctagagagttatgaaggaacaggttgtccttgtctggagtcaagctaaacacatgatttgttttatcagcagctggagcagaagttgaaaatgtctttctgtgagacagtaatttgctactgaagctttatggcttgtttgcactgattactccaggatccaaaaacttggtgaaagtcactgaaacactcaaggcaaattactttacagccctgagtgtctgtcaccatagtttgcataatgaatatgaatcccattggtgtgtgatgtaggaaatcctgtagttgtattttcttgaactgaaatatttgactcaaaataattaagactcattgtcatttttcatcttggcattattgtggacaagttgacatattaaatctctttgctttctggtaagcttagcttttaaaatgcattttcccttgtcctgtctttaactagatatacatgcttatatttatagtgggtttcacagactataaaattgaatgtatgaaatttttatttatatcagtgcttttaataatgaagatatttttggagtaatggtgctgtcttgtagcgagttattaatcatagtaagatttttttctcttcatttgctttttttgtttcatattaacaattttttttttacacggacacaaccctctgacagtctttccaaatattaaaatcatttgaatatgtatgctgtgatctgaacactgctcaagccatcaagcagtcttcatacagtttgcattataaaatctcattaaattctccaagaaaaaataagttgaagaattttatttcctgaccatgcatcccctggatttctgagtttcagttcagattgtagatgacaatataagctgccttccgaaattgtcaacatctgaatgttaagtccattttccccatggaagaagcccgtagttccatgaagtatggattaccatttgtatttttcactaacagtaaatgtatttttcttattaattgtttgccttaggaatgatgaattacattttttgttccttcttaccataaacatctgcattcctcagctcagccttccttgtatgttgtttctttataaatggttgagctgctgatgcaggtattgccaagctaacagtacaaatcattttaaagaggaagctggcgcgtatggcagccgaggagcacactctgcaggacactggacaagacagtaaatattcaacttttaatgctgattaaaggagtataggtaaagaatacgtaggtatacataattggtgagacaaatattcactttatttatattttatatattatttttttaatttggtaaatactatccagttttgtagttgtccttgttgatttgtgtgatattaaagtattagtaataattgccaggaaactatcattagggagggtttagttggttgctgtttggactgggagggatgatttaaatttagtgctagaaaccaattttagtgactgcacagtttatcatttgtcagacagaaggtagctataaagctaccctgtaagtcatatcaaaaaagttcagaggaagattagtaaatatttatcaataaaaataaacattttgtttttctaatatcttaacatatcctcccctttaggaggaagaacgtgcaaaacgtgaggagctagagcgaatactggaagagaataaccgaaaaattgcagaagcacaagccaaactggccgaagaacagttgagaattgttgaagaacaaagaaagattcatgaggaaaggatgaaactagaacaagaacgacaacgtcaacaaaaagaagaacaaaaaattatcctgggcaaggggaagtccaggccaaaactgtccttctcattaaaaacccaggattaaattgcaaactctgaactttttacaaagaaaaatggaaaaactttgtatggtagcttcatgttgaagtggttttttgtttttgtttttgtttttttaatttgtaaaatctggaaagttagcttgttctaataggggctatgctctgcaattcccttttttttttttttttccttccactaagtcaaatccttatcagatcattgttgtattctaaggagtgacgtatttttcacctgtttggattctatattagtggtctgaggaagagcagatcacattgtaaaactatggatggtctgataaggcttttactgaccccactgacttcagagttatactctgtttgctacatcataatgctggttttgctgactttttgtttttttatatatttataaaaaaagaaaaagttggtgattgcattgggaaattcccagggtattactggacctatgtggtgtattgttaaaccagtgtccttgtgatactgttgctcttgatgttcctgatacaggtaaggaaacagttggtcaactctgatacaaagtatatatacagttcagtattgtctctgttcattttgtttttatttcattgacaaaatcaaaccagcattccccattgtgtaaataaatgattttgctgaataaagtaaagtcttaaattca

SEQ ID NO: 326830 - DNA, 3986 bp, Homo sapiens
agggcattgtgggaagggcggccggtgcagccgcagctgccatcttaggggcgcctggcgctacgggtttctcgttggaggcggccttcgtggcagctgtagacgccgggacgccagcccgcgtccgaaggcggaggcgaggggaactggccgcgtgaggggcctgaggcgagcggttagagcgtctcccggaaggatgggccggtctcggagccggagctcgtcccgctccaagcacaccaagagcagcaagcacaacaagaagcgcagccggtcccggtcgcgatcccgggacaaggagcgcgtgcggaagcgttccaaatctcgggaaagtaaacggaaccggcggcgggagtcgcggtcccgttcgcgctccaccaacacggccgtgtcccggcgcgagcgggaccgggagcgcgcctcgtccccgcccgaccgcatcgacatcttcgggcgcacggtgagcaagcgcagcagcctggacgagaagcagaagcgagaggaggaggagaagaaagcggagttcgagcggcagcgaaaaattcgacagcaagaaatagaagaaaaactcatcgaggaagaaacagcacgaagagtagaagaattggtagcaaaaagggtggaggaagaactggagaaaaggaaggatgaaattgaacgagaagttctccgaagggtggaggaagccaaacgcatcatggaaaagcagttgctcgaagaactcgagcgacagagacaagctgagcttgccgcacaaaaagctagagaggtaacgctcggtcgtttggaaagtagagacagtccatggcaaaactttcagtgttgggttctgcctcctgctcagttcagaaagagatggaatacagactatctaattcctttctcgtctaaacttaacattgctgcgaaagttaattttttagcctattcagaagtgctgactgataacttaaaagttggaagcttttataaaacatattcaaggatactttttgatttaatggaactggctatttgagaagtgtttgaaacttttgccatggctgcaggacttacattcttttttgggaggacggtggggagacagggagtggtaaagggaaaaggttaaaaatccacctgtggttgtatattcttctattctgtcactctgttacctagactgtgagaggcttttgccttcagtcagattaaaaagagcagggcctaacattgagtgatagcacctgctttgataaataggttttctcactcttctttttttccttcttttatccctcactccctcccctaaaccctgcttcagcacaatggactaattctagcattctgatcataaggccctccattttcctaatgtgtttcaaggaatctttttaggaaaaatatccagattattcatccactttttttagtatctactaacaactcctttttttctctagagagttatgaaggaacaggttgtccttgtctggagtcaagctaaacacatgatttgttttatcagcagctggagcagaagttgaaaatgtctttctgtgagacagtaatttgctactgaagctttatggcttgtttgcactgattactccaggatccaaaaacttggtgaaagtcactgaaacactcaaggcaaattactttacagccctgagtgtctgtcaccatagtttgcataatgaatatgaatcccattggtgtgtgatgtaggaaatcctgtagttgtattttcttgaactgaaatatttgactcaaaataattaagactcattgtcatttttcatcttggcattattgtggacaagttgacatattaaatctctttgctttctggtaagcttagcttttaaaatgcattttcccttgtcctgtctttaactagatatacatgcttatatttatagtgggtttcacagactataaaattgaatgtatgaaatttttatttatatcagtgcttttaataatgaagatatttttggagtaatggtgctgtcttgtagcgagttattaatcatagtaagatttttttctcttcatttgctttttttgtttcatattaacaattttttttttacacggacacaaccctctgacagtctttccaaatattaaaatcatttgaatatgtatgctgtgatctgaacactgctcaagccatcaagcagtcttcatacagtttgcattataaaatctcattaaattctccaagaaaaaataagttgaagaattttatttcctgaccatgcatcccctggatttctgagtttcagttcagattgtagatgacaatataagctgccttccgaaattgtcaacatctgaatgttaagtccattttccccatggaagaagcccgtagttccatgaagtatggattaccatttgtatttttcactaacagtaaatgtatttttcttattaattgtttgccttaggaatgatgaattacattttttgttccttcttaccataaacatctgcattcctcagctcagccttccttgtatgttgtttctttataaatggttgagctgctgatgcaggtattgccaagctaacagtacaaatcattttaaagaggaagctggcgcgtatggcagccgaggagcacactctgcaggacactggacaagacagtaaatattcaacttttaatgctgattaaaggagtataggtaaagaatacgtaggtatacataattggtgagacaaatattcactttatttatattttatatattatttttttaatttggtaaatactatccagttttgtagttgtccttgttgatttgtgtgatattaaagtattagtaataattgccaggaaactatcattagggagggtttagttggttgctgtttggactgggagggatgatttaaatttagtgctagaaaccaattttagtgactgcacagtttatcatttgtcagacagaaggtagctataaagctaccctgtaagtcatatcaaaaaagttcagaggaagattagtaaatatttatcaataaaaataaacattttgtttttctaatatcttaacatatcctcccctttaggaggaagaacgtgcaaaacgtgaggagctagagcgaatactggaagagaataaccgaaaaattgcagaagcacaagccaaactggccgaagaacagttgagaattgttgaagaacaaagaaagattcatgaggaaaggatgaaactagaacaagaacgacaacgtcaacaaaaagaagaacaaaaaattatcctgggcaaggggaagtccaggccaaaactgtccttctcattaaaaacccaggattaaattgcaaactctgaactttttacaaagaaaaatggaaaaactttgtatggtagcttcatgttgaagtggttttttgtttttgtttttgtttttttaatttgtaaaatctggaaagttagcttgttctaataggggctatgctctgcaattcccttttttttttttttttccttccactaagtcaaatccttatcagatcattgttgtattctaaggagtgacgtatttttcacctgtttggattctatattagtggtctgaggaagagcagatcacattgtaaaactatggatggtctgataaggcttttactgaccccactgacttcagagttatactctgtttgctacatcataatgctggttttgctgactttttgtttttttatatatttataaaaaaagaaaaagttggtgattgcattgggaaattcccagggtattactggacctatgtggtgtattgttaaaccagtgtccttgtgatactgttgctcttgatgttcctgatacaggtaaggaaacagttggtcaactctgatacaaagtatatatacagttcagtattgtctctgttcattttgtttttatttcattgacaaaatcaaaccagcattccccattgtgtaaataaatgattttgctgaataaagtaaagtcttaaattca

SEQ ID NO: 326831 - DNA, 4262 bp, Homo sapiens
agggcattgtgggaagggcggccggtgcagccgcagctgccatcttaggggcgcctggcgctacgggtttctcgttggaggcggccttcgtggcagctgtagacgccgggaaaaggcataaagtccgttggccgacacctttctttcctccggcctcggtagaaccgccagcccgcgtccgaaggcggaggcgaggggaactggccgcgtgaggggcctgaggcgagcggttagagcgtctcccggaaggatgggccggtctcggagccggagctcgtcccgctccaagcacaccaagagcagcaagcacaacaagaagcgcagccggtcccggtcgcgatcccgggacaaggagcgcgtgcggaagcgttccaaatctcgggaaagtaaacggaaccggcggcgggagtcgcggtcccgttcgcgctccaccaacacggccgtgtcccggcgcgagcgggaccgggagcgcgcctcgtccccgcccgaccgcatcgacatcttcgggcgcacggtgagcaagcgcagcagcctggacgagaagcagaagcgagaggaggaggagaagaaagcggagttcgagcggcagcgaaaaattcgacagcaagaaatagaagaaaaactcatcgaggaagaaacagcacgaagagtagaagaattggtagcaaaaagggtggaggaagaactggagaaaaggaaggatgaaattgaacgagaagttctccgaagggtggaggaagccaaacgcatcatggaaaagcagttgctcgaagaactcgagcgacagagacaagctgagcttgccgcacaaaaagctagagaggtaacgctcggtcgtttggaaagtagagacagtccatggcaaaactttcagtgttgggttctgcctcctgctcagttcagaaagagatggaatacagactatctaattcctttctcgtctaaacttaacattgctgcgaaagttaattttttagcctattcagaagtgctgactgataacttaaaagttggaagcttttataaaacatattcaaggatactttttgatttaatggaactggctatttgagaagtgtttgaaacttttgccatggctgcaggacttacattcttttttgggaggacggtggggagacagggagtggtaaagggaaaaggttaaaaatccacctgtggttgtatattcttctattctgtcactctgttacctagactgtgagaggcttttgccttcagtcagattaaaaagagcagggcctaacattgagtgatagcacctgctttgataaataggttttctcactcttctttttttccttcttttatccctcactccctcccctaaaccctgcttcagcacaatggactaattctagcattctgatcataaggccctccattttcctaatgtgtttcaaggaatctttttaggaaaaatatccagattattcatccactttttttagtatctactaacaactcctttttttctctagagagttatgaaggaacaggttgtccttgtctggagtcaagctaaacacatgatttgttttatcagcagctggagcagaagttgaaaatgtctttctgtgagacagtaatttgctactgaagctttatggcttgtttgcactgattactccaggatccaaaaacttggtgaaagtcactgaaacactcaaggcaaattactttacagccctgagtgtctgtcaccatagtttgcataatgaatatgaatcccattggtgtgtgatgtaggaaatcctgtagttgtattttcttgaactgaaatatttgactcaaaataattaagactcattgtcatttttcatcttggcattattgtggacaagttgacatattaaatctctttgctttctggtaagcttagcttttaaaatgcattttcccttgtcctgtctttaactagatatacatgcttatatttatagtgggtttcacagactataaaattgaatgtatgaaatttttatttatatcagtgcttttaataatgaagatatttttggagtaatggtgctgtcttgtagcgagttattaatcatagtaagatttttttctcttcatttgctttttttgtttcatattaacaattttttttttacacggacacaaccctctgacagtctttccaaatattaaaatcatttgaatatgtatgctgtgatctgaacactgctcaagccatcaagcagtcttcatacagtttgcattataaaatctcattaaattctccaagaaaaaataagttgaagaattttatttcctgaccatgcatcccctggatttctgagtttcagttcagattgtagatgacaatataagctgccttccgaaattgtcaacatctgaatgttaagtccattttccccatggaagaagcccgtagttccatgaagtatggattaccatttgtatttttcactaacagtaaatgtatttttcttattaattgtttgccttaggaatgatgaattacattttttgttccttcttaccataaacatctgcattcctcagctcagccttccttgtatgttgtttctttataaatggttgagctgctgatgcaggtattgccaagctaacagtacaaatcattttaaagaggaagctggcgcgtatggcagccgaggagcacactctgcaggacactggacaagacagtaaatattcaacttttaatgctgattaaaggagtataggtaaagaatacgtaggtatacataattggtgagacaaatattcactttatttatattttatatattatttttttaatttggtaaatactatccagttttgtagttgtccttgttgatttgtgtgatattaaagtattagtaataattgccaggaaactatcattagggagggtttagttggttgctgtttggactgggagggatgatttaaatttagtgctagaaaccaattttagtgactgcacagtttatcatttgtcagacagaaggtagctataaagctaccctgtaagtcatatcaaaaaagttcagaggaagattagtaaatatttatcaataaaaataaacattttgtttttctaatatcttaacatatcctcccctttaggaggaagaacgtgcaaaacgtgaggagctagagcgaatactggaagagaataaccgaaaaattgcagaagcacaagccaaactggccgaagaacagttgagaattgttgaagaacaaagaaagattcatgaggaaaggatgaaactagaacaagaacgacaacgtcaacaaaaagaagaacaaaaaattatcctgggcaaggggaagtccaggccaaaactgtccttctcattaaaaacccaggattaaattgcaaactctgaactttttacaaagaaaaatggaaaaactttgtatggtagcttcatgttgaagtggttttttgtttttgtttttgtttttttaatttgtaaaatctggaaagttagcttgttctaataggggctatgctctgcaattcccttttttttttttttttccttccactaagtcaaatccttatcagatcattgttgtattctaaggagtgacgtatttttcacctgtttggattctatattagtggtctgaggaagagcagatcacattgtaaaactatggatggtctgataaggcttttactgaccccactgacttcagagttatactctgtttgctacatcataatgctggttttgctgactttttgtttttttatatatttataaaaaaagaaaaagttggtgattgcattgggaaattcccagggtattactggacctatgtggtgtattgttaaaccagtgtccttgtgatactgttgctcttgatgttcctgatacaggtaaggaaacagttggtcaactctgatacaaagtatatatacagttcagtattgtctctgttcattttgtttttatttcattgacaaaatcaaaccagcattccccattgtgtaaataaatgattttgctgaataaagtaaagtcttaaattcaaaaaaaaaaaaaaaaaaaaaaaaaaaaaaaaaaaaaaaaaaaaaaaaaaaaaaaaaaaaaaaaaaaaaaaaaaaaaaaaaacttaagggacccgggatccaaaaagcttgatattgaaattctcgccccggggaaaataatccagggcttggggcccccctttagggctttttcccaaaaggtaattttggatgccctaattaacctaagggtctcatggct

SEQ ID NO: 326832 - DNA, 4162 bp, Homo sapiens
agggcattgtgggaagggcggccggtgcagccgcagctgccatcttaggggcgcctggcgctacgggtttctcgttggaggcggccttcgtggcagctgtagacgccgggaaaaggcataaagtccgttggccgacacctttctttcctccggcctcggtagaaccgccagcccgcgtccgaaggcggaggcgaggggaactggccgcgtgaggggcctgaggcgagcggttagagcgtctcccggaaggatgggccggtctcggagccggagctcgtcccgctccaagcacaccaagagcagcaagcacaacaagaagcgcagccggtcccggtcgcgatcccgggacaaggagcgcgtgcggaagcgttccaaatctcgggaaagtaaacggaaccggcggcgggagtcgcggtcccgttcgcgctccaccaacacggccgtgtcccggcgcgagcgggaccgggagcgcgcctcgtccccgcccgaccgcatcgacatcttcgggcgcacggtgagcaagcgcagcagcctggacgagaagcagaagcgagaggaggaggagaagaaagcggagttcgagcggcagcgaaaaattcgacagcaagaaatagaagaaaaactcatcgaggaagaaacagcacgaagagtagaagaattggtagcaaaaagggtggaggaagaactggagaaaaggaaggatgaaattgaacgagaagttctccgaagggtggaggaagccaaacgcatcatggaaaagcagttgctcgaagaactcgagcgacagagacaagctgagcttgccgcacaaaaagctagagaggtaacgctcggtcgtttggaaagtagagacagtccatggcaaaactttcagtgttgggttctgcctcctgctcagttcagaaagagatggaatacagactatctaattcctttctcgtctaaacttaacattgctgcgaaagttaattttttagcctattcagaagtgctgactgataacttaaaagttggaagcttttataaaacatattcaaggatactttttgatttaatggaactggctatttgagaagtgtttgaaacttttgccatggctgcaggacttacattcttttttgggaggacggtggggagacagggagtggtaaagggaaaaggttaaaaatccacctgtggttgtatattcttctattctgtcactctgttacctagactgtgagaggcttttgccttcagtcagattaaaaagagcagggcctaacattgagtgatagcacctgctttgataaataggttttctcactcttctttttttccttcttttatccctcactccctcccctaaaccctgcttcagcacaatggactaattctagcattctgatcataaggccctccattttcctaatgtgtttcaaggaatctttttaggaaaaatatccagattattcatccactttttttagtatctactaacaactcctttttttctctagagagttatgaaggaacaggttgtccttgtctggagtcaagctaaacacatgatttgttttatcagcagctggagcagaagttgaaaatgtctttctgtgagacagtaatttgctactgaagctttatggcttgtttgcactgattactccaggatccaaaaacttggtgaaagtcactgaaacactcaaggcaaattactttacagccctgagtgtctgtcaccatagtttgcataatgaatatgaatcccattggtgtgtgatgtaggaaatcctgtagttgtattttcttgaactgaaatatttgactcaaaataattaagactcattgtcatttttcatcttggcattattgtggacaagttgacatattaaatctctttgctttctggtaagcttagcttttaaaatgcattttcccttgtcctgtctttaactagatatacatgcttatatttatagtgggtttcacagactataaaattgaatgtatgaaatttttatttatatcagtgcttttaataatgaagatatttttggagtaatggtgctgtcttgtagcgagttattaatcatagtaagatttttttctcttcatttgctttttttgtttcatattaacaattttttttttacacggacacaaccctctgacagtctttccaaatattaaaatcatttgaatatgtatgctgtgatctgaacactgctcaagccatcaagcagtcttcatacagtttgcattataaaatctcattaaattctccaagaaaaaataagttgaagaattttatttcctgaccatgcatcccctggatttctgagtttcagttcagattgtagatgacaatataagctgccttccgaaattgtcaacatctgaatgttaagtccattttccccatggaagaagcccgtagttccatgaagtatggattaccatttgtatttttcactaacagtaaatgtatttttcttattaattgtttgccttaggaatgatgaattacattttttgttccttcttaccataaacatctgcattcctcagctcagccttccttgtatgttgtttctttataaatggttgagctgctgatgcaggtattgccaagctaacagtacaaatcattttaaagaggaagctggcgcgtatggcagccgaggagcacactctgcaggacactggacaagacagtaaatattcaacttttaatgctgattaaaggagtataggtaaagaatacgtaggtatacataattggtgagacaaatattcactttatttatattttatatattatttttttaatttggtaaatactatccagttttgtagttgtccttgttgatttgtgtgatattaaagtattagtaataattgccaggaaactatcattagggagggtttagttggttgctgtttggactgggagggatgatttaaatttagtgctagaaaccaattttagtgactgcacagtttatcatttgtcagacagaaggtagctataaagctaccctgtaagtcatatcaaaaaagttcagaggaagattagtaaatatttatcaataaaaataaacattttgtttttctaatatcttaacatatcctcccctttaggaggaagaacgtgcaaaacgtgaggagctagagcgaatactggaagagaataaccgaaaaattgcagaagcacaagccaaactggccgaagaacagttgagaattgttgaagaacaaagaaagattcatgaggaaaggatgaaactagaacaagaacgacaacgtcaacaaaaagaagaacaaaaaattatcctgggcaaggggaagtccaggccaaaactgtccttctcattaaaaacccaggattaaattgcaaactctgaactttttacaaagaaaaatggaaaaactttgtatggtagcttcatgttgaagtggttttttgtttttgtttttgtttttttaatttgtaaaatctggaaagttagcttgttctaataggggctatgctctgcaattcccttttttttttttttttccttccactaagtcaaatccttatcagatcattgttgtattctaaggagtgacgtatttttcacctgtttggattctatattagtggtctgaggaagagcagatcacattgtaaaactatggatggtctgataaggcttttactgaccccactgacttcagagttatactctgtttgctacatcataatgctggttttgctgactttttgtttttttatatatttataaaaaaagaaaaagttggtgattgcattgggaaattcccagggtattactggacctatgtggtgtattgttaaaccagtgtccttgtgatactgttgctcttgatgttcctgatacaggtaaggaaacagttggtcaactctgatacaaagtatatatacagttcagtattgtctctgttcattttgtttttatttcattgacaaaatcaaaccagcattccccattgtgtaaataaatgattttgctgaataaagtaaagtcttaaattcaccaatcaacaatactgccatcaacgacaaaaaaactcgagggggggccccgtacccaattcgccctattagggaggcggattacaaattcattggccggcgttttacaacgtggggaatggg

SEQ ID NO: 326833 - DNA, 2985 bp, Homo sapiens
agggcattgtgggaagggcggccggtgcagccgcagctgccatcttaggggcgcctggcgctacgggtttctcgttggaggcggccttcgtggcagctgtagacgccgggaaaaggcataaagtccgttggccgacacctttctttcctccggcctcggtagaaccgccagcccgcgtccgaaggcggaggcgaggggaactggccgcgtgaggggcctgaggcgagcggttagagcgtctcccggaaggatgggccggtctcggagccggagctcgtcccgctccaagcacaccaagagcagcaagcacaacaagaagcgcagccggtcccggtcgcgatcccgggacaaggagcgcgtgcggaagcgttccaaatctcgggaaagtaaacggaaccggcggcgggagtcgcggtcccgttcgcgctccaccaacacggccgtgtcccggcgcgagcgggaccgggagcgcgcctcgtccccgcccgaccgcatcgacatcttcgggcgcacggtgagcaagcgcagcagcctggacgagaagcagaagcgagaggaggaggagaagaaagcggagttcgagcggcagcgaaaaattcgacagcaagaaatagaagaaaaactcatcgaggaagaaacagcacgaagagtagaagaattggtagcaaaaagggtggaggaagaactggagaaaaggaaggatgaaattgaacgagaagttctccgaagggtggaggaagccaaacgcatcatggaaaagcagttgctcgaagaactcgagcgacagagacaagctgagcttgccgcacaaaaagctagagaggtaacgctcggtcgtttggaaagtagagacagtccatggcaaaactttcagtgttgggttctgcctcctgctcagttcagaaagagatggaatacagactatctaattcctttctcgtctaaacttaacattgctgcgaaagttaattttttagcctattcagaagtgctgactgataacttaaaagttggaagcttttataaaacatattcaaggatactttttgatttaatggaactggctatttgagaagtgtttgaaacttttgccatggctgcaggacttacattcttttttgggaggacggtggggagacagggagtggtaaagggaaaaggttaaaaatccacctgtggttgtatattcttctattctgtcactctgttacctagactgtgagaggcttttgccttcagtcagattaaaaagagcagggcctaacattgagtgatagcacctgctttgataaataggttttctcactcttctttttttccttcttttatccctcactccctcccctaaaccctgcttcagcacaatggactaattctagcattctgatcataaggccctccattttcctaatgtgtttcaaggaatctttttaggaaaaatatccagattattcatccactttttttagtatctactaacaactcctttttttctctagagagttatgaaggaacaggttgtccttgtctggagtcaagctaaacacatgatttgttttatcagcagctggagcagaagttgaaaatgtctttctgtgagacagtaatttgctactgaagctttatggcttgtttgcactgattactccaggatccaaaaacttggtgaaagtcactgaaacactcaaggcaaattactttacagccctgagtgtctgtcaccatagtttgcataatgaatatgaatcccattggtgtgtgatgtaggaaatcctgtagttgtattttcttgaactgaaatatttgactcaaaataattaagactcattgtcatttttcatcttggcattattgtggacaagttgacatattaaatctctttgctttctggtaagcttagcttttaaaatgcattttcccttgtcctgtctttaactagatatacatgcttatatttatagtgggtttcacagactataaaattgaatgtatgaaatttttatttatatcagtgcttttaataatgaagatatttttggagtaatggtgctgtcttgtagcgagttattaatcatagtaagatttttttctcttcatttgctttttttgtttcatattaacaattttttttttacacggacacaaccctctgacagtctttccaaatattaaaatcatttgaatatgtatgctgtgatctgaacactgctcaagccatcaagcagtcttcatacagtttgcattataaaatctcattaaattctccaagaatttcagttcagattgtagatgacaatataagctgccttccgaaattgtcaacatctgaatgttaagtccattttccccatggaagaagcccgtagttccatgaagtatggattaccatttgtatttttcactaacagtaaatgtatttttcttattaattgtttgccttaggaatgatgaattacattttttgttccttcttaccataaacatctgcattcctcagctcagccttccttgtatgttgtttctttataaatggttgagctgctgatgcaggtattgccaagctaacagtacaaatcattttaaagaggaagctggcgcgtatggcagccgaggagcacactctgcaggacactggacaagacagtaaatattcaacttttaatgctgattaaaggagtataggtaaagaatacgtaggtatacataattggtgagacaaatattcactttatttatattttatatattatttttttaatttggtaaatactatccagttttgtagttgtccttgttgatttgtgtgatattaaagtattagtaataattgccaggaaactatcattagggagggtttagttggttgctgtttggactgggagggatgattcacctcgagggctggaacccactttcactgctcgctcagccactcgtccgtctgactcacgcgccttccccctaccccgcagctctttctacccc

SEQ ID NO: 326834 - DNA, 2273 bp, Homo sapiens
gtgcacctttgaagtcagctggaccaaggaaaggccctgccctgaaggctggtcacttgcagaggtaaactcccctctttgacttctggccagggtttgtgctgagctggctgcagccgctctcagcctcgctccgggcacgtcgggcagcctcgggccctcctgcctgcaggatcatgcccaccaccgtggacgatgtcctggagcatggaggggagtttcactttttccagaagcaaatgtttttcctcttggctctgctctcggctaccttcgcgcccatctacgtgggcatcgtcttcctgggcttcacccctgaccaccgctgccggagccccggagtggccgagctgagtctgcgctgcggctggagtcctgcagaggaactgaactacacggtgccgggcccaggacctgcgggcgaagcctccccaagacagtgtaggcgctacgaggtggactggaaccagagcaccttcgactgcgtggaccccctggccagcctggacaccaacaggagccgcctgccactgggcccctgccgggacggctgggtgtacgagacgcctggctcgtccatcgtcaccgagtttaacctggtatgtgccaactcctggatgttggacctattccagtcatcagtgaatgtaggattctttattggctctatgagtatcggctacatagcagacaggtttggccgtaagctctgcctcctaactacagtcctcataaatgctgcagctggagttctcatggccatttccccaacctatacgtggatgttaatttttcgcttaatccaaggactggtcagcaaagcaggctggttaataggctacatcctgattacagaatttgttgggcggagatatcggagaacagtggggattttttaccaagttgcctatacagttgggctcctggtgctagctggggtggcttacgcacttcctcactggaggtggttgcagttcacagttgctctgcccaacttcttcttcttgctctattactggtgcatacctgagtctcccaggtggctgatctcccagaataagaatgctgaagccatgagaatcattaagcacatcgcaaagaaaaatggaaaatctctacccgcctcccttcagcgcctgagacttgaagaggaaactggcaagaaattgaacccttcatttcttgacttggtcagaactcctcagataaggaaacatactatgatattgatgtacaactggttcacgagctctgtgctctaccagggcctcatcatgcacatgggccttgcaggtgacaatatctacctggatttcttctactctgccctggttgaattcccagctgccttcatgatcatcctcaccatcgaccgcatcggacgccgttacccttgggctgcatcaaatatggttgcaggggcagcctgtctggcctcagtttttatacctggtgatctacaatggctaaaaattattatctcatgcttgggaagaatggggatcacaatggcctatgagatagtctgcctggtcaatgctgagctgtaccccacattcattaggaatcttggcgtccacatctgttcctcaatgtgtgacattggtggcatcatcacgccattcctggtctaccggctcactaacatctggcttgagctcccgctgatggttttcggcgtacttggcttggttgctggaggtctggtgctgttgcttccagaaactaaagggaaagctttgcctgagaccatcgaggaagccgaaaatatgcaaagaccaagaaaaaataaagaaaagatgatttacctccaagttcagaaactagacattccattgaactaagaagagagaccgttgctgctgtcatgacctagctttgatggcagcaagaccaaaagtagaaatccctgcactcatcacaaagcccatacaactcaaccaaacttacccctgagccctatcaacctaggtctacagccagtggagtctattgtacactgtggaaaaatacccatgggaccagatcctgccaaattcttccagctcactttattctcagcattcctaggacattggacattggttttctggagggttttttttccatctttgtatttttttaaatttgattcttttctttgcaatgctatctaaccagaatacataggggaactgtgggctaggcaaacaaaatagaaaaaagtgtgaaaaacagtaaagttgggagaggagcatctattttcttaaagaaataaaacacccaaaacaata

SEQ ID NO: 326835 - DNA, 744 bp, Homo sapiens
accaaaggagctcaactgacttgattttacctccccattctggagctttagagaattccaaaaccatagggtgatttgggaacaggtccaaagggcatggcctgggaccaacaaaatgaaaaaagcagcatttctacgatgaatatcaagcaatgtcctggcattcacgaagaccaagatgattgagaaaacttgcaatttgaacaaaatgttttaattgcagtcttcatttatcaagctgttgaaaaaccaagaaaaaataaagaaaagatgatttacctccaagttcagaaactagacattccattgaactaagaagagagaccgttgctgctgtcatgacctagctttgatggcagcaagaccaaaagtagaaatccctgcactcatcacaaagcccatacaactcaaccaaacttacccctgagccctatcaacctaggtctacagccagtggagtctattgtacactgtggaaaaatacccatgggaccagatcctgccaaattcttccagctcactttattctcagcattcctaggacattggacattggttttctggagggttttttttccatctttgtatttttttaaatttgattcttttctttgcaatgctatctaaccagaatacataggggaactgtgggctaggcaaacaaaatagaaaaaagtgtgaaaaacagtaaagttgggagaggagcatctattttcttaaagaaataaaacacccaaaacaata

SEQ ID NO: 326836 - DNA, 408 bp, Homo sapiens
agcaatagttataacaaaataaaaaccaaaaaacacttaaaaatattcagagagttgcgtagaatattctagaatttgtctatatttttgaggttggtgttctagtttcctgatagctggacagccaactcattattgtattgaattgcattaaccattcaaattctctctgcagttacagaatttgttgggcggagatatcggagaacagtggggattttttaccaagttgcctatacagttgggctcctggtgctagctggggtggcttacgcacttcctcactggaggtggttgcagttcacagttgctctgcccaacttcttcttcttgctctattactggtaagtccatttggaataaaaaggaaataaatcaaagtattttattctgctaagaagtctgcct

SEQ ID NO: 326837 - DNA, 2330 bp, Homo sapiens
gtgcacctttgaagtcagctggaccaaggaaaggccctgccctgaaggctggtcacttgcagaggtaaactcccctctttgacttctggccagggtttgtgctgagctggctgcagccgctctcagcctcgctccgggcacgtcgggcagcctcgggccctcctgcctgcaggatcatgcccaccaccgtggacgatgtcctggagcatggaggggagtttcactttttccagaagcaaatgtttttatccatctttgtgactcttgcgtcatcgtgctacgcattcgcagcctctatcttcactggtgggcgatcagtcttatctctggagcattccatcccttagacgcaacctgcttgcacgggcatcacccggtgagatgtacagatcttgagatctgctactgtgtgtgagagtcatgtagatgtaactggaacgtatagggagctcgggcccagtacacgtgtggatcgatgcactcactcactaatacagtgtaggcgctacgaggtggactggaaccagagcaccttcgactgcgtggaccccctggccagcctggacaccaacaggagccgcctgccactgggcccctgccgggacggctgggtgtacgagacgcctggctcgtccatcgtcaccgagtttaacctggtatgtgccaactcctggatgttggacctattccagtcatcagtgaatgtaggattctttattggctctatgagtatcggctacatagcagacaggtttggccgtaagctctgcctcctaactacagtcctcataaatgctgcagctggagttctcatggccatttccccaacctatacgtggatgttaatttttcgcttaatccaaggactggtcagcaaagcaggctggttaataggctacatcctgattacagaatttgttgggcggagatatcggagaacagtggggattttttaccaagttgcctatacagttgggctcctggtgctagctggggtggcttacgcacttcctcactggaggtggttgcagttcacagttgctctgcccaacttcttcttcttgctctattactggtgcatacctgagtctcccaggtggctgatctcccagaataagaatgctgaagccatgagaatcattaagcacatcgcaaagaaaaatggaaaatctctacccgcctcccttcagcgcctgagacttgaagaggaaactggcaagaaattgaacccttcatttcttgacttggtcagaactcctcagataaggaaacatactatgatattgatgtacaactggttcacgagctctgtgctctaccagggcctcatcatgcacatgggccttgcaggtgacaatatctacctggatttcttctactctgccctggttgaattcccagctgccttcatgatcatcctcaccatcgaccgcatcggacgccgttacccttgggctgcatcaaatatggttgcaggggcagcctgtctggcctcagtttttatacctggtgatctacaatggctaaaaattattatctcatgcttgggaagaatggggatcacaatggcctatgagatagtctgcctggtcaatgctgagctgtaccccacattcattaggaatcttggcgtccacatctgttcctcaatgtgtgacattggtggcatcatcacgccattcctggtctaccggctcactaacatctggcttgagctcccgctgatggttttcggcgtacttggcttggttgctggaggtctggtgctgttgcttccagaaactaaagggaaagctttgcctgagaccatcgaggaagccgaaaatatgcaaagaccaagaaaaaataaagaaaagatgatttacctccaagttcagaaactagacattccattgaactaagaagagagaccgttgctgctgtcatgacctagctttgatggcagcaagaccaaaagtagaaatccctgcactcatcacaaagcccatacaactcaaccaaacttacccctgagccctatcaacctaggtctacagccagtggagtctattgtacactgtggaaaaatacccatgggaccagatcctgccaaattcttccagctcactttattctcagcattcctaggacattggacattggttttctggagggttttttttccatctttgtatttttttaaatttgattcttttctttgcaatgctatctaaccagaatacataggggaactgtgggctaggcaaacaaaatagaaaaaagtgtgaaaaacagtaaagttgggagaggagcatctattttcttaaagaaataaaacacccaaaacaata

SEQ ID NO: 326838 - DNA, 2159 bp, Homo sapiens
gtgcacctttgaagtcagctggaccaaggaaaggccctgccctgaaggctggtcacttgcagaggtaaactcccctctttgacttctggccagggtttgtgctgagctggctgcagccgctctcagcctcgctccgggcacgtcgggcagcctcgggccctcctgcctgcaggatcatgcccaccaccgtggacgatgtcctggagcatggaggggagtttcactttttccagaagcaaatgtttttcctcttggctctgctctcggctaccttcgcgcccatctacgtgggcatcgtcttcctgggcttcacccctgaccaccgctgccggagccccggagtggccgagctgagtctgcgctgcggctggagtcctgcagaggaactgaactacacggtgccgggcccaggacctgcgggcgaagcctccccaagacagtgtaggcgctacgaggtggactggaaccagagcaccttcgactgcgtggaccccctggccagcctggacaccaacaggagccgcctgccactgggcccctgccgggacggctgggtgtacgagacgcctggctcgtccatcgtcaccgagtttaacctggtatgtgccaactcctggatgttggacctattccagtcatcagtgaatgtaggattctttattggctctatgagtatcggctacatagcagacaggtttggccgtaagctctgcctcctaactacagtcctcataaatgctgcagctggagttctcatggccatttccccaacctatacgtggatgttaatttttcgcttaatccaaggactggtcagcaaagcaggctggttaataggctacatcctgattacagaatttgttgggcggagatatcggagaacagtggggattttttaccaagttgcctatacagttgggctcctggtgctagctggggtggcttacgcacttcctcactggaggtggttgcagttcacagttgctctgcccaacttcttcttcttgctctattactggtgcatacctgagtctcccaggtggctgatctcccagaataagaatgctgaagccatgagaatcattaagcacatcgcaaagaaaaatggaaaatctctacccgcctcccttcagcgcctgagacttgaagaggaaactggcaagaaattgaacccttcatttcttgacttggtcagaactcctcagataaggaaacatactatgatattgatgtacaactggttcacgagctctgtgctctaccagggcctcatcatgcacatgggccttgcaggtgacaatatctacctggatttcttctactctgccctggttgaattcccagctgccttcatgatcatcctcaccatcgaccgcatcggacgccgttacccttgggctgcatcaaatatggttgcaggggcagcctgtctggcctcagtttttatacctggtgatctacaatggctaaaaattattatctcatgcttgggaagaatggggatcacaatggcctatgagatagtctgcctggtcaatgctgagctgtaccccacattcattaggaatcttggcgtccacatctgttcctcaatgtgtgacattggtggcatcatcacgccattcctggtctaccggctcactaacatctggcttgagctcccgctgatggttttcggcgtacttggcttggttgctggaggtctggtgctgttgcttccagaaactaaagggaaagctttgcctgagaccatcgaggaagccgaaaatatgcaaagactgctcatccattctcctgtcttcagtatccatcaaatgctgatgtttctccctctccagacatgagctcaagccccaaagccatctcccaccacccattggacatctttgctcaaactcaacaagtcctggacaagattcatcatttcttccttcccagcttttgccaactggaactgctgaactctgctcttttattcttatccacaaggcctgatcctttctaaagatttaatatcattttcttattttgttttggtctgttttcccccactagaaagtaacttctctgagggcggaggttttttggtttttcttttgtttttaatttactgttgaatcctcattaactaagacagtgcctgacacataacaggtact

SEQ ID NO: 326839 - DNA, 824 bp, Homo sapiens
gtgcacctttgaagtcagctggaccaaggaaaggccctgccctgaaggctggtcacttgcagaggtaaactcccctctttgacttctggccagggtttgtgctgagctggctgcagccgctctcagcctcgctccgggcacgtcgggcagcctcgggccctcctgcctgcaggatcatgcccaccaccgtggacgatgtcctggagcatggaggggagtttcactttttccagaagcaaatgtttttcctcttggctctgctctcggctaccttcgcgcccatctacgtgggcatcgtcttcctgggcttcacccctgaccaccgctgccggagccccggagtggccgagctgagtctgcgctgcggctggagtcctgcagaggaactgaactacacggtgccgggcccaggacctgcgggcgaagcctccccaagacagtgtaggcgctacgaggtggactggaaccagagcaccttcgactgcgtggaccccctggccagcctggacaccaacaggagccgcctgccactgggcccctgccgggacggctgggtgtacgagacgcctggctcgtccatcgtcaccgagatgcccacacacacctgaaagcccgtggaactcaactgaactgtgcctgactgtgtgataggatgtgcttttctctcgatacctattttttctctttaatttcctcaaagtgttcatataaaatcatttggggctggagatcatgctatggcactattattttgttaaaaactacagatgacatcaaaagctatttgtgaagcctgattccaataaatataatagaaaaaaaga

SEQ ID NO: 326840 - DNA, 2520 bp, Homo sapiens
gtgcacctttgaagtcagctggaccaaggaaaggccctgccctgaaggctggtcacttgcagaggtaaactcccctctttgacttctggccagggtttgtgctgagctggctgcagccgctctcagcctcgctccgggcacgtcgggcagcctcgggccctcctgcctgcaggatcatgcccaccaccgtggacgatgtcctggagcatggaggggagtttcactttttccagaagcaaatgtttttcctcttggctctgctctcggctaccttcgcgcccatctacgtgggcatcgtcttcctgggcttcacccctgaccaccgctgccggagccccggagtggccgagctgagtctgcgctgcggctggagtcctgcagaggaactgaactacacggtgccgggcccaggacctgcgggcgaagcctccccaagacagtgtaggcgctacgaggtggactggaaccagagcaccttcgactgcgtggaccccctggccagcctggacaccaacaggagccgcctgccactgggcccctgccgggacggctgggtgtacgagacgcctggctcgtccatcgtcaccgagtttaacctggtatgtgccaactcctggatgttggacctattccagtcatcagtgaatgtaggattctttattggctctatgagtatcggctacatagcagacaggtttggccgtaagctctgcctcctaactacagtcctcataaatgctgcagctggagttctcatggccatttccccaacctatacgtggatgttaatttttcgcttaatccaaggactggtcagcaaagcaggctggttaataggctacatcctgattacagaatttgttgggcggagatatcggagaacagtggggattttttaccaagttgcctatacagttgggctcctggtgctagctggggtggcttacgcacttcctcactggaggtggttgcagttcacagttgctctgcccaacttcttcttcttgctctattactggtgcatacctgagtctcccaggtggctgatctcccagaataagaatgctgaagccatgagaatcattaagcacatcgcaaagaaaaatggaaaatctctacccgcctcccttcagcgcctgagacttgaagaggaaactggcaagaaattgaacccttcatttcttgacttggtcagaactcctcagataaggaaacatactatgatattgatgtacaactggttcacgagctctgtgctctaccagggcctcatcatgcacatgggccttgcaggtgacaatatctacctggatttcttctactctgccctggttgaattcccagctgccttcatgatcatcctcaccatcgaccgcatcggacgccgttacccttgggctgcatcaaatatggttgcaggggcagcctgtctggcctcagtttttatacctggtgatctacaatggctaaaaattattatctcatgcttgggaagaatggggatcacaatggcctatgagatagtctgcctggtcaatgctgagctgtaccccacattcattaggaatcttggcgtccacatctgttcctcaatgtgtgacattggtggcatcatcacgccattcctggtctaccggctcactaacatctggcttgagctcccgctgatggttttcggcgtacttggcttggttgctggaggtctggtgctgttgcttccagaaactaaagggaaagctttgcctgagaccatcgaggaagccgaaaatatgcaaagaccaagaaaaaataaagaaaagatgatttacctccaagttcagaaactagacattccattgaactaagaagagagaccgttgctgctgtcatgacctagctttgatggcagcaagaccaaaagtagaaatccctgcactcatcacaaagcccatacaactcaaccaaacttacccctgagccctatcaacctaggtctacagccagtggagtctattgtacactgtggaaaaatacccatgggaccagatcctgccaaattcttccagctcactttattctcagcattcctaggacattggacattggttttctggagggttttttttccatctttgtatttttttaaatttgattcttttctttgcaatgctatctaaccagaatacataggggaactgtgggctaggcaaacaaaatagaaaaaagtgtgaaaaacagtaaagttgggagaggagcatctattttcttaaagaaataaaacacccaaaacaatataaagttgtccagaatgtatgtcaagaattttagataggcctttcagtaacacaggtgaagaaatttttaaaaatacattgattattatctaggttagacttaaagtgaatctcaaataaaagaatcaggaatacaacttaagtgatcatgaggtccttccatatttagattgggtaagcatgaatgtgtattttctacaaaagaccttgagaagagttcaataaaaaatgttagcattaaaaaaaa

SEQ ID NO: 326841 - DNA, 2196 bp, Homo sapiens
gtgcacctttgaagtcagctggaccaaggaaaggccctgccctgaaggctggtcacttgcagaggtaaactcccctctttgacttctggccagggtttgtgctgagctggctgcagccgctctcagcctcgctccgggcacgtcgggcagcctcgggccctcctgcctgcaggatcatgcccaccaccgtggacgatgtcctggagcatggaggggagtttcactttttccagaagcaaatgtttttcctcttggctctgctctcggctaccttcgcgcccatctacgtgggcatcgtcttcctgggcttcacccctgaccaccgctgccggagccccggagtggccgagctgagtctgcgctgcggctggagtcctgcagaggaactgaactacacggtgccgggcccaggacctgcgggcgaagcctccccaagacagtgtaggcgctacgaggtggactggaaccagagcaccttcgactgcgtggaccccctggccagcctggacaccaacaggagccgcctgccactgggcccctgccgggacggctgggtgtacgagacgcctggctcgtccatcgtcaccgagtttaacctggtatgtgccaactcctggatgttggacctattccagtcatcagtgaatgtaggattctttattggctctatgagtatcggctacatagcagacaggtttggccgtaagctctgcctcctaactacagtcctcataaatgctgcagctggagttctcatggccatttccccaacctatacgtggatgttaatttttcgcttaatccaaggactggtcagcaaagcaggctggttaataggctacatcctgattacagaatttgttgggcggagatatcggagaacagtggggattttttaccaagttgcctatacagttgggctcctggtgctagctggggtggcttacgcacttcctcactggaggtggttgcagttcacagttgctctgcccaacttcttcttcttgctctattactggtgcatacctgagtctcccaggtggctgatctcccagaataagaatgctgaagccatgagaatcattaagcacatcgcaaagaaaaatggaaaatctctacccgcctcccttcagcgcctgagacttgaagaggaaactggcaagaaattgaacccttcatttcttgacttggtcagaactcctcagataaggaaacatactatgatattgatgtacaactggttcacgagctctgtgctctaccagggcctcatcatgcacatgggccttgcaggtgacaatatctacctggatttcttctactctgccctggttgaattcccagctgccttcatgatcatcctcaccatcgaccgcatcggacgccgttacccttgggctgcatcaaatatggttgcaggggcagcctgtctggcctcagtttttatacctggtgatctacaatggctaaaaattattatctcatgcttgggaagaatggggatcacaatggcctatgagatagtctgcctggtcaatgctgagctgtaccccacattcattaggaatcttggcgtccacatctgttcctcaatgtgtgacattggtggcatcatcacgccattcctggtctaccggctcactaacatctggcttgagctcccgctgatggttttcggcgtacttggcttggttgctggaggtctggtgctgttgcttccagaaactaaagggaaagctttgcctgagaccatcgaggaagccgaaaatatgcaaagaccaagaaaaaataaagaaaagatgatttacctccaagttcagaaactagacattccattgaactaagaagagagaccgttgctgctgtcatgacctagctttgatggcagcaagaccaaaagtagaaatccctgcactcatcacaaagcccatacaactcaaccaaacttacccctgagccctatcaacctaggtctacagccagtggagtctattgtacactgtggaaaaatacccatgggaccagatcctgccaaattcttccagctcactttattcttttctttgcaatgctatctaaccagaatacataggggaactgtgggctaggcaaacaaaatagaaaaaagtgtgaaaaacagtaaagttgggagaggagcatctattttcttaaagaaataaaacacccaaaacaata

SEQ ID NO: 326842 - DNA, 891 bp, Homo sapiens
gaagcggccttgtgtcacttccggcctccctttagctgccatctttgcgtccccgcgtgtgtgcgcctaatctcaggtggtccacccgagaccccttgagcaccaaccctagtcccccgcgcggccccttattcgctccgacaagatgaaagaaacaatcatgaaccaggaaaaactcgccaaactgcaggcacaagtgcgcattggtgggaaaggaactgctcgcagaaagaagaaggtggttcatagaacagccacagcagatgacaaaaaacttcagttctccttaaagaagttaggggtaaacaatatctctggtattgaagaggtgaatatgtttacaaaccaaggaacagtgatccactttaacaaccctaaagttcaggcatctctggcagcgaacactttcaccattacaggccatgctgagacaaagcagctgacagaaatgctacccagcatcttaaaccagcttggtgcggatagtctgactagtttaaggagactggccgaagctctgcccaaacaatctgtggatggaaaagcaccacttgctactggagaggatgatgatgatgaagttccagatcttgtggagaattttgatgaggcttccaagaatgaggcaaactgaattgagtcaacttctgaagataaaacctgaagaagttactgggagctgctattttatattatgactgctttttaagaaatttttgtttatggatctgataaaatctagatctctaatatttttaagcccaagccccttggacactgcagctcttttcagtttttgcttatacacaattcattctttgcagctaattaagccgaagaagcctgggaatcaagtttgaaacaaagattaataaagttctttgcctagta

SEQ ID NO: 326843 - DNA, 871 bp, Homo sapiens
gggctgcaggaattcggcacgaggttgcgtccccgcgtgtgtgcgcctaatctcaggtggtccacccgagaccccttgagcaccaaccctagtcccccgcgcggccccttattcgctccgacaagatgaaagaaacaatcatgaaccaggaaaaactcgccaaactgcaggcacaagtgcgcattggtgggaaaggaactgctcgcagaaagaagaaggtggttcatagaacagccacagcagatgacaaaaaacttcagttctccttaaagaagttaggggtaaacaatatctctggtattgaagaggtgaatatgtttacaaaccaaggaacagtgatccactttaacaaccctaaagttcaggcatctctggcagcgaacactttcaccattacaggccatgctgagacaaagcagctgacagaaatgctacccagcatcttaaaccagcttggtgcggatagtctgactagtttaaggagactggccgaagctctgcccaaacaatctgtggatggaaaagcaccacttgctactggagaggatgatgatgatgaagttccagatcttgtggagaattttgatgaggcttccaagaatgaggcaaactgaattgagtcaacttctgaagataaaacctgaagaagttactgggagctgctattttatattatgactgctttttaagaaatttttgtttatggatctgataaaatctagatctctaatatttttaagcccaagccccttggacactgcagctcttttcagtttttgcttatacacaattcattctttgcagctaattaagccgaagaagcctgggaatcaagtttgaaacaaagattaataaagttctttgcctagta

SEQ ID NO: 326844 - DNA, 979 bp, Homo sapiens
cagggggggcgagaaacataggctaggtacgaggctgggtgttttgcgtccccgcgtgtgtgcgcctaatctcaggtggtccacccgagaccccttgagcaccaaccctagtcccccgcgcggccccttattcgctccgacaagatgaaagaaacaatcatgaaccaggaaaaactcgccaaactgcaggcacaagtgcgcattggtgggaaaggaactgctcgcagaaagaagaaggtggttcatagaacagccacagcagatgacaaaaaacttcagttctccttaaagaagttaggggtaaacaatatctctggtattgaagaggtgaatatgtttacaaaccaaggaacagtgatccactttaacaaccctaaagttcaggcatctctggcagcgaacactttcaccattacaggccatgctgagacaaagcagctgacagaaatgctacccagcatcttaaaccagcttggtgcggatagtctgactagtttaaggagactggccgaagctctgcccaaacaatctgtggatggaaaagcaccacttgctactggagaggatgatgatgatgaagttccagatcttgtggagaattttgatgaggcttccaagaatgaggcaaactgaattgagtcaacttctgaagataaaacctgaagaagttactgggagctgctattttatattatgactgctttttaagaaatttttgtttatggatctgataaaatctagatctctaatatttttaagcccaagccccttggacactgcagctcttttcagtttttgcttatacacaattcattctttgcagctaattaagccgaagaagcctgggaatcaagtttgaaacaaagattaataaagttctttgcctagtagctagttaaaaaaaaaaaactcggggtttttggggggggaaagagtttagaagggcgggcatggtttcggccccttttggaacggtgtg

SEQ ID NO: 326845 - DNA, 728 bp, Homo sapiens
cgattatctctagattaacccaccacaaaaagaaaaaaaaaagcaatgtcgggaactgctcgcagaaagaagaaggtggttcatagaacagccacagcagatgacaaaaaacttcagttctccttaaagaagttaggggtaaacaatatctctggtattgaagaggtgaatatgtttacaaaccaaggaacagtgatccactttaacaaccctaaagttcaggcatctctggcagcgaacactttcaccattacaggccatgctgagacaaagcagctgacagaaatgctacccagcatcttaaaccagcttggtgcggatagtctgactagtttaaggagactggccgaagctctgcccaaacaatctgtggatggaaaagcaccacttgctactggagaggatgatgatgatgaagttccagatcttgtggagaattttgatgaggcttccaagaatgaggcaaactgaattgagtcaacttctgaagataaaacctgaagaagttactgggagctgctattttatattatgactgctttttaagaaatttttgtttatggatctgataaaatctagatctctaatatttttaagcccaagccccttggacactgcagctcttttcagtttttgcttatacacaattcattctttgcagctaattaagccgaagaagcctgggaatcaagtttgaaacaaagattaataaagttctttgcctagta

SEQ ID NO: 326846 - DNA, 736 bp, Homo sapiens
gggctgcaggaattcggcacgaggttgcgtccccgcgtgtgtgcgcctaatctcaggtggtccacccgagaccccttgagcaccaaccctagtcccccgcgcggccccttattcgctccgacaagatgaaagaaacaatcatgaaccaggaaaaactcgccaaactgcaggcacaagtgcgcattggtgggaaaggaactgctcgcagaaagaagaaggtggttcatagaacagccacagcagatgacaaaaaacttcagttctccttaaagaagttaggggtaaacaatatctctggtattgaagaggtgaatatgtttacaaaccaaggaacagtgatccactttaacaaccctaaagttcaggcatctctggcagcgaacactttcaccattacaggccatgctgagacaaagcagctgacagaaatgctacccagcatcttaaaccagcttggtgcggatagtctgactagtttaaggagactggccgaagctctgcccaaacaatctgtggatggaaaagcaccacttgctactggagaggatgatgatgatgaagttccagatcttgtggagaattttgatgaggcttccaagaatgaggcaaactgaattgagtcaacttctgaagataaaacctgaagaagttactgggagctgctattttatattatgactgctttttaagaaatttttgtttatggatctgataaaatctagatctctaatatttt

SEQ ID NO: 326847 - DNA, 1115 bp, Homo sapiens
  misc_feature (64)..(64): n is a, c, g, or t
  misc_feature (732)..(732): n is a, c, g, or t
tttccaccaatttattcccgcatcaaaccccgacgaaaaaaaaaaccttagggactcctgccanaagtttgaggtggttcatagaacagccacagcagatgacaaaaaacttcagttctccttaaagaagttaggggtaaacaatatctctggtattgaagaggtgaatatgtttacaaaccaaggaacagtgatccactttaacaaccctaaagttcaggcatctctggcagcgaacactttcaccattacaggccatgctgagacaaagcagctgacagaaatgctacccagcatcttaaaccagcttggtgcggatagtctgactagtttaaggagactggccgaagctctgcccaaacaatctgtggatggaaaagcaccacttgctactggagaggatgatgatgatgaagttccagatcttgtggagaattttgatgaggcttccaagaatgaggcaaactgaattgagtcaacttctgaagataaaacctgaagaagttactgggagctgctattttatattatgactgctttttaagaaatttttgtttatggatctgataaaatctagatctctaatatttttaagcccaagccccttggacactgcagctcttttcagtttttgcttatacacaattcattctttgcagctaattaagccgaagaagcctgggaatcaagtttgaaacaaagattaataaagttctttgcctagtaaaaaanaaacaaaacccccaccacacacagcaacccccacaaaacacaaaaaggggggcggcgaaccacatacaagtccgcggacacgccacaaacaacacacccgaccgtctactgcagcggcgtaccacacgcagacgaccataaccaacaagagacgcggataccaaacacgcaggcgggaaaacctcagccgtcgaagccgacgaccaacactgtcggcggacaacggaaccacaccagaacagcacgcgaaaacagatcgtgaggcaccgcccggcgcgaacgctccggcataaaatatcgcgacgacagtaagaacagcagcaaacgcaagaccgagccgataacgcaaccccctaacagtcacacgccacaacacccgcact

SEQ ID NO: 326848 - DNA, 717 bp, Homo sapiens
  misc_feature (462)..(462): n is a, c, g, or t
  misc_feature (473)..(473): n is a, c, g, or t
  misc_feature (475)..(476): n is a, c, g, or t
  misc_feature (479)..(480): n is a, c, g, or t
  misc_feature (483)..(483): n is a, c, g, or t
  misc_feature (508)..(508): n is a, c, g, or t
  misc_feature (516)..(516): n is a, c, g, or t
  misc_feature (526)..(526): n is a, c, g, or t
  misc_feature (530)..(533): n is a, c, g, or t
  misc_feature (537)..(537): n is a, c, g, or t
tcctgctctctgtatctgggttgattttgtctgtcggtgttttgtggggggcacgtggttgcgccgtctggcacgtgcgcgtgggggttccggcgttcggacgctgtggcgggtttttgtcttttttccgggcgatggcgtcgcgtatgtggtggcgtgtgtgtcgtccccgcctgttgttatctgcgcccccacacatgtaggtgggttgctcttcttagagacagttctgcgctgctcgtgtcctgtttttatcctctgccgtcacgtgttgtattagggcccggtcgccgcccgaggtggtctttatgtattataagagagttcgcccttcgattggcgggcgtgccgccgctgtgtatcacaggacactgtggtggtgtcggcgctgcccgggctgctcgcgccccgggcaggggtctcccggcagccccccgcccccgccttttttttttttttttnttttttttttntnnttnnttnttttttttgtttttttttttttttntttttttntttttttttntttnnnntttnaatttttgtttatggatctgataaaatctagatctctaatatttttaagcccaagccccttggacactgcagctcttttcagtttttgcttatacacaattcattctttgcagctaattaagccgaagaagcctgggaatcaagtttgaaacaaagattaataaagttctttgcctagta

SEQ ID NO: 326849 - DNA, 221 bp, Homo sapiens
cgcggccgcgcgactacggctgcagaagacgacagaaggggaatttttgtttatggatctgataaaatctagatctctaatatttttaagcccaagccccttggacactgcagctcttttcagtttttgcttatacacaattcattctttgcagctaattaagccgaagaagcctgggaatcaagtttgaaacaaagattaataaagttctttgcctagta

SEQ ID NO: 326850 - DNA, 1158 bp, Homo sapiens
  misc_feature (914)..(914): n is a, c, g, or t
  misc_feature (922)..(922): n is a, c, g, or t
  misc_feature (926)..(926): n is a, c, g, or t
  misc_feature (1155)..(1155): n is a, c, g, or t
gaagcggccttgtgtcacttccggcctccctttagctgccatctttgcgtccccgcgtgtgtgcgcctaatctcaggtggtccacccgagaccccttgagcaccaaccctagtcccccgcgcggccccttattcgctccgacaagatgaaagaaacaatcatgaaccaggaaaaactcgccaaactgcaggcacaagtgcgcattggtgggaaaggaactgctcgcagaaagaagaaggtggttcatagaacagccacagcagatgacaaaaaacttcagttctccttaaagaagttaggggtaaacaatatctctggtattgaagaggtgaatatgtttacaaaccaaggaacagtgatccactttaacaaccctaaagttcaggcatctctggcagcgaacactttcaccattacaggccatgctgagacaaagcagctgacagaaatgctacccagcatcttaaaccagcttggtgcggatagtctgactagtttaaggagactggccgaagctctgcccaaacaatctgtggatggaaaagcaccacttgctactggagaggatgatgatgatgaagttccagatcttgtggagaattttgatgaggcttccaagaatgaggcaaactgaattgagtcaacttctgaagataaaacctgaagaagttactgggagctgctattttatattatgactgctttttaagaaatttttgtttatggatctgataaaatctagatctctaatatttttaagcccaagccccttggacactgcagctcttttcagtttttgcttatacacaattcattctttgcagctaattaagccgaagaagcctgggaatcaagtttgaaacaaagattaataaagttctttgcctagtaaaaaaacacaaaacacacaaaanaagggggngctnaaaaaacaacagggagcaaaaacggtaacatgtttgtaaagggagcctattaggagataaataacaaaaggagggtaaaaacgagggaggaagaggtgttatgaagcacttggtgtagtaggaacaaaaatgtagaaacaaagtgtgaaaatatgagttgttataataagtaataatgaagtaaaatagaggtaatgcacatgatatatagagtagcaattaggagggnaga

SEQ ID NO: 326851 - DNA, 756 bp, Homo sapiens
gaagcggccttgtgtcacttccggcctccctttagctgccatctttgcgtccccgcgtgtgtgcgcctaatctcaggtggtccacccgagaccccttgagcaccaaccctagtcccccgcgcggccccttattcgctccgacaagatgaaagaaacaatcatgaaccaggaaaaactcgccaaactgcaggcacaagtgcgcattggtgggaaaggaactgctcgcagaaagaagaaggtggttcatagaacagccacagcagatgacaaaaaacttcagttctccttaaagaagttaggggtaaacaatatctctggtattgaagaggtgaatatgtttacaaaccaaggaacagtgatccactttaacaaccctaaagttcaggcatctctggcagcgaacactttcaccattacaggccatgctgagacaaagcagctgacagaaatgctacccagcatcttaaaccagcttggtgcggatagtctgactagtttaaggagactggccgaagctctgcccaaacaatctgtggatggaaaagcaccacttgctactggagaggatgatgatgatgaagttccagatcttgtggagaattttgatgaggcttccaagaatgaggcaaactgaattgagtcaacttctgaagataaaacctgaagaagttactgggagctgctattttatattatgactgctttttaagaaatttttgtttatggatctgataaaatctagatctctaatatttt

SEQ ID NO: 326852 - DNA, 688 bp, Homo sapiens
cagcaggtaggaagcgacgtagcgcatccggcggcgtctgcggcggaggcgcggagaagtctcacgcgtgcgacctcggtgttgcgtccccgcgtgtgtgcgcctaatctcaggtggtccacccgagaccccttgagcaccaaccctagtcccccgcgcggccccttattcgctccgacaagatgaaagaaacaatcatgaaccaggaaaaactcgccaaactgcaggcacaagtgcgcattggtgggaaaggaactgctcgcagaaagaagaaggtggttcatagaacagccacagcagatgacaaaaaacttcagttctccttaaagaagttaggggtaaacaatatctctggtattgaagaggtgaatatgtttacaaaccaaggaacagtgatccactttaacaaccctaaagttcaggcatctctggcagcgaacactttcaccattacaggccatgctgagacaaagcagctgacagaaatgctacccagcatcttaaaccagcttggtgcggatagtctgactagtttaaggagactggccgaagctctgcccaaacaatctgtggatggaaaagcaccacttgctactggagaggatgatgatgatgaagttccagtagcaagctctgcccaaacatctgtggatggaaaagcaccacttgctacttcatcatcatcatc

SEQ ID NO: 326853 - DNA, 891 bp, Homo sapiens
  misc_feature (20)..(20): n is a, c, g, or t
  misc_feature (27)..(27): n is a, c, g, or t
  misc_feature (32)..(32): n is a, c, g, or t
  misc_feature (39)..(39): n is a, c, g, or t
ggagagataggctagtacgngccgggnggtgnatcaggncgaggttgcgtccccgcgtgtgtgcgcctaatctcaggtggtccacccgagaccccttgagcaccaaccctagtcccccgcgcggccccttattcgctccgacaagatgaaagaaacaatcatgaaccaggaaaaactcgccaaactgcaggcacaagtgcgcattggtgggaaaggaactgctcgcagaaagaagaaggtggttcatagaacagccacagcagatgacaaaaaacttcagttctccttaaagaagttaggggtaaacaatatctctggtattgaagaggtgaatatgtttacaaaccaaggaacagtgatccactttaacaaccctaaagttcaggcatctctggcagcgaacactttcaccattacaggccatgctgagacaaagcagctgacagaaatgctacccagcatcttaaaccagcttggtgcggatagtctgactagtttaaggagactggccgaagctctgcccaaacaatctgtggatggaaaagcaccacttgctactggagaggatgatgatgatgaagttccagatcttgtggagaattttgatgaggcttccaagaatgaggcaaactgaattgagtcaacttctgaagataaaacctgaagaagttactgggagctgctattttatattatgactgctttttaagaaatttttgtttatggatctgataaaatctagatctctaatatttttaagcccaagccccttggacactgcagctcttttcagtttttgcttatacacaattcattctttgcagctaattaagccgaagaagcctgggaatcaagtttgaaacaaagattaataaagttctttgcctagta

SEQ ID NO: 326854 - DNA, 890 bp, Homo sapiens
cagggggggcgagaaacataggctaggtacgaggctgggtgttttgcgtccccgcgtgtgtgcgcctaatctcaggtggtccacccgagaccccttgagcaccaaccctagtcccccgcgcggccccttattcgctccgacaagatgaaagaaacaatcatgaaccaggaaaaactcgccaaactgcaggcacaagtgcgcattggtgggaaaggaactgctcgcagaaagaagaaggtggttcatagaacagccacagcagatgacaaaaaacttcagttctccttaaagaagttaggggtaaacaatatctctggtattgaagaggtgaatatgtttacaaaccaaggaacagtgatccactttaacaaccctaaagttcaggcatctctggcagcgaacactttcaccattacaggccatgctgagacaaagcagctgacagaaatgctacccagcatcttaaaccagcttggtgcggatagtctgactagtttaaggagactggccgaagctctgcccaaacaatctgtggatggaaaagcaccacttgctactggagaggatgatgatgatgaagttccagatcttgtggagaattttgatgaggcttccaagaatgaggcaaactgaattgagtcaacttctgaagataaaacctgaagaagttactgggagctgctattttatattatgactgctttttaagaaatttttgtttatggatctgataaaatctagatctctaatatttttaagcccaagccccttggacactgcagctcttttcagtttttgcttatacacaattcattctttgcagctaattaagccgaagaagcctgggaatcaagtttgaaacaaagattaataaagttctttgcctagta

SEQ ID NO: 326855 - DNA, 888 bp, Homo sapiens
cgcggccgcgcgactacggctgcagaagacgacagaaggggttgcgtccccgcgtgtgtgcgcctaatctcaggtggtccacccgagaccccttgagcaccaaccctagtcccccgcgcggccccttattcgctccgacaagatgaaagaaacaatcatgaaccaggaaaaactcgccaaactgcaggcacaagtgcgcattggtgggaaaggaactgctcgcagaaagaagaaggtggttcatagaacagccacagcagatgacaaaaaacttcagttctccttaaagaagttaggggtaaacaatatctctggtattgaagaggtgaatatgtttacaaaccaaggaacagtgatccactttaacaaccctaaagttcaggcatctctggcagcgaacactttcaccattacaggccatgctgagacaaagcagctgacagaaatgctacccagcatcttaaaccagcttggtgcggatagtctgactagtttaaggagactggccgaagctctgcccaaacaatctgtggatggaaaagcaccacttgctactggagaggatgatgatgatgaagttccagatcttgtggagaattttgatgaggcttccaagaatgaggcaaactgaattgagtcaacttctgaagataaaacctgaagaagttactgggagctgctattttatattatgactgctttttaagaaatttttgtttatggatctgataaaatctagatctctaatatttttaagcccaagccccttggacactgcagctcttttcagtttttgcttatacacaattcattctttgcagctaattaagccgaagaagcctgggaatcaagtttgaaacaaagattaataaagttctttgcctagta

SEQ ID NO: 326856 - DNA, 1535 bp, Homo sapiens
  misc_feature (1535)..(1535): n is a, c, g, or t
gggctgcaggaattcggcacgaggttgcgtccccgcgtgtgtgcgcctaatctcaggtggtccacccgagaccccttgagcaccaaccctagtcccccgcgcggccccttattcgctccgacaagatgaaagaaacaatcatgaaccaggaaaaactcgccaaactgcaggcacaagtgcgcattggtgggaaaggaactgctcgcagaaagaagaaggtggttcatagaacagccacagcagatgacaaaaaacttcagttctccttaaagaagttaggggtaaacaatatctctggtattgaagaggtgaatatgtttacaaaccaaggaacagtgatccactttaacaaccctaaagttcaggcatctctggcagcgaacactttcaccattacaggccatgctgagacaaagcagctgacagaaatgctacccagcatcttaaaccagcttggtgcggatagtctgactagtttaaggagactggccgaagctctgcccaaacaatctgtggatggaaaagcaccacttgctactggagaggatgatgatgatgaagttccagatcttgtggagaattttgatgaggcttccaagaatgaggcaaactgaattgagtcaacttctgaagataaaacctgaagaagttactgggagctgctattttatattatgactgctttttaagaaatttttgtttatggatctgataaaatctagatctctaatatttttaagcccaagccccttggacactgcagctcttttcagtttttgcttatacacaattcattctttgcagctaattaagccgaagaagcctgggaatcaagtttgaaacaaagattaataaagttctttgcctagtaaaaaaaaaaaaaaaaacaaacaaaaaaaaaaaaaaaagaaaaaaaaagagaaagaaaaaaaccaagaaaaaagaaaaaaaaaaaaaggggggggggcctaggaacccggggggcgccgcaggatctgacacccccctatgttttcttagaaacagggcgggccctatacaccaagagtcattacaaacgcaagaagcgagcggggcatgcctagaccagggtagcggaagcgcagcaacactggagctgatcacctgtcaggaaagcacccactctcgcgggggggcggaaataatggaggacccaccactggcatatagaacgccgggaggactagaacacgagaggcacgcgtgatgccgaggtcccagcacgccagtgcaggggggcaagcatggggctaagcgcctactcaggcacgaacacacggcgcgcgcacaataaccacggcacaagcgaaaccgagctgggcacaagcaggtctcacaatagcagacaagaccaacagacagcaaagagtgaacggcgcaggaacacacgctgaaacgacacacagaacgcagagacacaccaagcaggcacacgacgcaccagcaacagtaaaccgacagagagcactagaaagagagaaagacaagacacaagcagacagagacaaaaacan

SEQ ID NO: 326857 - DNA, 1042 bp, Homo sapiens
gggctgcaggaattcggcacgaggttgcgtccccgcgtgtgtgcgcctaatctcaggtggtccacccgagaccccttgagcaccaaccctagtcccccgcgcggccccttattcgctccgacaagatgaaagaaacaatcatgaaccaggaaaaactcgccaaactgcaggcacaagtgcgcattggtgggaaaggaactgctcgcagaaagaagaaggtggttcatagaacagccacagcagatgacaaaaaacttcagttctccttaaagaagttaggggtaaacaatatctctggtattgaagaggtgaatatgtttacaaaccaaggaacagtgatccactttaacaaccctaaagttcaggcatctctggcagcgaacactttcaccattacaggccatgctgagacaaagcagctgacagaaatgctacccagcatcttaaaccagcttggtgcggatagtctgactagtttaaggagactggccgaagctctgcccaaacaatctgtggatggaaaagcaccacttgctactggagaggatgatgatgatgaagttccagatcttgtggagaattttgatgaggcttccaagaatgaggcaaactgaattgagtcaacttctgaagataaaacctgaagaagttactgggagctgctattttatattatgactgctttttaagaaatttttgtttatggatctgataaaatctagatctctaatatttttaagcccaagccccttggacactgcagctcttttcagtttttgcttatacacaattcattctttgcagctaattaagccgaagaagcctgggaatcaagtttgaaacaaagattaataaagttctttgcctagtaatacagttttatttttttatttcattgacaccgatctgtacacagtaaaaaaaattgcttatagaaagctaatcatggcatgtaatatggctgataacctttggaatttgattaaagatttaaaatcacggtgtagtgtaacaaaggtggtataaagttctcaggtttgaa

SEQ ID NO: 326858 - DNA, 917 bp, Homo sapiens
  misc_feature (885)..(885): n is a, c, g, or t
  misc_feature (896)..(896): n is a, c, g, or t
gggctgcaggaattcggcacgaggttgcgtccccgcgtgtgtgcgcctaatctcaggtggtccacccgagaccccttgagcaccaaccctagtcccccgcgcggccccttattcgctccgacaagatgaaagaaacaatcatgaaccaggaaaaactcgccaaactgcaggcacaagtgcgcattggtgggaaaggaactgctcgcagaaagaagaaggtggttcatagaacagccacagcagatgacaaaaaacttcagttctccttaaagaagttaggggtaaacaatatctctggtattgaagaggtgaatatgtttacaaaccaaggaacagtgatccactttaacaaccctaaagttcaggcatctctggcagcgaacactttcaccattacaggccatgctgagacaaagcagctgacagaaatgctacccagcatcttaaaccagcttggtgcggatagtctgactagtttaaggagactggccgaagctctgcccaaacaatctgtggatggaaaagcaccacttgctactggagaggatgatgatgatgaagttccagatcttgtggagaattttgatgaggcttccaagaatgaggcaaactgaattgagtcaacttctgaagataaaacctgaagaagttactgggagctgctattttatattatgactgctttttaagaaatttttgtttatggatctgataaaatctagatctctaatatttttaagcccaagccccttggacactgcagctcttttcagtttttgcttatacacaattcattctttgcagctaattaagccgaagaagcctgggaatcaagtttgaaacaaagattaataaagttctttgcctagtaaaaaaacaaaagcnaccaataaaanccctcgggctccttggcccta

SEQ ID NO: 326859 - DNA, 1138 bp, Homo sapiens
  misc_feature (894)..(894): n is a, c, g, or t
  misc_feature (902)..(902): n is a, c, g, or t
  misc_feature (906)..(906): n is a, c, g, or t
  misc_feature (1135)..(1135): n is a, c, g, or t
gggctgcaggaattcggcacgaggttgcgtccccgcgtgtgtgcgcctaatctcaggtggtccacccgagaccccttgagcaccaaccctagtcccccgcgcggccccttattcgctccgacaagatgaaagaaacaatcatgaaccaggaaaaactcgccaaactgcaggcacaagtgcgcattggtgggaaaggaactgctcgcagaaagaagaaggtggttcatagaacagccacagcagatgacaaaaaacttcagttctccttaaagaagttaggggtaaacaatatctctggtattgaagaggtgaatatgtttacaaaccaaggaacagtgatccactttaacaaccctaaagttcaggcatctctggcagcgaacactttcaccattacaggccatgctgagacaaagcagctgacagaaatgctacccagcatcttaaaccagcttggtgcggatagtctgactagtttaaggagactggccgaagctctgcccaaacaatctgtggatggaaaagcaccacttgctactggagaggatgatgatgatgaagttccagatcttgtggagaattttgatgaggcttccaagaatgaggcaaactgaattgagtcaacttctgaagataaaacctgaagaagttactgggagctgctattttatattatgactgctttttaagaaatttttgtttatggatctgataaaatctagatctctaatatttttaagcccaagccccttggacactgcagctcttttcagtttttgcttatacacaattcattctttgcagctaattaagccgaagaagcctgggaatcaagtttgaaacaaagattaataaagttctttgcctagtaaaaaaacacaaaacacacaaaanaagggggngctnaaaaaacaacagggagcaaaaacggtaacatgtttgtaaagggagcctattaggagataaataacaaaaggagggtaaaaacgagggaggaagaggtgttatgaagcacttggtgtagtaggaacaaaaatgtagaaacaaagtgtgaaaatatgagttgttataataagtaataatgaagtaaaatagaggtaatgcacatgatatatagagtagcaattaggagggnaga

SEQ ID NO: 326860 - DNA, 960 bp, Homo sapiens
gggctgcaggaattcggcacgaggttgcgtccccgcgtgtgtgcgcctaatctcaggtggtccacccgagaccccttgagcaccaaccctagtcccccgcgcggccccttattcgctccgacaagatgaaagaaacaatcatgaaccaggaaaaactcgccaaactgcaggcacaagtgcgcattggtgggaaaggaactgctcgcagaaagaagaaggtggttcatagaacagccacagcagatgacaaaaaacttcagttctccttaaagaagttaggggtaaacaatatctctggtattgaagaggtgaatatgtttacaaaccaaggaacagtgatccactttaacaaccctaaagttcaggcatctctggcagcgaacactttcaccattacaggccatgctgagacaaagcagctgacagaaatgctacccagcatcttaaaccagcttggtgcggatagtctgactagtttaaggagactggccgaagctctgcccaaacaatctgtggatggaaaagcaccacttgctactggagaggatgatgatgatgaagttccagatcttgtggagaattttgatgaggcttccaagaatgaggcaaactgaattgagtcaacttctgaagataaaacctgaagaagttactgggagctgctattttatattatgactgctttttaagaaatttttgtttatggatctgataaaatctagatctctaatatttttaagcccaagccccttggacactgcagctcttttcagtttttgcttatacacaattcattctttgcagctaattaagccgaagaagcctgggaatcaagtttgaaacaaagattaataaagttctttgcctagtagctagttaaaaaaaaaaaactcggggtttttggggggggaaagagtttagaagggcgggcatggtttcggccccttttggaacggtgtg

SEQ ID NO: 326861 - DNA, 1260 bp, Homo sapiens
  misc_feature (877)..(877): n is a, c, g, or t
gggctgcaggaattcggcacgaggttgcgtccccgcgtgtgtgcgcctaatctcaggtggtccacccgagaccccttgagcaccaaccctagtcccccgcgcggccccttattcgctccgacaagatgaaagaaacaatcatgaaccaggaaaaactcgccaaactgcaggcacaagtgcgcattggtgggaaaggaactgctcgcagaaagaagaaggtggttcatagaacagccacagcagatgacaaaaaacttcagttctccttaaagaagttaggggtaaacaatatctctggtattgaagaggtgaatatgtttacaaaccaaggaacagtgatccactttaacaaccctaaagttcaggcatctctggcagcgaacactttcaccattacaggccatgctgagacaaagcagctgacagaaatgctacccagcatcttaaaccagcttggtgcggatagtctgactagtttaaggagactggccgaagctctgcccaaacaatctgtggatggaaaagcaccacttgctactggagaggatgatgatgatgaagttccagatcttgtggagaattttgatgaggcttccaagaatgaggcaaactgaattgagtcaacttctgaagataaaacctgaagaagttactgggagctgctattttatattatgactgctttttaagaaatttttgtttatggatctgataaaatctagatctctaatatttttaagcccaagccccttggacactgcagctcttttcagtttttgcttatacacaattcattctttgcagctaattaagccgaagaagcctgggaatcaagtttgaaacaaagattaataaagttctttgcctagtaaaaaanaaacaaaacccccaccacacacagcaacccccacaaaacacaaaaaggggggcggcgaaccacatacaagtccgcggacacgccacaaacaacacacccgaccgtctactgcagcggcgtaccacacgcagacgaccataaccaacaagagacgcggataccaaacacgcaggcgggaaaacctcagccgtcgaagccgacgaccaacactgtcggcggacaacggaaccacaccagaacagcacgcgaaaacagatcgtgaggcaccgcccggcgcgaacgctccggcataaaatatcgcgacgacagtaagaacagcagcaaacgcaagaccgagccgataacgcaaccccctaacagtcacacgccacaacacccgcact

SEQ ID NO: 326862 - DNA, 1153 bp, Homo sapiens
gggctgcaggaattcggcacgaggttgcgtccccgcgtgtgtgcgcctaatctcaggtggtccacccgagaccccttgagcaccaaccctagtcccccgcgcggccccttattcgctccgacaagatgaaagaaacaatcatgaaccaggaaaaactcgccaaactgcaggcacaagtgcgcattggtgggaaaggaactgctcgcagaaagaagaaggtggttcatagaacagccacagcagatgacaaaaaacttcagttctccttaaagaagttaggggtaaacaatatctctggtattgaagaggtgaatatgtttacaaaccaaggaacagtgatccactttaacaaccctaaagttcaggcatctctggcagcgaacactttcaccattacaggccatgctgagacaaagcagctgacagaaatgctacccagcatcttaaaccagcttggtgcggatagtctgactagtttaaggagactggccgaagctctgcccaaacaatctgtggatggaaaagcaccacttgctactggagaggatgatgatgatgaagttccagatcttgtggagaattttgatgaggcttccaagaatgaggcaaactgaattgagtcaacttctgaagataaaacctgaagaagttactgggagctgctattttatattatgactgctttttaagaaatttttgtttatggatctgataaaatctagatctctaatatttttaagcccaagccccttggacactgcagctcttttcagtttttgcttatacacaattcattctttgcagctaattaagccgaagaagcctgggaatcaagtttgaaacaaagattaataaagttctttgcctagtaaaaaaaaaaaccacaaaaaaaaacaaaaagagggtaagcaacaacaaacaaagacggggccgcgcaccaacatacccagggaaggccaagaacatgaccaaccagtttatgaagaaggccccaaggagacatataaaacagcgagggcgcagaaacacacccgagcggaaacggcgccccggccataggagaaccctacggcgggggcacagacccaccaacgaaagacccgcgaaactcgggtgcgaaccctcaccgaggacgtccggaccaatagcgggc

SEQ ID NO: 326863 - DNA, 1112 bp, Homo sapiens
gggctgcaggaattcggcacgaggttgcgtccccgcgtgtgtgcgcctaatctcaggtggtccacccgagaccccttgagcaccaaccctagtcccccgcgcggccccttattcgctccgacaaggtacaaaaaggctctggacggcggcgtggtaggaggacgggagcgggggcgggaagttccctgaaggagcgagacagggagggacagggcagaggaggagaggaaggcgatgcgacggacaggcgcacccgctcaggctgactctcgggggcgaggtcgagccaggggcggctgccctgggggcgaggcgacgctgtctcaacctccacctcgcggcggaacccgaggacaggagcctcagatgaaagaaacaatcatgaaccaggaaaaactcgccaaactgcaggcacaagtgcgcattggtgggaaaggaactgctcgcagaaagaagaaggtggttcatagaacagccacagcagatgacaaaaaacttcagttctccttaaagaagttaggggtaaacaatatctctggtattgaagaggtgaatatgtttacaaaccaaggaacagtgatccactttaacaaccctaaagttcaggcatctctggcagcgaacactttcaccattacaggccatgctgagacaaagcagctgacagaaatgctacccagcatcttaaaccagcttggtgcggatagtctgactagtttaaggagactggccgaagctctgcccaaacaatctgtggatggaaaagcaccacttgctactggagaggatgatgatgatgaagttccagatcttgtggagaattttgatgaggcttccaagaatgaggcaaactgaattgagtcaacttctgaagataaaacctgaagaagttactgggagctgctattttatattatgactgctttttaagaaatttttgtttatggatctgataaaatctagatctctaatatttttaagcccaagccccttggacactgcagctcttttcagtttttgcttatacacaattcattctttgcagctaattaagccgaagaagcctgggaatcaagtttgaaacaaagattaataaagttctttgcctagta

SEQ ID NO: 326864 - DNA, 890 bp, Homo sapiens
taaacaccttaccggtctcaacgtagccgagagcctccgcgtggttttttatatcctgggcacggaggctctagtgtgtgtcactaaggaccccttgagcaccaaccctagtcccccgcgcggccccttattcgctccgacaagatgaaagaaacaatcatgaaccaggaaaaactcgccaaactgcaggcacaagtgcgcattggtgggaaaggaactgctcgcagaaagaagaaggtggttcatagaacagccacagcagatgacaaaaaacttcagttctccttaaagaagttaggggtaaacaatatctctggtattgaagaggtgaatatgtttacaaaccaaggaacagtgatccactttaacaaccctaaagttcaggcatctctggcagcgaacactttcaccattacaggccatgctgagacaaagcagctgacagaaatgctacccagcatcttaaaccagcttggtgcggatagtctgactagtttaaggagactggccgaagctctgcccaaacaatctgtggatggaaaagcaccacttgctactggagaggatgatgatgatgaagttccagatcttgtggagaattttgatgaggcttccaagaatgaggcaaactgaattgagtcaacttctgaagataaaacctgaagaagttactgggagctgctattttatattatgactgctttttaagaaatttttgtttatggatctgataaaatctagatctctaatatttttaagcccaagccccttggacactgcagctcttttcagtttttgcttatacacaattcattctttgcagctaattaagccgaagaagcctgggaatcaagtttgaaacaaagattaataaagttctttgcctagta

SEQ ID NO: 326865 - DNA, 857 bp, Homo sapiens
ccggtggcagcccatgttggggataattacctctgcgattactggttccatatgagaccccttgagcaccaaccctagtcccccgcgcggccccttattcgctccgacaagatgaaagaaacaatcatgaaccaggaaaaactcgccaaactgcaggcacaagtgcgcattggtgggaaaggaactgctcgcagaaagaagaaggtggttcatagaacagccacagcagatgacaaaaaacttcagttctccttaaagaagttaggggtaaacaatatctctggtattgaagaggtgaatatgtttacaaaccaaggaacagtgatccactttaacaaccctaaagttcaggcatctctggcagcgaacactttcaccattacaggccatgctgagacaaagcagctgacagaaatgctacccagcatcttaaaccagcttggtgcggatagtctgactagtttaaggagactggccgaagctctgcccaaacaatctgtggatggaaaagcaccacttgctactggagaggatgatgatgatgaagttccagatcttgtggagaattttgatgaggcttccaagaatgaggcaaactgaattgagtcaacttctgaagataaaacctgaagaagttactgggagctgctattttatattatgactgctttttaagaaatttttgtttatggatctgataaaatctagatctctaatatttttaagcccaagccccttggacactgcagctcttttcagtttttgcttatacacaattcattctttgcagctaattaagccgaagaagcctgggaatcaagtttgaaacaaagattaataaagttctttgcctagta

SEQ ID NO: 326866 - DNA, 1086 bp, Homo sapiens
cagggggggcgagaaacataggctaggtacgaggctgggtgttgaccccttgagcaccaaccctagtcccccgcgcggccccttattcgctccgacaaggtacaaaaaggctctggacggcggcgtggtaggaggacgggagcgggggcgggaagttccctgaaggagcgagacagggagggacagggcagaggaggagaggaaggcgatgcgacggacaggcgcacccgctcaggctgactctcgggggcgaggtcgagccaggggcggctgccctgggggcgaggcgacgctgtctcaacctccacctcgcggcggaacccgaggacaggagcctcagatgaaagaaacaatcatgaaccaggaaaaactcgccaaactgcaggcacaagtgcgcattggtgggaaaggaactgctcgcagaaagaagaaggtggttcatagaacagccacagcagatgacaaaaaacttcagttctccttaaagaagttaggggtaaacaatatctctggtattgaagaggtgaatatgtttacaaaccaaggaacagtgatccactttaacaaccctaaagttcaggcatctctggcagcgaacactttcaccattacaggccatgctgagacaaagcagctgacagaaatgctacccagcatcttaaaccagcttggtgcggatagtctgactagtttaaggagactggccgaagctctgcccaaacaatctgtggatggaaaagcaccacttgctactggagaggatgatgatgatgaagttccagatcttgtggagaattttgatgaggcttccaagaatgaggcaaactgaattgagtcaacttctgaagataaaacctgaagaagttactgggagctgctattttatattatgactgctttttaagaaatttttgtttatggatctgataaaatctagatctctaatatttttaagcccaagccccttggacactgcagctcttttcagtttttgcttatacacaattcattctttgcagctaattaagccgaagaagcctgggaatcaagtttgaaacaaagattaataaagttctttgcctagta

SEQ ID NO: 326867 - DNA, 985 bp, Homo sapiens
caaaggctactaagttaatggtattttctgcacagaaaataccattaacttagtagcctttgcttaaaggtgggattaattctccatgaagtcagaatgagacaataagcagcattaacttcataggcacacagaactagtgctcaaactgctaccacccttttcaattgctatcttttgaaaggcaccactatttgttttgctggggtctcgggtggacccttattcgctccgacaagatgaaagaaacaatcatgaaccaggaaaaactcgccaaactgcaggcacaagtgcgcattggtgggaaaggaactgctcgcagaaagaagaaggtggttcatagaacagccacagcagatgacaaaaaacttcagttctccttaaagaagttaggggtaaacaatatctctggtattgaagaggtgaatatgtttacaaaccaaggaacagtgatccactttaacaaccctaaagttcaggcatctctggcagcgaacactttcaccattacaggccatgctgagacaaagcagctgacagaaatgctacccagcatcttaaaccagcttggtgcggatagtctgactagtttaaggagactggccgaagctctgcccaaacaatctgtggatggaaaagcaccacttgctactggagaggatgatgatgatgaagttccagatcttgtggagaattttgatgaggcttccaagaatgaggcaaactgaattgagtcaacttctgaagataaaacctgaagaagttactgggagctgctattttatattatgactgctttttaagaaatttttgtttatggatctgataaaatctagatctctaatatttttaagcccaagccccttggacactgcagctcttttcagtttttgcttatacacaattcattctttgcagctaattaagccgaagaagcctgggaatcaagtttgaaacaaagattaataaagttctttgcctagta

SEQ ID NO: 326868 - DNA, 885 bp, Homo sapiens
gggctgcaggaattcggcacgaggttgcgtccccgcgtgtgtgcgcctaatctcaggtggtccacccgagaccccttgagcaccaaccctagtcccccgcgcggccccttattcgctccgacaagatgaaagaaacaatcatgaaccaggaaaaactcgccaaactgcaggcacaagtgcgcattggtgggaaaggaactgctcgcagaaagaagaaggtggttcatagaacagccacagcagatgacaaaaaacttcagttctccttaaagaagttaggggtaaacaatatctctggtattgaagaggtgaatatgtttacaaaccaaggaacagtgatccactttaacaaccctaaagttcaggcatctctggcagcgaacactttcaccattacaggccatgctgagacaaagcagctgacagaaatgctacccagcatcttaaaccagcttggtgcggatagtctgactagtttaaggagactggccgaagctctgcccaaacaatctgtggatggaaaagcaccacttgctactggagaggatgatgatgatgaagttccagatcttgtggagaattttgatgaggcttccaagaatgaggcaaactgaattgagtcaacttctgaagataaaacctgaagaagttactgggagctgctattttatattatgactgctttttaagaaatttttgtttatggatctgataaaatctagatctctaatatttttaagcccaagccccttggacactgcagctcttttcagtttttgcttatacacaattcattctttgcagctaattaagccgaagaagcctgggataagcctgtgaaccaagagtatatcttcggcgcgtgccgggggggtgggggtggtg

SEQ ID NO: 326869 - DNA, 726 bp, Homo sapiens
  misc_feature (64)..(64): n is a, c, g, or t
tttccaccaatttattcccgcatcaaaccccgacgaaaaaaaaaaccttagggactcctgccanaagtttgaggtggttcatagaacagccacagcagatgacaaaaaacttcagttctccttaaagaagttaggggtaaacaatatctctggtattgaagaggtgaatatgtttacaaaccaaggaacagtgatccactttaacaaccctaaagttcaggcatctctggcagcgaacactttcaccattacaggccatgctgagacaaagcagctgacagaaatgctacccagcatcttaaaccagcttggtgcggatagtctgactagtttaaggagactggccgaagctctgcccaaacaatctgtggatggaaaagcaccacttgctactggagaggatgatgatgatgaagttccagatcttgtggagaattttgatgaggcttccaagaatgaggcaaactgaattgagtcaacttctgaagataaaacctgaagaagttactgggagctgctattttatattatgactgctttttaagaaatttttgtttatggatctgataaaatctagatctctaatatttttaagcccaagccccttggacactgcagctcttttcagtttttgcttatacacaattcattctttgcagctaattaagccgaagaagcctgggaatcaagtttgaaacaaagattaataaagttctttgcctagta

SEQ ID NO: 326870 - DNA, 777 bp, Homo sapiens
gggctgcaggaattcggcacgaggttgcgtccccgcgtgtgtgcgcctaatctcaggtggtccacccgagaccccttgagcaccaaccctagtcccccgcgcggccccttattcgctccgacaagatgaaagaaacaatcatgaaccaggaaaaactcgccaaactgcaggcacaagtgcgcattggtgggaaaggaactgctcgcagaaagaagaaggtggttcatagaacagccacagcagatgacaaaaaacttcagttctccttaaagaagttaggggtaaacaatatctctggtattgaagaggtgaatatgtttacaaaccaaggaacagtgatccactttaacaaccctaaagttcaggcatctctggcagcgaacactttcaccattacaggccatgctgagacaaagcagctgacagaaatgctacccagcatcttaaaccagcttggtgcggatagtctgactagtttaaggagactggccgaagctctgcccaaacaatctgtggatggaaaagcaccacttgctactggagaggatgatgatgatgaagttccagatcttgtggagaattttgatgaggcttccaagaatgaggcaaactgaattgagtcaacttctgaagataaaacctgaagaagttactgggagctgctattttatattatgactgctttttaagaaatttttgtttatggatctgataaaatctagatctctaatatttttaagcccaagccccttggagatgatcggttacggaccgcca

SEQ ID NO: 326871 - DNA, 1200 bp, Homo sapiens
cgcggccgcgcgactacggctgcagaagacgacagaaggggttgcgtccccgcgtgtgtgcgcctaatctcaggtggtccacccgagaccccttgagcaccaaccctagtcccccgcgcggccccttattcgctccgacaagatgaaagaaacaatcatgaaccaggaaaaactcgccaaactgcaggcacaagtgcgcattggtgggaaaggaactgctcgcagaaagaagaaggtggttcatagaacagccacagcagatgacaaaaaacttcagttctccttaaagaagttaggggtaaacaatatctctggtattgaagaggcaagtatcaaattttgttactttaaaaaacaagatttggctgggaaaagttaacgttaatgcattaaatgggttgttttttttttttaacttagggacttcaaagtccctaagatgtgtttctaccataaattaataaatatcagggagctcattaagtctgaatgctattagaatacatattccattccaggcaaaatttcacctgtgcttcacagtgaaatactagttagccagacttagtttaataaaacatttgtttttaaagagactggtcagcattgctaatttaaatgtttcttttcttaataggtgaatatgtttacaaaccaaggaacagtgatccactttaacaaccctaaagttcaggcatctctggcagcgaacactttcaccattacaggccatgctgagacaaagcagctgacagaaatgctacccagcatcttaaaccagcttggtgcggatagtctgactagtttaaggagactggccgaagctctgcccaaacaatctgtggatggaaaagcaccacttgctactggagaggatgatgatgatgaagttccagatcttgtggagaattttgatgaggcttccaagaatgaggcaaactgaattgagtcaacttctgaagataaaacctgaagaagttactgggagctgctattttatattatgactgctttttaagaaatttttgtttatggatctgataaaatctagatctctaatatttttaagcccaagccccttggacactgcagctcttttcagtttttgcttatacacaattcattctttgcagctaattaagccgaagaagcctgggaatcaagtttgaaacaaagattaataaagttctttgcctagta

SEQ ID NO: 326872 - DNA, 834 bp, Homo sapiens
cgcggccgcgcgactacggctgcagaagacgacagaaggggttgcgtccccgcgtgtgtgcgcctaatctcaggtggtccacccgagaccccttgagcaccaaccctagtcccccgcgcggccccttattcgctccgacaagatgaaagaaacaatcatgaaccaggaaaaactcgccaaactgcaggcacaagtgcgcattggtgggaaaggaactgctcgcagaaagaagaaggtggttcatagaacagccacagcagatgacaaaaaagtgaatatgtttacaaaccaaggaacagtgatccactttaacaaccctaaagttcaggcatctctggcagcgaacactttcaccattacaggccatgctgagacaaagcagctgacagaaatgctacccagcatcttaaaccagcttggtgcggatagtctgactagtttaaggagactggccgaagctctgcccaaacaatctgtggatggaaaagcaccacttgctactggagaggatgatgatgatgaagttccagatcttgtggagaattttgatgaggcttccaagaatgaggcaaactgaattgagtcaacttctgaagataaaacctgaagaagttactgggagctgctattttatattatgactgctttttaagaaatttttgtttatggatctgataaaatctagatctctaatatttttaagcccaagccccttggacactgcagctcttttcagtttttgcttatacacaattcattctttgcagctaattaagccgaagaagcctgggaatcaagtttgaaacaaagattaataaagttctttgcctagta

SEQ ID NO: 326873 - DNA, 998 bp, Homo sapiens
gggctgcaggaattcggcacgaggttgcgtccccgcgtgtgtgcgcctaatctcaggtggtccacccgagaccccttgagcaccaaccctagtcccccgcgcggccccttattcgctccgacaaggtacaaaaaggctctggacggcggcgtggtaggaggacgggagcgggggcgggaagttccctgaaggagcgagacagggagggacagggcagaggaggagaggaaggcgatgcgacggacaggcgcacccgctcaggctgactctcgggggcgaggtcgagccaggggcggctgccctgggggcgaggcgacgctgtctcaacctccacctcgcggcggaacccgaggacaggagcctcagatgaaagaaacaatcatgaaccaggaaaaactcgccaaactgcaggcacaagtgcgcattggtgggaaagtgaatatgtttacaaaccaaggaacagtgatccactttaacaaccctaaagttcaggcatctctggcagcgaacactttcaccattacaggccatgctgagacaaagcagctgacagaaatgctacccagcatcttaaaccagcttggtgcggatagtctgactagtttaaggagactggccgaagctctgcccaaacaatctgtggatggaaaagcaccacttgctactggagaggatgatgatgatgaagttccagatcttgtggagaattttgatgaggcttccaagaatgaggcaaactgaattgagtcaacttctgaagataaaacctgaagaagttactgggagctgctattttatattatgactgctttttaagaaatttttgtttatggatctgataaaatctagatctctaatatttttaagcccaagccccttggacactgcagctcttttcagtttttgcttatacacaattcattctttgcagctaattaagccgaagaagcctgggaatcaagtttgaaacaaagattaataaagttctttgcctagta

SEQ ID NO: 326874 - DNA, 882 bp, Homo sapiens
ggatatcaccagtggtccggccggcgcaggccctgaacgtcaagtcgataatgccccgtagcggctcccctatgcagatccgtggaacgaatggaaatagatgaccaaggcatgcatcacacagataaaacatcggcccgagggaagccgaacgtgtcccgataggatggttccagaagtggcggtcctcgacggatcagtaacagggatgcgtatcaaacaagagcaggccaccagcgagactgcagcagtatcaacattcacgcgcccgctccaaggaagctacggggtaaacacagatctctgcgtattggaagaggtgaatatgtttacaaaccaaggaacagtgatccactttaacaaccctaaagttcaggcatctctggcagcgaacactttcaccattacaggccatgctgagacaaagcagctgacagaaatgctacccagcatcttaaaccagcttggtgcggatagtctgactagtttaaggagactggccgaagctctgcccaaacaatctgtggatggaaaagcaccacttgctactggagaggatgatgatgatgaagttccagatcttgtggagaattttgatgaggcttccaagaatgaggcaaactgaattgagtcaacttctgaagataaaacctgaagaagttactgggagctgctattttatattatgactgctttttaagaaatttttgtttatggatctgataaaatctagatctctaatatttttaagcccaagccccttggacactgcagctcttttcagtttttgcttatacacaattcattctttgcagctaattaagccgaagaagcctgggaatcaagtttgaaacaaagattaataaagttctttgcctagta

SEQ ID NO: 326875 - DNA, 808 bp, Homo sapiens
gggctgcaggaattcggcacgaggttgcgtccccgcgtgtgtgcgcctaatctcaggtggtccacccgagaccccttgagcaccaaccctagtcccccgcgcggccccttattcgctccgacaagatgaaagaaacaatcatgaaccaggaaaaactcgccaaactgcaggcacaagtgcgcattggtgggaaaggaactgctcgcagaaagaagaaggtggttcatagaacagccacagcagatgacaaaaaacttcagttctccttaaagaagttaggggtaaacaatatctctggtattgaagaggtgaatatgtttacaaaccaaggaacagtgatccactttaacaaccctaaagttcaggcatctctggcagcgaacactttcaccattacaggccatgctgagacaaagcagctgacagaaatgctacccagcatcttaaaccagcttggtgcggatagtctgactagtttaaggagactggccgaagctctgcccaaacaatctgtggatggaaaagcaccacttgctactggagaggatgatgatgatgaagttccagatcttgtggagaattttgatgaggcttccaagaatgaggcaaactgaattgagtcaacttctgaagataaaacctgaagaagttactgggagctgctattttatattatgactgctttttaagaacactgcagctcttttcagtttttgcttatacacaattcattctttgcagctaattaagccgaagaagcctgggaatcaagtttgaaacaaagattaataaagttctttgcctagta

SEQ ID NO: 326876 - DNA, 898 bp, Homo sapiens
  misc_feature (751)..(751): n is a, c, g, or t
  misc_feature (762)..(762): n is a, c, g, or t
  misc_feature (764)..(765): n is a, c, g, or t
  misc_feature (768)..(769): n is a, c, g, or t
  misc_feature (772)..(772): n is a, c, g, or t
  misc_feature (797)..(797): n is a, c, g, or t
  misc_feature (805)..(805): n is a, c, g, or t
  misc_feature (815)..(815): n is a, c, g, or t
  misc_feature (819)..(822): n is a, c, g, or t
  misc_feature (826)..(826): n is a, c, g, or t
gggctgcaggaattcggcacgaggttgcgtccccgcgtgtgtgcgcctaatctcaggtggtccacccgagaccccttgagcaccaaccctagtcccccgcgcggccccttattcgctccgacaagatgaaagaaacaatcatgaaccaggaaaaactcgccaaactgcaggcacaagtgcgcattggtgggaaaggaactgctcgcagaaagaagaaggtggttcatagaacagccacagcagatgacaaaaaacttcagttctccttaaagaagttaggggtaaacaatatctctggtattgaagaggtgaatatgtttacaaaccaaggaacagtgatccactttaacaaccctaaagttcaggcatctctggcagcgaacactttcaccattacaggccatgctgagacaaagcagctgacagaaatgctacccagcatcttaaaccagcttggtgcggatagtctgactagtttaaggagactggccgaagctctgcccaaacaatctgtggatggaaaagcaccacttgctactggagaggatgatgatgatgaagttccagatcttgtggagaattttgatgaggcttccaagaatgaggcaaactgaattgagtcaacttctgaagataaaacctgaagaagttactgggagctgctattttatattatgactgctttttaagattctattaaatttcttttatatttttcgccctctcccttttgactttcaagttttttttnttttttttttntnnttnnttnttttttttgtttttttttttttttntttttttntttttttttntttnnnntttngacaaatttattgaaacatacaggcggctgttagcagagaaatcattccatgattcgatgtgttacattggc

SEQ ID NO: 326877 - DNA, 737 bp, Homo sapiens
gggctgcaggaattcggcacgaggttgcgtccccgcgtgtgtgcgcctaatctcaggtggtccacccgagaccccttgagcaccaaccctagtcccccgcgcggccccttattcgctccgacaagatgaaagaaacaatcatgaaccaggaaaaactcgccaaactgcaggcacaagtgcgcattggtgggaaaggaactgctcgcagaaagaagaaggtggttcatagaacagccacagcagatgacaaaaaacttcagttctccttaaagaagttaggggtaaacaatatctctggtattgaagaggtgaatatgtttacaaaccaaggaacagtgatccactttaacaaccctaaagttcaggcatctctggcagcgaacactttcaccattacaggccatgctgagacaaagcagctgacagaaatgctacccagcatcttaaaccagcttggtgcggatagtctgactagtttaaggagactggccgaagctctgcccaaacaatctgtggatggaaaagcaccacttgctactggagaggatgatgatgatgaagttccagatcttgtggagaattttgatgaggcttccaagaatgaggcaaactgaattgagtcaacttttttttgtgcgggggggaaaaaaaaaaaagggggaataaaaacctgaaagaaaaggtttttaaaacccctttggggggggggcgggaaaagggcccttttggggcgttta

SEQ ID NO: 326878 - DNA, 834 bp, Homo sapiens
gggctgcaggaattcggcacgaggttgcgtccccgcgtgtgtgcgcctaatctcaggtggtccacccgagaccccttgagcaccaaccctagtcccccgcgcggccccttattcgctccgacaagatgaaagaaacaatcatgaaccaggaaaaactcgccaaactgcaggcacaagtgcgcattggtgggaaaggaactgctcgcagaaagaagaaggtggttcatagaacagccacagcagatgacaaaaaacttcagttctccttaaagaagttaggggtaaacaatatctctggtattgaagaggtgaatatgtttacaaaccaaggaacagtgatccactttaacaaccctaaagttcaggcatctctggcagcgaacactttcaccattacaggccatgctgagacaaagcagctgacagaaatgctacccagcatcttaaaccagcttggtgcggatagtctgactagtttaaggagactggccgaagctctgcccaaacaatctgtggatggaaaagcaccaatcttgtggagaattttgatgaggcttccaagaatgaggcaaactgaattgagtcaacttctgaagataaaacctgaagaagttactgggagctgctattttatattatgactgctttttaagaaatttttgtttatggatctgataaaatctagatctctaatatttttaagcccaagccccttggacactgcagctcttttcagtttttgcttatacacaattcattctttgcagctaattaagccgaagaagcctgggaatcaagtttgaaacaaagattaataaagttctttgcctagta

SEQ ID NO: 326879 - DNA, 871 bp, Homo sapiens
  misc_feature (835)..(835): n is a, c, g, or t
  misc_feature (839)..(839): n is a, c, g, or t
  misc_feature (841)..(842): n is a, c, g, or t
  misc_feature (845)..(846): n is a, c, g, or t
  misc_feature (849)..(851): n is a, c, g, or t
gggctgcaggaattcggcacgaggttgcgtccccgcgtgtgtgcgcctaatctcaggtggtccacccgagaccccttgagcaccaaccctagtcccccgcgcggccccttattcgctccgacaagatgaaagaaacaatcatgaaccaggaaaaactcgccaaactgcaggcacaagtgcgcattggtgggaaaggaactgctcgcagaaagaagaaggtggttcatagaacagccacagcagatgacaaaaaacttcagttctccttaaagaagttaggggtaaacaatatctctggtattgaagaggtgaatatgtttacaaaccaaggaacagtgatccactttaacaaccctaaagttcaggcatctctggcagcgaacactttcaccattacaggccatgctgagacaaagcagctgacagaaatgctacccagcatcttaaaccagcttggtgcggatagtctgactagtttaaggagactggccgaagctctgcccaaacaatctgtggatggaaaagcaccaatcttgtggagaattttgatgaggcttccaagaatgaggcaaactgaattgagtcaacttctgaagataaaacctgaagaagttactgggagctgctattttatattatgactgctttttaagaaatttttgtttatggatctgataaaatctagatctctaatatttttaagcccaagccccttggacactgcagctcttttcagtttttgcttatacacaattcattctttgcagctaattaagccgaagaagcctgggaatcaagtttgaaacaaagattaataaagttctttgcctagtanaaananngannaannnaactcgagactagttctctc

SEQ ID NO: 326880 - DNA, 813 bp, Homo sapiens
gggctgcaggaattcggcacgaggttgcgtccccgcgtgtgtgcgcctaatctcaggtggtccacccgagaccccttgagcaccaaccctagtcccccgcgcggccccttattcgctccgacaagatgaaagaaacaatcatgaaccaggaaaaactcgccaaactgcaggcacaagtgcgcattggtgggaaaggaactgctcgcagaaagaagaaggtggttcatagaacagccacagcagatgacaaaaaacttcagttctccttaaagaagttaggggtaaacaatatctctggtattgaagaggtgaatatgtttacaaaccaaggaacagtgatccactttaacaaccctaaagttcaggcatctctggcagcgaacactttcaccattacaggccatgctgagacaaagcagctgacagaaatgctacccagcatcttaaaccagctgtggatggaaaagcaccacttgctactggagaggatgatgatgatgaagttccagatcttgtggagaattttgatgaggcttccaagaatgaggcaaactgaattgagtcaacttctgaagataaaacctgaagaagttactgggagctgctattttatattatgactgctttttaagaaatttttgtttatggatctgataaaatctagatctctaatatttttaagcccaagccccttggacactgcagctcttttcagtttttgcttatacacaattcattctttgcagctaattaagccgaagaagcctgggaatcaagtttgaaacaaagattaataaagttctttgcctagta

SEQ ID NO: 326881 - DNA, 977 bp, Homo sapiens
gggctgcaggaattcggcacgaggttgcgtccccgcgtgtgtgcgcctaatctcaggtggtccacccgagaccccttgagcaccaaccctagtcccccgcgcggccccttattcgctccgacaaggtacaaaaaggctctggacggcggcgtggtaggaggacgggagcgggggcgggaagttccctgaaggagcgagacagggagggacagggcagaggaggagaggaaggcgatgcgacggacaggcgcacccgctcaggctgactctcgggggcgaggtcgagccaggggcggctgccctgggggcgaggcgacgctgtctcaacctccacctcgcggcggaacccgaggacaggagcctcagatgaaagaaacaatcatgaaccaggaaaaactcgccaaactgcaggcacaagtgcgcattggtgggaaaggaactgctcgcagaaagaagaaggtggttcatagaacagccacagcagatgacaaaaaacttcagttctccttaaagaagttaggggtaaacaatatctctggtattgaagaggtgaatatgtttacaaaccaaggaacagtgatccactttaacaaccctaaagttcaggcatctctggcagcgaacactttcaccattacaggccatgctgagacaaagcagctgacagaaatgctacccagcatcttaaaccagcttggtgcggatagtctgactagtttaaggagactggccgaagctctgcccaaacaatctgtggatggaaaagcaccacttgctactggagaggatgatgatgatgaagttccagatcttgtggagaattttgatgaggcttccaagaatgaggcaaactgaattgagtcaacttctgaagataaaacctgaagaagttactgggagctgctattttatattatgactgctttttaagaaatttttgtttatggatctgataaaatctagatctctaatatttt

SEQ ID NO: 326882 - DNA, 1049 bp, Homo sapiens
gggctgcaggaattcggcacgaggttgcgtccccgcgtgtgtgcgcctaatctcaggtggtccacccgagaccccttgagcaccaaccctagtcccccgcgcggccccttattcgctccgacaaggtacaaaaaggctctggacggcggcgtggtaggaggacgggagcgggggcgggaagttccctgaaggagcgagacagggagggacagggcagaggaggagaggaaggcgatgcgacggacaggcgcacccgctcaggctgactctcgggggcgaggtcgagccaggggcggctgccctgggggcgaggcgacgctgtctcaacctccacctcgcggcggaacccgaggacaggagcctcagatgaaagaaacaatcatgaaccaggaaaaactcgccaaactgcaggcacaagtgcgcattggtgggaaaggaactgctcgcagaaagaagaaggtggttcatagaacagccacagcagatgacaaaaaacttcagttctccttaaagaagttaggggtaaacaatatctctggtattgaagaggtgaatatgtttacaaaccaaggaacagtgatccactttaacaaccctaaagttcaggcatctctggcagcgaacactttcaccattacaggccatgctgagacaaagcagctgacagaaatgctacccagcatcttaaaccagcttggtgcggatagtctgactagtttaaggagactggccgaagctctgcccaaacaatctgtggatggaaaagcaccacttgctactggagaggatgatgatgatgaagttccagatcttgtggagaattttgatgaggcttccaagaatgaggcaaactgaattgagtcaacttctgaagataaaacctgaagaagttactgggagctgctattttatattatgactgctttttaagaacactgcagctcttttcagtttttgcttatacacaattcattctttgcagctaattaagccgaagaagcctgggaatcaagtttgaaacaaagattaataaagttctttgcctagta

SEQ ID NO: 326883 - DNA, 470 bp, Homo sapiens
atgggttgaccgtggcttgtgggttgaccgtggcttgtgggttgaccgtggcttggtgcggatagtctgactagtttaaggagactggccgaagctctgcccaaacaatctgtggatggaaaagcaccacttgctactggagaggatgatgatgatgaagttccagatcttgtggagaattttgatgaggcttccaagaatgaggcaaactgaattgagtcaacttctgaagataaaacctgaagaagttactgggagctgctattttatattatgactgctttttaagaaatttttgtttatggatctgataaaatctagatctctaatatttttaagcccaagccccttggacactgcagctcttttcagtttttgcttatacacaattcattctttgcagctaattaagccgaagaagcctgggaatcaagtttgaaacaaagattaataaagttctttgcctagta

SEQ ID NO: 326884 - DNA, 369 bp, Homo sapiens
gggctgcaggaattcggcacgaggttgcgtccccgcgtgtgtgcgcctaatctcaggtggtccacccgagaccccttgagcaccaaccctagtcccccgcgcggccccttattcgctccgacaaggtacaaaaaggctctggacggcggcgtggtaggaggacgggagcgggggcgggaagttccctgaaggagcgagacagggagggacagggcagaggaggagaggaaggttatgctacttttgtgtcattctgttcacgctgacattttgtgtgtgtagtgttcttttccctcttctgctttcgaatttttttttctctctgttacgttcctctttttttctgtttctttttcttcttttttactg

SEQ ID NO: 326885 - DNA, 385 bp, Homo sapiens
tcccattttttgcttctatcttcgccttagcctgcctgctcactgcataagtttatgattatggtaatgttcttatacagatccaaaggtcagaaatgaattggaaactattcccatttgaaaaatatctgttgtggtataaatgtgctgttttctttcctcttctccctgactttaggaactgctcgcagaaagaagaaggtggttcatagaacagccacagcagatgacaaaaaacttcagttctccttaaagaagttaggggtaaacaatatctctggtattgaagaggcaagtatcaaattttgttactttaaaaaacaagatttggctgggaaaagttaacgttaatgcattaaatgggttgttttttttttttaactta

SEQ ID NO: 326886 - DNA, 569 bp, Homo sapiens
gggctgcaggaattcggcacgaggttgcgtccccgcgtgtgtgcgcctaatctcaggtggtccacccgagaccccttgagcaccaaccctagtcccccgcgcggccccttattcgctccgacaagatgaaagaaacaatcatgaaccaggaaaaactcgccaaactgcaggcacaagtgcgcattggtgggaaaggaactgctcgcagaaagaagaaggtggttcatagaacagccacagcagatgacaaaaaacttcagttctccttaaagaagttaggggtaaacaatatctctggtattgaagaggtgaatatgtttacaaaccaaggaacagtgatccactttaacaaccctaaagttcaggcatctctggcagcgaacactttcaccattacaggccatgctgagacaaagcagctgacagaaatgctacccagcatcttaaaccagcttggtgcggatagtctgacgctgttgctctgtggagagtgtggccttgtctcggccttggaacaggctttcagcatggatttaaatcgcccgctctcaaaatgcttcattgggatt

SEQ ID NO: 326887 - DNA, 2374 bp, Homo sapiens
gaggccgcatataaacgcgctccccgggccaggctcgctgcgaaggacatttgggctgtgtgtgcgacgcgggtcggaggggcagtcgggggaaccgcgaagaagccgaggagcccggagccccgcgtgacgctcctctctcagtccaaaagcggcttttggttcggcgcagagagacccgggggtctagcttttcctcgaaaagcgccgccctgcccttggccccgagaacagacaaagagcaccgcagggccgatcacgctgggggcgctgaggccggccatggtcatggaagtgggcaccctggacgctggaggcctgcgggcgctgctgggggagcgagcggcgcaatgcctgctgctggactgccgctccttcttcgctttcaacgccggccacatcgccggctctgtcaacgtgcgcttcagcaccatcgtgcggcgccgggccaagggcgccatgggcctggagcacatcgtgcccaacgccgagctccgcggccgcctgctggccggcgcctaccacgccgtggtgttgctggacgagcgcagcgccgccctggacggcgccaagcgcgacggcaccctggccctggcggccggcgcgctctgccgcgaggcgcgcgccgcgcaagtcttcttcctcaaaggaggatacgaagcgttttcggcttcctgcccggagctgtgcagcaaacagtcgacccccatggggctcagccttcccctgagtactagcgtccctgacagcgcggaatctgggtgcagttcctgcagtaccccactctacgatcagggtggcccggtggaaatcctgccctttctgtacctgggcagtgcgtatcacgcttcccgcaaggacatgctggatgccttgggcataactgccttgatcaacgtctcagccaattgtcccaaccattttgagggtcactaccagtacaagagcatccctgtggaggacaaccacaaggcagacatcagctcctggttcaacgaggccattgacttcatagactccatcaagaatgctggaggaagggtgtttgtccactgccaggcaggcatttcccggtcagccaccatctgccttgcttaccttatgaggactaatcgagtcaagctggacgaggcctttgagtttgtgaagcagaggcgaagcatcatctctcccaacttcagcttcatgggccagctgctgcagtttgagtcccaggtgctggctccgcactgttcggcagaggctgggagccccgccatggctgtgctcgaccgaggcacctccaccaccaccgtgttcaacttccccgtctccatccctgtccactccacgaacagtgcgctgagctaccttcagagccccattacgacctctcccagctgctgaaaggccacgggaggtgaggctcttcacatcccattgggactccatgctccttgagaggagaaatgcaataactctgggaggggctcgagagggctggtccttatttatttaacttcacccgagttcctctgggtttctaagcagttatggtgatgacttagcgtcaagacatttgctgaactcagcacattcgggaccaatatatagtgggtacatcaagtccatctgacaaaatggggcagaagagaaaggactcagtgtgtgatccggtttctttttgctcgcccctgttttttgtagaatctcttcatgcttgacatacctaccagtattattcccgacgacacatatacatatgagaatataccttatttatttttgtgtaggtgtctgccttcacaaatgtcattgtctactcctagaagaaccaaatacctcaatttttgtttttgagtactgtactatcctgtaaatatatcttaagcaggtttgttttcagcactgatggaaaataccagtgttgggtttttttttagttgccaacagttgtatgtttgctgattatttatgacctgaaataatatatttcttcttctaagaagacattttgttacataaggatgacttttttatacaatggaataaattatggcatttctattgaaataccaccaccacacccacccccccccacaccctttccgccccccccgccccccgaaaacgcctcctaacaccatctcgctcgggcgcgacggccccacatcggcactcgaccccggcccaacacctggccccaagggacacatcccggtctcgcagccccgcgcgccggcgttctccgcacacattaaaaacaaaggccccggggcaaccccgcgctctttccgaccacactccccataagggccactcccgagaggacactaacggcgcttcaccaccagcggcccccaggcactccattaccacattcccccgcccccag

SEQ ID NO: 326888 - DNA, 2418 bp, Homo sapiens
gaggccgcatataaacgcgctccccgggccaggctcgctgcgaaggacatttgggctgtgtgtgcgacgcgggtcggaggggcagtcgggggaaccgcgaagaagccgaggagcccggagccccgcgtgacgctcctctctcagtccaaaagcggcttttggttcggcgcagagagacccgggggtctagcttttcctcgaaaagcgccgccctgcccttggccccgagaacagacaaagagcaccgcagggccgatcacgctgggggcgctgaggccggccatggtcatggaagtgggcaccctggacgctggaggcctgcgggcgctgctgggggagcgagcggcgcaatgcctgctgctggactgccgctccttcttcgctttcaacgccggccacatcgccggctctgtcaacgtgcgcttcagcaccatcgtgcggcgccgggccaagggcgccatgggcctggagcacatcgtgcccaacgccgagctccgcggccgcctgctggccggcgcctaccacgccgtggtgttgctggacgagcgcagcgccgccctggacggcgccaagcgcgacggcaccctggccctggcggccggcgcgctctgccgcgaggcgcgcgccgcgcaagtcttcttcctcaaaggaggatacgaagcgttttcggcttcctgcccggagctgtgcagcaaacagtcgacccccatggggctcagccttcccctgagtactagcgtccctgacagcgcggaatctgggtgcagttcctgcagtaccccactctacgatcaggttagtaggtgtccctgccacagggaagaagtaagaactggcaaaggcatggaagagtagtgccagggagaatatagaaagtgacctgcagcattatttataacggaggggacacagggatatgatttattccacagttaagtggtctgacggagccgagtctccaattgtaggctctacggaaatgaacttgctggtcctgcccaggcaaatgggcttagttccctatttatttatcctccagcaacagaactgagttcactcggtatctgaaattgacttttccagcagaaagtttttgtgggtatgggcactggccttggctttgagcaagcttgatgaatgttggatatttctggatttcagggtggcccggtggaaatcctgccctttctgtacctgggcagtgcgtatcacgcttcccgcaaggacatgctggatgccttgggcataactgccttgatcaacgtctcagccaattgtcccaaccattttgagggtcactaccagtacaagagcatccctgtggaggacaaccacaaggcagacatcagctcctggttcaacgaggccattgacttcatagactccatcaagaatgctggaggaagggtgtttgtccactgccaggcaggcatttcccggtcagccaccatctgccttgcttaccttatgaggactaatcgagtcaagctggacgaggcctttgagtttgtgaagcagaggcgaagcatcatctctcccaacttcagcttcatgggccagctgctgcagtttgagtcccaggtgctggctccgcactgttcggcagaggctgggagccccgccatggctgtgctcgaccgaggcacctccaccaccaccgtgttcaacttccccgtctccatccctgtccactccacgaacagtgcgctgagctaccttcagagccccattacgacctctcccagctgctgaaaggccacgggaggtgaggctcttcacatcccattgggactccatgctccttgagaggagaaatgcaataactctgggaggggctcgagagggctggtccttatttatttaacttcacccgagttcctctgggtttctaagcagttatggtgatgacttagcgtcaagacatttgctgaactcagcacattcgggaccaatatatagtgggtacatcaagtccatctgacaaaatggggcagaagagaaaggactcagtgtgtgatccggtttctttttgctcgcccctgttttttgtagaatctcttcatgcttgacatacctaccagtattattcccgacgacacatatacatatgagaatataccttatttatttttgtgtaggtgtctgccttcacaaatgtcattgtctactcctagaagaaccaaatacctcaatttttgtttttgagtactgtactatcctgtaaatatatcttaagcaggtttgttttcagcactgatggaaaataccagtgttgggtttttttttagttgccaacagttgtatgtttgctgattatttatgacctgaaataatatatttcttcttctaagaagacattttgttacataaggatgacttttttatacaatggaataaattatggcatttctattgaaa

SEQ ID NO: 326889 - DNA, 1994 bp, Homo sapiens
gaggccgcatataaacgcgctccccgggccaggctcgctgcgaaggacatttgggctgtgtgtgcgacgcgggtcggaggggcagtcgggggaaccgcgaagaagccgaggagcccggagccccgcgtgacgctcctctctcagtccaaaagcggcttttggttcggcgcagagagacccgggggtctagcttttcctcgaaaagcgccgccctgcccttggccccgagaacagacaaagagcaccgcagggccgatcacgctgggggcgctgaggccggccatggtcatggaagtgggcaccctggacgctggaggcctgcgggcgctgctgggggagcgagcggcgcaatgcctgctgctggactgccgctccttcttcgctttcaacgccggccacatcgccggctctgtcaacgtgcgcttcagcaccatcgtgcggcgccgggccaagggcgccatgggcctggagcacatcgtgcccaacgccgagctccgcggccgcctgctggccggcgcctaccacgccgtggtgttgctggacgagcgcagcgccgccctggacggcgccaagcgcgacggcaccctggccctggcggccggcgcgctctgccgcgaggcgcgcgccgcgcaagtcttcttcctcaaaggaggatacgaagcgttttcggcttcctgcccggagctgtgcagcaaacagtcgacccccatggggctcagccttcccctgagtactagcgtccctgacagcgcggaatctgggtgcagttcctgcagtaccccactctacgatcagggtggcccggtggaaatcctgccctttctgtacctgggcagtgcgtatcacgcttcccgcaaggacatgctggatgccttgggcataactgccttgatcaacgtctcagccaattgtcccaaccattttgagggtcactaccagtacaagagcatccctgtggaggacaaccacaaggcagacatcagctcctggttcaacgaggccattgacttcatagactccatcaagaatgctggaggaagggtgtttgtccactgccaggcaggcatttcccggtcagccaccatctgccttgcttaccttatgaggactaatcgagtcaagctggacgaggcctttgagtttgtgaagcagaggcgaagcatcatctctcccaacttcagcttcatgggccagctgctgcagtttgagtcccaggtgctggctccgcactgttcggcagaggctgggagccccgccatggctgtgctcgaccgaggcacctccaccaccaccgtgttcaacttccccgtctccatccctgtccactccacgaacagtgcgctgagctaccttcagagccccattacgacctctcccagctgctgaaaggccacgggaggtgaggctcttcacatcccattgggactccatgctccttgagaggagaaatgcaataactctgggaggggctcgagagggctggtccttatttatttaacttcacccgagttcctctgggtttctaagcagttatggtgatgacttagcgtcaagacatttgctgaactcagcacattcgggaccaatatatagtgggtacatcaagtccatctgacaaaatggggcagaagagaaaggactcagtgtgtgatccggtttctttttgctcgcccctgttttttgtagaatctcttcatgcttgacatacctaccagtattattcccgacgacacatatacatatgagaatataccttatttatttttgtgtaggtgtctgccttcacaaatgtcattgtctactcctagaagaaccaaatacctcaatttttgtttttgagtactgtactatcctgtaaatatatttgccaacagttgtatgtttgctgattatttatgacctgaaataatatatttcttcttctaagaagacattttgttacataaggatgacttttttatacaatggaataaattatggcatttctattgaaa

SEQ ID NO: 326890 - DNA, 2758 bp, Homo sapiens
gaggccgcatataaacgcgctccccgggccaggctcgctgcgaaggacatttgggctgtgtgtgcgacgcgggtcggaggggcagtcgggggaaccgcgaagaagccgaggagcccggagccccgcgtgacgctcctctctcagtccaaaagcggcttttggttcggcgcagagagacccgggggtctagcttttcctcgaaaagcgccgccctgcccttggccccgagaacagacaaagagcaccgcagggccgatcacgctgggggcgctgaggccggccatggtcatggaagtgggcaccctggacgctggaggcctgcgggcgctgctgggggagcgagcggcgcaatgcctgctgctggactgccgctccttcttcgctttcaacgccggccacatcgccggctctgtcaacgtgcgcttcagcaccatcgtgcggcgccgggccaagggcgccatgggcctggagcacatcgtgcccaacgccgagctccgcggccgcctgctggccggcgcctaccacgccgtggtgttgctggacgagcgcagcgccgccctggacggcgccaagcgcgacggcaccctggccctggcggccggcgcgctctgccgcgaggcgcgcgccgcgcaagtcttcttcctcaaaggaggatacgaagcgttttcggcttcctgcccggagctgtgcagcaaacagtcgacccccatggggctcagccttcccctgagtactagcgtccctgacagcgcggaatctgggtgcagttcctgcagtaccccactctacgatcaggttagtaggtgtccctgccacagggaagaagtaagaactggcaaaggcatggaagagtagtgccagggagaatatagaaagtgacctgcagcattatttataacggaggggacacagggatatgatttattccacagttaagtggtctgacggagccgagtctccaattgtaggctctacggaaatgaacttgctggtcctgcccaggcaaatgggcttagttccctatttatttatcctccagcaacagaactgagttcactcggtatctgaaattgacttttccagcagaaagtttttgtgggtatgggcactggccttggctttgagcaagcttgatgaatgttggatatttctggatttcagggtggcccggtggaaatcctgccctttctgtacctgggcagtgcgtatcacgcttcccgcaaggacaaccacaaggcagacatcagctcctggttcaacgaggccattgacttcataggtaaatggaatggatgcctggggcttttctgcctttctcttctcattttagccactaagcccaacctctgtggcaagagcttgaagttttctgagccttcttccacacattcagtatcagtctggtgtgggcaacattcctgtaaaatatgaatttgattcgatgtcccactttacagatttgcaaagtggggctcacaaagttgaattgactggtctgagatctatctgctaagtggaaatccccagtctgagtttaaatcctgtgccatcctttgcacagtgcccacgttgcctccatgaacagtatccatgtgatggcatgtggtgatgttgaccatttctagacaagacacacatgacctttctcagatacactgtacctgggcttggggtggttctcctgaactctcaagtaaccagccgctcctttggttttccagactccatcaagaatgctggaggaagggtgtttgtccactgccaggcaggcatttcccggtcagccaccatctgccttgcttaccttatgaggactaatcgagtcaagctggacgaggcctttgagtttgtgaagcagaggcgaagcatcatctctcccaacttcagcttcatgggccagctgctgcagtttgagtcccaggtgctggctccgcactgttcggcagaggctgggagccccgccatggctgtgctcgaccgaggcacctccaccaccaccgtgttcaacttccccgtctccatccctgtccactccacgaacagtgcgctgagctaccttcagagccccattacgacctctcccagctgctgaaaggccacgggaggtgaggctcttcacatcccattgggactccatgctccttgagaggagaaatgcaataactctgggaggggctcgagagggctggtccttatttatttaacttcacccgagttcctctgggtttctaagcagttatggtgatgacttagcgtcaagacatttgctgaactcagcacattcgggaccaatatatagtgggtacatcaagtccatctgacaaaatggggcagaagagaaaggactcagtgtgtgatccggtttctttttgctcgcccctgttttttgtagaatctcttcatgcttgacatacctaccagtattattcccgacgacacatatacatatgagaatataccttatttatttttgtgtaggtgtctgccttcacaaatgtcattgtctactcctagaagaaccaaatacctcaatttttgtttttgagtactgtactatcctgtaaatatatcttaagcaggtttgttttcagcactgatggaaaataccagtgttgggtttttttttagttgccaacagttgtatgtttgctgattatttatgacctgaaataatatatttcttcttctaagaagacattttgttacataaggatgacttttttatacaatggaataaattatggcatttctattgaaa

SEQ ID NO: 326891 - DNA, 1968 bp, Homo sapiens
gaggccgcatataaacgcgctccccgggccaggctcgctgcgaaggacatttgggctgtgtgtgcgacgcgggtcggaggggcagtcgggggaaccgcgaagaagccgaggagcccggagccccgcgtgacgctcctctctcagtccaaaagcggcttttggttcggcgcagagagacccgggggtctagcttttcctcgaaaagcgccgccctgcccttggccccgagaacagacaaagagcaccgcagggccgatcacgctgggggcgctgaggccggccatggtcatggaagtgggcaccctggacgctggaggcctgcgggcgctgctgggggagcgagcggcgcaatgcctgctgctggactgccgctccttcttcgctttcaacgccggccacatcgccggctctgtcaacgtgcgcttcagcaccatcgtgcggcgccgggccaagggcgccatgggcctggagcacatcgtgcccaacgccgagctccgcggccgcctgctggccggcgcctaccacgccgtggtgttgctggacgagcgcagcgccgccctggacggcgccaagcgcgacggcaccctggccctggcggccggcgcgctctgccgcgaggcgcgcgccgcgcaagtcttcttcctcaaaggaggatacgaagcgttttcggcttcctgcccggagctgtgcagcaaacagtcgacccccatggggctcagccttcccctgagtactagcgtccctgacagcgcggaatctgggtgcagttcctgcagtaccccactctacgatcagggtggcccggtggaaatcctgccctttctgtacctgggcagtgcgtatcacgcttcccgcaaggacatgctggatgccttgggcataactgccttgatcaacgtctcagccaattgtcccaaccattttgagggtcactaccagtacaagagcatccctgtggaggacaaccacaaggcagacatcagctcctggttcaacgaggccattgacttcatagactccatcaagaatgctggaggaagggtgtttgtccactgccaggcaggcatttcccggtcagccaccatctgccttgcttaccttatgaggactaatcgagtcaagctggacgaggcctttgatccgcactgttcggcagaggctgggagccccgccatggctgtgctcgaccgaggcacctccaccaccaccgtgttcaacttccccgtctccatccctgtccactccacgaacagtgcgctgagctaccttcagagccccattacgacctctcccagctgctgaaaggccacgggaggtgaggctcttcacatcccattgggactccatgctccttgagaggagaaatgcaataactctgggaggggctcgagagggctggtccttatttatttaacttcacccgagttcctctgggtttctaagcagttatggtgatgacttagcgtcaagacatttgctgaactcagcacattcgggaccaatatatagtgggtacatcaagtccatctgacaaaatggggcagaagagaaaggactcagtgtgtgatccggtttctttttgctcgcccctgttttttgtagaatctcttcatgcttgacatacctaccagtattattcccgacgacacatatacatatgagaatataccttatttatttttgtgtaggtgtctgccttcacaaatgtcattgtctactcctagaagaaccaaatacctcaatttttgtttttgagtactgtactatcctgtaaatatatcttaagcaggtttgttttcagcactgatggaaaataccagtgttgggtttttttttagttgccaacagttgtatgtttgctgattatttatgacctgaaataatatatttcttcttctaagaagacattttgttacataaggatgacttttttatacaatggaataaattatggcatttctattgaaa

SEQ ID NO: 326892 - DNA, 1463 bp, Homo sapiens
gaggccgcatataaacgcgctccccgggccaggctcgctgcgaaggacatttgggctgtgtgtgcgacgcgggtcggaggggcagtcgggggaaccgcgaagaagccgaggagcccggagccccgcgtgacgctcctctctcagtccaaaagcggcttttggttcggcgcagagagacccgggggtctagcttttcctcgaaaagcgccgccctgcccttggccccgagaacagacaaagagcaccgcagggccgatcacgctgggggcgctgaggccggccatggtcatggaagtgggcaccctggacgctggaggcctgcgggcgctgctgggggagcgagcggcgcaatgcctgctgctggactgccgctccttcttcgctttcaacgccggccacatcgccggctctgtcaacgtgcgcttcagcaccatcgtgcggcgccgggccaagggcgccatgggcctggagcacatcgtgcccaacgccgagctccgcggccgcctgctggccggcgcctaccacgccgtggtgttgctggacgagcgcagcgccgccctggacggcgccaagcgcgacggcaccctggccctggcggccggcgcgctctgccgcgaggcgcgcgccgcgcaagtcttcttcctcaaaggaggatacgaagcgttttcggcttcctgcccggagctgtgcagcaaacagtcgacccccatggggctcagccttcccctgagtactagcgtccctgacagcgcggaatctgggtgcagttcctgcagtaccccactctacgatcagggtggcccggtggaaatcctgccctttctgtacctgggcagtgcgtatcacgcttcccgcaaggacatgctggatgccttgggcataactgccttgatcaacgtctcagccaattgtcccaaccattttgagggtcactaccagtacaagagcatccctgtggaggacaaccacaaggcagacatcagctcctggttcaacgaggccattgacttcatagactccatcaagaatgctggaggaagggtgtttgtccactgccaggcaggcatttcccggtcagccaccatctgccttgcttaccttatgaggactaatcgagtcaagctggacgaggcctttgagtttgtgaagcagaggcgaagcatcatctctcccaacttcagcttcatgggccagctgctgcagtttgagtcccaggtgctggctccgcactgttcggcagaggctgggagccccgccatggctgtgctcgaccgaggcctgcgggcgctgctgggggagcgagcggcgcaatgcctgctgctggactgccgctccttcttcgctttcaacgccggccacatcgccggctctgtcaacgtgcgcttcagcaccatcgtgcggcgccgggccaagggcgccatgggcctggagcacatcgtgcccaacgccgagctccgcggccg

SEQ ID NO: 326893 - DNA, 996 bp, Homo sapiens
acaatcaggaagtagaaactggggctttactgaaaaccaaggtctggaagatgggatcgagtcaagctggacgaggcctttgagtttgtgaagcagaggcgaagcatcatctctcccaacttcagcttcatgggccagctgctgcagtttgagtcccaggtgctggctccgcactgttcggcagaggctgggagccccgccatggctgtgctcgaccgaggcacctccaccaccaccgtgttcaacttccccgtctccatccctgtccactccacgaacagtgcgctgagctaccttcagagccccattacgacctctcccagctgctgaaaggccacgggaggtgaggctcttcacatcccattgggactccatgctccttgagaggagaaatgcaataactctgggaggggctcgagagggctggtccttatttatttaacttcacccgagttcctctgggtttctaagcagttatggtgatgacttagcgtcaagacatttgctgaactcagcacattcgggaccaatatatagtgggtacatcaagtccatctgacaaaatggggcagaagagaaaggactcagtgtgtgatccggtttctttttgctcgcccctgttttttgtagaatctcttcatgcttgacatacctaccagtattattcccgacgacacatatacatatgagaatataccttatttatttttgtgtaggtgtctgccttcacaaatgtcattgtctactcctagaagaaccaaatacctcaatttttgtttttgagtactgtactatcctgtaaatatatcttaagcaggtttgttttcagcactgatggaaaataccagtgttgggtttttttttagttgccaacagttgtatgtttgctgattatttatgacctgaaataatatatttcttcttctaagaagacattttgttacataaggatgacttttttatacaatggaataaattatggcatttctattgaaa

SEQ ID NO: 326894 - DNA, 2052 bp, Homo sapiens
gaggccgcatataaacgcgctccccgggccaggctcgctgcgaaggacatttgggctgtgtgtgcgacgcgggtcggaggggcagtcgggggaaccgcgaagaagccgaggagcccggagccccgcgtgacgctcctctctcagtccaaaagcggcttttggttcggcgcagagagacccgggggtctagcttttcctcgaaaagcgccgccctgcccttggccccgagaacagacaaagagcaccgcagggccgatcacgctgggggcgctgaggccggccatggtcatggaagtgggcaccctggacgctggaggcctgcgggcgctgctgggggagcgagcggcgcaatgcctgctgctggactgccgctccttcttcgctttcaacgccggccacatcgccggctctgtcaacgtgcgcttcagcaccatcgtgcggcgccgggccaagggcgccatgggcctggagcacatcgtgcccaacgccgagctccgcggccgcctgctggccggcgcctaccacgccgtggtgttgctggacgagcgcagcgccgccctggacggcgccaagcgcgacggcaccctggccctggcggccggcgcgctctgccgcgaggcgcgcgccgcgcaagtcttcttcctcaaaggaggatacgaagcgttttcggcttcctgcccggagctgtgcagcaaacagtcgacccccatggggctcagccttcccctgagtactagcgtccctgacagcgcggaatctgggtgcagttcctgcagtaccccactctacgatcagggtggcccggtggaaatcctgccctttctgtacctgggcagtgcgtatcacgcttcccgcaaggacatgctggatgccttgggcataactgccttgatcaacgtctcagccaattgtcccaaccattttgagggtcactaccagtacaagagcatccctgtggaggacaaccacaaggcagacatcagctcctggttcaacgaggccattgacttcatagactccatcaagaatgctggaggaagggtgtttgtccactgccaggcaggcatttcccggtcagccaccatctgccttgcttaccttatgaggactaatcgagtcaagctggacgaggcctttgagtttgtgaagcagaggcgaagcatcatctctcccaacttcagcttcatgggccagctgctgcagtttgagtcccaggtgctggctccgcactgttcggcagaggctgggagccccgccatggctgtgctcgaccgaggcacctccaccaccaccgtgttcaacttccccgtctccatccctgtccactccacgaacagtgcgctgagctaccttcagagccccattacgacctctcccagctgctgaaaggccacgggaggtgaggctcttcacatcccattgggactccatgctccttgagaggagaaatgcaataactctgggaggggctcgagagggctggtccttatttatttaacttcacccgagttcctctgggtttctaagcagttatggtgatgacttagcgtcaagacatttgctgaactcagcacattcgggaccaatatatagtgggtacatcaagtccatctgacaaaatggggcagaagagaaaggactcagtgtgtgatccggtttctttttgctcgcccctgttttttgtagaatctcttcatgcttgacatacctaccagtattattcccgacgacacatatacatatgagaatataccttatttatttttgtgtaggtgtctgccttcacaaatgtcattgtctactcctagaagaaccaaatacctcaatttttgtttttgagtactgtactatcctgtaaatatatcttaagcaggtttgttttcagcactgatggaaaataccagtgttgggtttttttttagttgccaacagttgtatgtttgctgattatttatgacctgaaataatatatttcttcttctaagaagacattttgttacataaggatgacttttttatacaatggaataaattatggcatttctattgaaa

SEQ ID NO: 326895 - DNA, 2244 bp, Homo sapiens
gaggccgcatataaacgcgctccccgggccaggctcgctgcgaaggacatttgggctgtgtgtgcgacgcgggtcggaggggcagtcgggggaaccgcgaagaagccgaggagcccggagccccgcgtgacgctcctctctcagtccaaaagcggcttttggttcggcgcagagagacccgggggtctagcttttcctcgaaaagcgccgccctgcccttggccccgagaacagacaaagagcaccgcagggccgatcacgctgggggcgctgaggccggccatggtcatggaagtgggcaccctggacgctggaggcctgcgggcgctgctgggggagcgagcggcgcaatgcctgctgctggactgccgctccttcttcgctttcaacgccggccacatcgccggctctgtcaacgtgcgcttcagcaccatcgtgcggcgccgggccaagggcgccatgggcctggagcacatcgtgcccaacgccgagctccgcggccgcctgctggccggcgcctaccacgccgtggtgttgctggacgagcgcagcgccgccctggacggcgccaagcgcgacggcaccctggccctggcggccggcgcgctctgccgcgaggcgcgcgccgcgcaagtcttcttcctcaaaggaggatacgaagcgttttcggcttcctgcccggagctgtgcagcaaacagtcgacccccatggggctcagccttcccctgagtactagcgtccctgacagcgcggaatctgggtgcagttcctgcagtaccccactctacgatcagggtggcccggtggaaatcctgccctttctgtacctgggcagtgcgtatcacgcttcccgcaaggacatgctggatgccttgggcataactgccttgatcaacgtctcagccaattgtcccaaccattttgagggtcactaccagtacaagagcatccctgtggaggacaaccacaaggcagacatcagctcctggttcaacgaggccattgacttcatagactccatcaagaatgctggaggaagggtgtttgtccactgccaggcaggcatttcccggtcagccaccatctgccttgcttaccttatgaggactaatcgagtcaagctggacgaggcctttgagtttgtgaagcagaggcgaagcatcatctctcccaacttcagcttcatgggccagctgctgcagtttgagtcccaggtgctggctccgcactgttcggcagaggctgggagccccgccatggctgtgctcgaccgaggcacctccaccaccaccgtgttcaacttccccgtctccatccctgtccactccacgaacagtgcgctgagctaccttcagagccccattacgacctctcccagctgctgaaaggccacgggaggtgaggctcttcacatcccattgggactccatgctccttgagaggagaaatgcaataactctgggaggggctcgagagggctggtccttatttatttaacttcacccgagttcctctgggtttctaagcagttatggtgatgacttagcgtcaagacatttgctgaactcagcacattcgggaccaatatatagtgggtacatcaagtccatctgacaaaatggggcagaagagaaaggactcagtgtgtgatccggtttctttttgctcgcccctgttttttgtagaatctcttcatgcttgacatacctaccagtattattcccgacgacacatatacatatgagaatataccttatttatttttgtgtaggtgtctgccttcacaaatgtcattgtctactcctagaagaaccaaatacctcaatttttgtttttgagtactgtactatcctgtaaatatatcttaagcaggtttgttttcagcactgatggaaaataccagtgttgggtttttttttagttgccaacagttgtatgtttgctgattatttatgacctgaaataatatatttcttcttctaagaagacattttgttacataaggatgacttttttatacaatggaataaattatggcatttctattgaaaaaaaaaaaaaaaaaaaaaaaaaaaaaaaagagggggcggcgcgcgccctcaagaatatattcccccgccgagggggccccaagttatagcgcggttccccggttttcttggttcacaagggggccccctaaagagggggacggaattaaaagggcaaggcaacgggcccgggttaaaaaggcgggaacggga

SEQ ID NO: 326896 - DNA, 2486 bp, Homo sapiens
gaggccgcatataaacgcgctccccgggccaggctcgctgcgaaggacatttgggctgtgtgtgcgacgcgggtcggaggggcagtcgggggaaccgcgaagaagccgaggagcccggagccccgcgtgacgctcctctctcagtccaaaagcggcttttggttcggcgcagagagacccgggggtctagcttttcctcgaaaagcgccgccctgcccttggccccgagaacagacaaagagcaccgcagggccgatcacgctgggggcgctgaggccggccatggtcatggaagtgggcaccctggacgctggaggcctgcgggcgctgctgggggagcgagcggcgcaatgcctgctgctggactgccgctccttcttcgctttcaacgccggccacatcgccggctctgtcaacgtgcgcttcagcaccatcgtgcggcgccgggccaagggcgccatgggcctggagcacatcgtgcccaacgccgagctccgcggccgcctgctggccggcgcctaccacgccgtggtgttgctggacgagcgcagcgccgccctggacggcgccaagcgcgacggcaccctggccctggcggccggcgcgctctgccgcgaggcgcgcgccgcgcaagtcttcttcctcaaaggaggatacgaagcgttttcggcttcctgcccggagctgtgcagcaaacagtcgacccccatggggctcagccttcccctgagtactagcgtccctgacagcgcggaatctgggtgcagttcctgcagtaccccactctacgatcagggtggcccggtggaaatcctgccctttctgtacctgggcagtgcgtatcacgcttcccgcaaggacatgctggatgccttgggcataactgccttgatcaacgtctcagccaattgtcccaaccattttgagggtcactaccagtacaagagcatccctgtggaggacaaccacaaggcagacatcagctcctggttcaacgaggccattgacttcatagactccatcaagaatgctggaggaagggtgtttgtccactgccaggcaggcatttcccggtcagccaccatctgccttgcttaccttatgaggactaatcgagtcaagctggacgaggcctttgagtttgtgaagcagaggcgaagcatcatctctcccaacttcagcttcatgggccagctgctgcagtttgagtcccaggtgctggctccgcactgttcggcagaggctgggagccccgccatggctgtgctcgaccgaggcacctccaccaccaccgtgttcaacttccccgtctccatccctgtccactccacgaacagtgcgctgagctaccttcagagccccattacgacctctcccagctgctgaaaggccacgggaggtgaggctcttcacatcccattgggactccatgctccttgagaggagaaatgcaataactctgggaggggctcgagagggctggtccttatttatttaacttcacccgagttcctctgggtttctaagcagttatggtgatgacttagcgtcaagacatttgctgaactcagcacattcgggaccaatatatagtgggtacatcaagtccatctgacaaaatggggcagaagagaaaggactcagtgtgtgatccggtttctttttgctcgcccctgttttttgtagaatctcttcatgcttgacatacctaccagtattattcccgacgacacatatacatatgagaatataccttatttatttttgtgtaggtgtctgccttcacaaatgtcattgtctactcctagaagaaccaaatacctcaatttttgtttttgagtactgtactatcctgtaaatatatcttaagcaggtttgttttcagcactgatggaaaataccagtgttgggtttttttttagttgccaacagttgtatgtttgctgattatttatgacctgaaataatatatttcttcttctaagaagacattttgttacataaggatgacttttttatacaatggaataaattatggcatttctattgaaattcaacgcttttatttctttggcaaccacacccaatccctctcccactagtgaactagggaagaatttcgacaagggcctgcagaatgtgttgagatctgatcccatgccctgtggtggcccgttggtcccatgaaatggctgggttgcaagggaggaagacaagtgagtatcatgaaacaccggacgctacagctgaactcttagtattggatcagtgtgtctgcccatgcccattttagcggctctgtaacctaccatgtcacccaggatgccaaggtgtccccagagccaaagctaggaggaaatagccacttgtctggattgccttcttcatttaataccctcctcaggttaatataaaaagtcgccttcccatctctgagctgtgctggagttatgaggagacaaaagtttttccaaacacatgacata

SEQ ID NO: 326897 - DNA, 2331 bp, Homo sapiens
gaggccgcatataaacgcgctccccgggccaggctcgctgcgaaggacatttgggctgtgtgtgcgacgcgggtcggaggggcagtcgggggaaccgcgaagaagccgaggagcccggagccccgcgtgacgctcctctctcagtccaaaagcggcttttggttcggcgcagagagacccgggggtctagcttttcctcgaaaagcgccgccctgcccttggccccgagaacagacaaagagcaccgcagggccgatcacgctgggggcgctgaggccggccatggtcatggaagtgggcaccctggacgctggaggcctgcgggcgctgctgggggagcgagcggcgcaatgcctgctgctggactgccgctccttcttcgctttcaacgccggccacatcgccggctctgtcaacgtgcgcttcagcaccatcgtgcggcgccgggccaagggcgccatgggcctggagcacatcgtgcccaacgccgagctccgcggccgcctgctggccggcgcctaccacgccgtggtgttgctggacgagcgcagcgccgccctggacggcgccaagcgcgacggcaccctggccctggcggccggcgcgctctgccgcgaggcgcgcgccgcgcaagtcttcttcctcaaaggtacgccctcggggaagctcggggcgggccgcacacccctgaggttttgcccggtacccctggctctcggctcccgggggatcgccccacctgcagcgcgtgggcgctggagtacatttatctctggaacttgtcattggctttgtttggctctggaaacaaagacttgcctgggcctttccgatgtaaacttccagcccttggtgggtgggggagttgtatgaaggtgccgtgtcccggtgtcactaatggggaaaaaaaatgtctttgtattcccaggaggatacgaagcgttttcggcttcctgcccggagctgtgcagcaaacagtcgacccccatggggctcagccttcccctgagtactagcgtccctgacagcgcggaatctgggtgcagttcctgcagtaccccactctacgatcagggtggcccggtggaaatcctgccctttctgtacctgggcagtgcgtatcacgcttcccgcaaggacatgctggatgccttgggcataactgccttgatcaacgtctcagccaattgtcccaaccattttgagggtcactaccagtacaagagcatccctgtggaggacaaccacaaggcagacatcagctcctggttcaacgaggccattgacttcatagactccatcaagaatgctggaggaagggtgtttgtccactgccaggcaggcatttcccggtcagccaccatctgccttgcttaccttatgaggactaatcgagtcaagctggacgaggcctttgagtttgtgaagcagaggcgaagcatcatctctcccaacttcagcttcatgggccagctgctgcagtttgagtcccaggtgctggctccgcactgttcggcagaggctgggagccccgccatggctgtgctcgaccgaggcacctccaccaccaccgtgttcaacttccccgtctccatccctgtccactccacgaacagtgcgctgagctaccttcagagccccattacgacctctcccagctgctgaaaggccacgggaggtgaggctcttcacatcccattgggactccatgctccttgagaggagaaatgcaataactctgggaggggctcgagagggctggtccttatttatttaacttcacccgagttcctctgggtttctaagcagttatggtgatgacttagcgtcaagacatttgctgaactcagcacattcgggaccaatatatagtgggtacatcaagtccatctgacaaaatggggcagaagagaaaggactcagtgtgtgatccggtttctttttgctcgcccctgttttttgtagaatctcttcatgcttgacatacctaccagtattattcccgacgacacatatacatatgagaatataccttatttatttttgtgtaggtgtctgccttcacaaatgtcattgtctactcctagaagaaccaaatacctcaatttttgtttttgagtactgtactatcctgtaaatatatcttaagcaggtttgttttcagcactgatggaaaataccagtgttgggtttttttttagttgccaacagttgtatgtttgctgattatttatgacctgaaataatatatttcttcttctaagaagacattttgttacataaggatgacttttttatacaatggaataaattatggcatttctattgaaa

SEQ ID NO: 326898 - DNA, 2494 bp, Homo sapiens
gaggccgcatataaacgcgctccccgggccaggctcgctgcgaaggacatttgggctgtgtgtgcgacgcgggtcggaggggcagtcgggggaaccgcgaagaagccgaggagcccggagccccgcgtgacgctcctctctcagtccaaaagcggcttttggttcggcgcagagagacccgggggtctagcttttcctcgaaaagcgccgccctgcccttggccccgagaacagacaaagagcaccgcagggccgatcacgctgggggcgctgaggccggccatggtcatggaagtgggcaccctggacgctggaggcctgcgggcgctgctgggggagcgagcggcgcaatgcctgctgctggactgccgctccttcttcgctttcaacgccggccacatcgccggctctgtcaacgtgcgcttcagcaccatcgtgcggcgccgggccaagggcgccatgggcctggagcacatcgtgcccaacgccgagctccgcggccgcctgctggccggcgcctaccacgccgtggtgttgctggacgagcgcagcgccgccctggacggcgccaagcgcgacggcaccctggccctggcggccggcgcgctctgccgcgaggcgcgcgccgcgcaagtcttcttcctcaaaggaggatacgaagcgttttcggcttcctgcccggagctgtgcagcaaacagtcgacccccatggggctcagccttcccctgagtactagcgtccctgacagcgcggaatctgggtgcagttcctgcagtaccccactctacgatcagggtggcccggtggaaatcctgccctttctgtacctgggcagtgcgtatcacgcttcccgcaaggacatgctggatgccttgggcataactgccttgatcaacgtctcagccaattgtcccaaccattttgagggtcactaccagtacaagagcatccctgtggaggacaaccacaaggcagacatcagctcctggttcaacgaggccattgacttcataggtaaatggaatggatgcctggggcttttctgcctttctcttctcattttagccactaagcccaacctctgtggcaagagcttgaagttttctgagccttcttccacacattcagtatcagtctggtgtgggcaacattcctgtaaaatatgaatttgattcgatgtcccactttacagatttgcaaagtggggctcacaaagttgaattgactggtctgagatctatctgctaagtggaaatccccagtctgagtttaaatcctgtgccatcctttgcacagtgcccacgttgcctccatgaacagtatccatgtgatggcatgtggtgatgttgaccatttctagacaagacacacatgacctttctcagatacactgtacctgggcttggggtggttctcctgaactctcaagtaaccagccgctcctttggttttccagactccatcaagaatgctggaggaagggtgtttgtccactgccaggcaggcatttcccggtcagccaccatctgccttgcttaccttatgaggactaatcgagtcaagctggacgaggcctttgagtttgtgaagcagaggcgaagcatcatctctcccaacttcagcttcatgggccagctgctgcagtttgagtcccaggtgctggctccgcactgttcggcagaggctgggagccccgccatggctgtgctcgaccgaggcacctccaccaccaccgtgttcaacttccccgtctccatccctgtccactccacgaacagtgcgctgagctaccttcagagccccattacgacctctcccagctgctgaaaggccacgggaggtgaggctcttcacatcccattgggactccatgctccttgagaggagaaatgcaataactctgggaggggctcgagagggctggtccttatttatttaacttcacccgagttcctctgggtttctaagcagttatggtgatgacttagcgtcaagacatttgctgaactcagcacattcgggaccaatatatagtgggtacatcaagtccatctgacaaaatggggcagaagagaaaggactcagtgtgtgatccggtttctttttgctcgcccctgttttttgtagaatctcttcatgcttgacatacctaccagtattattcccgacgacacatatacatatgagaatataccttatttatttttgtgtaggtgtctgccttcacaaatgtcattgtctactcctagaagaaccaaatacctcaatttttgtttttgagtactgtactatcctgtaaatatatcttaagcaggtttgttttcagcactgatggaaaataccagtgttgggtttttttttagttgccaacagttgtatgtttgctgattatttatgacctgaaataatatatttcttcttctaagaagacattttgttacataaggatgacttttttatacaatggaataaattatggcatttctattgaaa

SEQ ID NO: 326899 - DNA, 1860 bp, Homo sapiens
gaggccgcatataaacgcgctccccgggccaggctcgctgcgaaggacatttgggctgtgtgtgcgacgcgggtcggaggggcagtcgggggaaccgcgaagaagccgaggagcccggagccccgcgtgacgctcctctctcagtccaaaagcggcttttggttcggcgcagagagacccgggggtctagcttttcctcgaaaagcgccgccctgcccttggccccgagaacagacaaagagcaccgcagggccgatcacgctgggggcgctgaggccggccatggtcatggaagtgggcaccctggacgctggaggcctgcgggcgctgctgggggagcgagcggcgcaatgcctgctgctggactgccgctccttcttcgctttcaacgccggccacatcgccggctctgtcaacgtgcgcttcagcaccatcgtgcggcgccgggccaagggcgccatgggcctggagcacatcgtgcccaacgccgagctccgcggccgcctgctggccggcgcctaccacgccgtggtgttgctggacgagcgcagcgccgccctggacggcgccaagcgcgacggcaccctggccctggcggccggcgcgctctgccgcgaggcgcgcgccgcgcaagtcttcttcctcaaaggaggatacgaagcgttttcggcttcctgcccggagctgtgcagcaaacagatcaacgtctcagccaattgtcccaaccattttgagggtcactaccagtacaagagcatccctgtggaggacaaccacaaggcagacatcagctcctggttcaacgaggccattgacttcatagactccatcaagaatgctggaggaagggtgtttgtccactgccaggcaggcatttcccggtcagccaccatctgccttgcttaccttatgaggactaatcgagtcaagctggacgaggcctttgagtttgtgaagcagaggcgaagcatcatctctcccaacttcagcttcatgggccagctgctgcagtttgagtcccaggtgctggctccgcactgttcggcagaggctgggagccccgccatggctgtgctcgaccgaggcacctccaccaccaccgtgttcaacttccccgtctccatccctgtccactccacgaacagtgcgctgagctaccttcagagccccattacgacctctcccagctgctgaaaggccacgggaggtgaggctcttcacatcccattgggactccatgctccttgagaggagaaatgcaataactctgggaggggctcgagagggctggtccttatttatttaacttcacccgagttcctctgggtttctaagcagttatggtgatgacttagcgtcaagacatttgctgaactcagcacattcgggaccaatatatagtgggtacatcaagtccatctgacaaaatggggcagaagagaaaggactcagtgtgtgatccggtttctttttgctcgcccctgttttttgtagaatctcttcatgcttgacatacctaccagtattattcccgacgacacatatacatatgagaatataccttatttatttttgtgtaggtgtctgccttcacaaatgtcattgtctactcctagaagaaccaaatacctcaatttttgtttttgagtactgtactatcctgtaaatatatcttaagcaggtttgttttcagcactgatggaaaataccagtgttgggtttttttttagttgccaacagttgtatgtttgctgattatttatgacctgaaataatatatttcttcttctaagaagacattttgttacataaggatgacttttttatacaatggaataaattatggcatttctattgaaa

SEQ ID NO: 326900 - DNA, 1998 bp, Homo sapiens
gaggccgcatataaacgcgctccccgggccaggctcgctgcgaaggacatttgggctgtgtgtgcgacgcgggtcggaggggcagtcgggggaaccgcgaagaagccgaggagcccggagccccgcgtgacgctcctctctcagtccaaaagcggcttttggttcggcgcagagagacccgggggtctagcttttcctcggatcacgctgggggcgctgaggccggccatggtcatggaagtgggcaccctggacgctggaggcctgcgggcgctgctgggggagcgagcggcgcaatgcctgctgctggactgccgctccttcttcgctttcaacgccggccacatcgccggctctgtcaacgtgcgcttcagcaccatcgtgcggcgccgggccaagggcgccatgggcctggagcacatcgtgcccaacgccgagctccgcggccgcctgctggccggcgcctaccacgccgtggtgttgctggacgagcgcagcgccgccctggacggcgccaagcgcgacggcaccctggccctggcggccggcgcgctctgccgcgaggcgcgcgccgcgcaagtcttcttcctcaaaggaggatacgaagcgttttcggcttcctgcccggagctgtgcagcaaacagtcgacccccatggggctcagccttcccctgagtactagcgtccctgacagcgcggaatctgggtgcagttcctgcagtaccccactctacgatcagggtggcccggtggaaatcctgccctttctgtacctgggcagtgcgtatcacgcttcccgcaaggacatgctggatgccttgggcataactgccttgatcaacgtctcagccaattgtcccaaccattttgagggtcactaccagtacaagagcatccctgtggaggacaaccacaaggcagacatcagctcctggttcaacgaggccattgacttcatagactccatcaagaatgctggaggaagggtgtttgtccactgccaggcaggcatttcccggtcagccaccatctgccttgcttaccttatgaggactaatcgagtcaagctggacgaggcctttgagtttgtgaagcagaggcgaagcatcatctctcccaacttcagcttcatgggccagctgctgcagtttgagtcccaggtgctggctccgcactgttcggcagaggctgggagccccgccatggctgtgctcgaccgaggcacctccaccaccaccgtgttcaacttccccgtctccatccctgtccactccacgaacagtgcgctgagctaccttcagagccccattacgacctctcccagctgctgaaaggccacgggaggtgaggctcttcacatcccattgggactccatgctccttgagaggagaaatgcaataactctgggaggggctcgagagggctggtccttatttatttaacttcacccgagttcctctgggtttctaagcagttatggtgatgacttagcgtcaagacatttgctgaactcagcacattcgggaccaatatatagtgggtacatcaagtccatctgacaaaatggggcagaagagaaaggactcagtgtgtgatccggtttctttttgctcgcccctgttttttgtagaatctcttcatgcttgacatacctaccagtattattcccgacgacacatatacatatgagaatataccttatttatttttgtgtaggtgtctgccttcacaaatgtcattgtctactcctagaagaaccaaatacctcaatttttgtttttgagtactgtactatcctgtaaatatatcttaagcaggtttgttttcagcactgatggaaaataccagtgttgggtttttttttagttgccaacagttgtatgtttgctgattatttatgacctgaaataatatatttcttcttctaagaagacattttgttacataaggatgacttttttatacaatggaataaattatggcatttctattgaaa

SEQ ID NO: 326901 - DNA, 1820 bp, Homo sapiens
  misc_feature (61)..(61): n is a, c, g, or t
  misc_feature (78)..(78): n is a, c, g, or t
  misc_feature (83)..(83): n is a, c, g, or t
gcagcacatatactaaaattggaacgatacagagaagattagcatggcccctgcgcaaggntgacacgcaaattcgtnaagcnttccatattttaaaacagtcgacccccatggggctcagccttcccctgagtactagcgtccctgacagcgcggaatctgggtgcagttcctgcagtaccccactctacgatcaggttagtaggtgtccctgccacagggaagaagtaagaactggcaaaggcatggaagagtagtgccagggagaatatagaaagtgacctgcagcattatttataacggaggggacacagggatatgatttattccacagttaagtggtctgacggagccgagtctccaattgtaggctctacggaaatgaacttgctggtcctgcccaggcaaatgggcttagttccctatttatttatcctccagcaacagaactgagttcactcggtatctgaaattgacttttccagcagaaagtttttgtgggtatgggcactggccttggctttgagcaagcttgatgaatgttggatatttctggatttcagggtggcccggtggaaatcctgccctttctgtacctgggcagtgcgtatcacgcttcccgcaaggacatgctggatgccttgggcataactgccttgatcaacgtctcagccaattgtcccaaccattttgagggtcactaccagtacaagagcatccctgtggaggacaaccacaaggcagacatcagctcctggttcaacgaggccattgacttcatagactccatcaagaatgctggaggaagggtgtttgtccactgccaggcaggcatttcccggtcagccaccatctgccttgcttaccttatgaggactaatcgagtcaagctggacgaggcctttgagtttgtgaagcagaggcgaagcatcatctctcccaacttcagcttcatgggccagctgctgcagtttgagtcccaggtgctggctccgcactgttcggcagaggctgggagccccgccatggctgtgctcgaccgaggcacctccaccaccaccgtgttcaacttccccgtctccatccctgtccactccacgaacagtgcgctgagctaccttcagagccccattacgacctctcccagctgctgaaaggccacgggaggtgaggctcttcacatcccattgggactccatgctccttgagaggagaaatgcaataactctgggaggggctcgagagggctggtccttatttatttaacttcacccgagttcctctgggtttctaagcagttatggtgatgacttagcgtcaagacatttgctgaactcagcacattcgggaccaatatatagtgggtacatcaagtccatctgacaaaatggggcagaagagaaaggactcagtgtgtgatccggtttctttttgctcgcccctgttttttgtagaatctcttcatgcttgacatacctaccagtattattcccgacgacacatatacatatgagaatataccttatttatttttgtgtaggtgtctgccttcacaaatgtcattgtctactcctagaagaaccaaatacctcaatttttgtttttgagtactgtactatcctgtaaatatatcttaagcaggtttgttttcagcactgatggaaaataccagtgttgggtttttttttagttgccaacagttgtatgtttgctgattatttatgacctgaaataatatatttcttcttctaagaagacattttgttacataaggatgacttttttatacaatggaataaattatggcatttctattgaaa

SEQ ID NO: 326902 - DNA, 328 bp, Homo sapiens
atgtatatgtgtgatattagttcacagaaaaatgtgaaaattcaagtggtaatgaattatctggtgaagatattacagtatttatgtctaaccatgttcttactttcctaaatatttgttgccttcataatttttaaaagctgcttgtaaggcttttataattgattaaagtgatttgttattattgataaatttatgtttaaaaaggcatttaaatcaacaaatattgattgagcacttatgtgacacactgttcttaatgctgaggaatgcattagtgtataaaaagtttgaaaagttaatgaaaataagtagagtgaggtgatag

SEQ ID NO: 326903 - DNA, 2194 bp, Homo sapiens
  misc_feature (2)..(2): n is a, c, g, or t
  misc_feature (4)..(4): n is a, c, g, or t
gngngcgccgccggccctttatagcgcgcggggcaccggctccccaagactgcgagctccccgcaccccctcgcactccctctggccggcccagggcgccttcagcccaacctccccagccccacgggcgccacggaacccgctcgatctcgccgccaactggtagacatggagacccctgcctggccccgggtcccgcgccccgagaccgccgtcgctcggacgctcctgctcggctgggtcttcgcccaggtggccggcgcttcaggcactacaaatactgtggcagcatataatttaacttggaaatcaactaatttcaagacaattttggagtgggaacccaaacccgtcaatcaagtctacactgttcaaataagcactaagtcaggagattggaaaagcaaatgcttttacacaacagacacagagtgtgacctcaccgacgagattgtgaaggatgtgaagcagacgtacttggcacgggtcttctcctacccggcagggaatgtggagagcaccggttctgctggggagcctctgtatgagaactccccagagttcacaccttacctggagacaaacctcggacagccaacaattcagagttttgaacaggtgggaacaaaagtgaatgtgaccgtagaagatgaacggactttagtcagaaggaacaacactttcctaagcctccgggatgtttttggcaaggacttaatttatacactttattattggaaatcttcaagttcaggaaagaaaacagccaaaacaaacactaatgagtttttgattgatgtggataaaggagaaaactactgtttcagtgttcaagcagtgattccctcccgaacagttaaccggaagagtacagacagcccggtagagtgtatgggccaggagaaaggggaattcagagaaatattctacatcattggagctgtggtatttgtggtcatcatccttgtcatcatcctggctatatctctacacaagtgtagaaaggcaggagtggggcagagctggaaggagaactccccactgaatgtttcataaaggaagcactgttggagctactgcaaatgctatattgcactgtgaccgagaacttttaagaggatagaatacatggaaacgcaaatgagtatttcggagcatgaagaccctggagttcaaaaaactcttgatatgacctgttattaccattagcattctggttttgacatcagcattagtcactttgaaatgtaacgaatggtactacaaccaattccaagttttaatttttaacaccatggcaccttttgcacataacatgctttagattatatattccgcactcaaggagtaaccaggtcgtccaagcaaaaacaaatgggaaaatgtcttaaaaaatcctgggtggacttttgaaaagcttttttttttttttttttttgagacggagtcttgctctgttgcccaggctggagtgcagtagcacgatctcggctcactgcaccctccgtctctcgggttcaagcaattgtctgcctcagcctcccgagtagctgggattacaggtgcgcactaccacaccaagctaatttttgtattttttagtagagatggggtttcaccatcttggccaggctggtcttgaattcctgacctcagttgatccacccaccttggcctcccaaagtgctagtattatgggcgtgaaccaccatgcccagccgaaaagcttttgaggggctgacttcaatccatgtaggaaagtaaaatggaaggaaattgggtgcatttctaggacttttctaacatatgtctataatatagtgtttaggttcttttttttttcaggaatacatttggaaattcaaaacaattggcaaactttgtattaatgtgttaagtgcaggagacattggtattctgggcaccttcctaatatgctttacaatctgcactttaactgacttaagtggcattaaacatttgagagctaactatatttttataagactactatacaaactacagagtttatgatttaaggtacttaaagcttctatggttgacattgtatatataattttttaaaaaggttttctatatggggattttctatttatgtaggtaatattgttctatttgtatatattgagataatttatttaatatactttaaataaaggtgactgggaattgt

SEQ ID NO: 326904 - DNA, 603 bp, Homo sapiens
ggctccattgtcttccccttgggccagcactaccacagaatgtcttaggattcagctccagggccgccacgcctgcttctttcagggagctggttctatgcacatgttttatatgagagataattaagttgtcaattgtgataacaaaacaggatttgactttgtacagaattctttggttccaaccaagctcatttcctttgtttcagcaaacctcggacagccaacaattcagagttttgaacaggtgggaacaaaagtgaatgtgaccgtagaagatgaacggactttagtcagaaggaacaacactttcctaagcctccgggatgtttttggcaaggacttaatttatacactttattattggaaatcttcaagttcaggaaaggtgagcattttttaatttgtttttatgacctgttttaaattgtgaatacttgggttttacaacccatttcttccccaattcaaaaatagcagaacagagttgttgagaaggtgatggagtagaagggggagcgcgcactgtggggaggggtggacaacaggcctggtcctacctgtgactctgcactaccctgtgactctgggcagggccccctc

SEQ ID NO: 326905 - DNA, 2689 bp, Homo sapiens
  misc_feature (2)..(2): n is a, c, g, or t
  misc_feature (4)..(4): n is a, c, g, or t
gngngcgccgccggccctttatagcgcgcggggcaccggctccccaagactgcgagctccccgcaccccctcgcactccctctggccggcccagggcgccttcagcccaacctccccagccccacgggcgccacggaacccgctcgatctcgccgccaactggtagacatggagacccctgcctggccccgggtcccgcgccccgagaccgccgtcgctcggacgctcctgctcggctgggtcttcgcccaggtggccggcgcttcaggtttgggtagaggcaatccaaaagggctggattgctgcttagattggagcaggtacaacgttgtgcatgccccgtatttctacgaggtgttcgggacggcgtagagactgggacctgctgcgtactggcaaagcagaccttcataagaaataatcctgatccaatacagccgacggtgtgacaggccacacgtccccgtgggtctctgtggaagtttcagtgtagcgacatttcagataaaagtggaaaaagtgaagtttggcttttttcatttgtatgcagtcctaactcttgtcacacgtgtgggatttatctttttccataacttactgaaaacccttcctggcgggctgaacctgactcttcctgagctgagtcctggactggcacactgatggctctgggctcttcccggtcaagttataacaaggctttgcccatgaataatttcaaacgaaaatgtcaagatccttgccggtgtcctgggattacaaggcactacaaatactgtggcagcatataatttaacttggaaatcaactaatttcaagacaattttggagtgggaacccaaacccgtcaatcaagtctacactgttcaaataagcactaagtcaggagattggaaaagcaaatgcttttacacaacagacacagagtgtgacctcaccgacgagattgtgaaggatgtgaagcagacgtacttggcacgggtcttctcctacccggcagggaatgtggagagcaccggttctgctggggagcctctgtatgagaactccccagagttcacaccttacctggagacaaacctcggacagccaacaattcagagttttgaacaggtgggaacaaaagtgaatgtgaccgtagaagatgaacggactttagtcagaaggaacaacactttcctaagcctccgggatgtttttggcaaggacttaatttatacactttattattggaaatcttcaagttcaggaaagaaaacagccaaaacaaacactaatgagtttttgattgatgtggataaaggagaaaactactgtttcagtgttcaagcagtgattccctcccgaacagttaaccggaagagtacagacagcccggtagagtgtatgggccaggagaaaggggaattcagagaaatattctacatcattggagctgtggtatttgtggtcatcatccttgtcatcatcctggctatatctctacacaagtgtagaaaggcaggagtggggcagagctggaaggagaactccccactgaatgtttcataaaggaagcactgttggagctactgcaaatgctatattgcactgtgaccgagaacttttaagaggatagaatacatggaaacgcaaatgagtatttcggagcatgaagaccctggagttcaaaaaactcttgatatgacctgttattaccattagcattctggttttgacatcagcattagtcactttgaaatgtaacgaatggtactacaaccaattccaagttttaatttttaacaccatggcaccttttgcacataacatgctttagattatatattccgcactcaaggagtaaccaggtcgtccaagcaaaaacaaatgggaaaatgtcttaaaaaatcctgggtggacttttgaaaagcttttttttttttttttttttgagacggagtcttgctctgttgcccaggctggagtgcagtagcacgatctcggctcactgcaccctccgtctctcgggttcaagcaattgtctgcctcagcctcccgagtagctgggattacaggtgcgcactaccacaccaagctaatttttgtattttttagtagagatggggtttcaccatcttggccaggctggtcttgaattcctgacctcagttgatccacccaccttggcctcccaaagtgctagtattatgggcgtgaaccaccatgcccagccgaaaagcttttgaggggctgacttcaatccatgtaggaaagtaaaatggaaggaaattgggtgcatttctaggacttttctaacatatgtctataatatagtgtttaggttcttttttttttcaggaatacatttggaaattcaaaacaattggcaaactttgtattaatgtgttaagtgcaggagacattggtattctgggcaccttcctaatatgctttacaatctgcactttaactgacttaagtggcattaaacatttgagagctaactatatttttataagactactatacaaactacagagtttatgatttaaggtacttaaagcttctatggttgacattgtatatataattttttaaaaaggttttctatatggggattttctatttatgtaggtaatattgttctatttgtatatattgagataatttatttaatatactttaaataaaggtgactgggaattgt

SEQ ID NO: 326906 - DNA, 1823 bp, Homo sapiens
ggctccattgtcttccccttgggccagcactaccacagaatgtcttaggattcagctccagggccgccacgcctgcttctttcagggagctggttctatgcacatgttttatatgagagataattaagttgtcaattgtgataacaaaacaggatttgactttgtacagaattctttggttccaaccaagctcatttcctttgtttcagcaaacctcggacagccaacaattcagagttttgaacaggtgggaacaaaagtgaatgtgaccgtagaagatgaacggactttagtcagaaggaacaacactttcctaagcctccgggatgtttttggcaaggacttaatttatacactttattattggaaatcttcaagttcaggaaagaaaacagccaaaacaaacactaatgagtttttgattgatgtggataaaggagaaaactactgtttcagtgttcaagcagtgattccctcccgaacagttaaccggaagagtacagacagcccggtagagtgtatgggccaggagaaaggggaattcagagaaatattctacatcattggagctgtggtatttgtggtcatcatccttgtcatcatcctggctatatctctacacaagtgtagaaaggcaggagtggggcagagctggaaggagaactccccactgaatgtttcataaaggaagcactgttggagctactgcaaatgctatattgcactgtgaccgagaacttttaagaggatagaatacatggaaacgcaaatgagtatttcggagcatgaagaccctggagttcaaaaaactcttgatatgacctgttattaccattagcattctggttttgacatcagcattagtcactttgaaatgtaacgaatggtactacaaccaattccaagttttaatttttaacaccatggcaccttttgcacataacatgctttagattatatattccgcactcaaggagtaaccaggtcgtccaagcaaaaacaaatgggaaaatgtcttaaaaaatcctgggtggacttttgaaaagcttttttttttttttttttttgagacggagtcttgctctgttgcccaggctggagtgcagtagcacgatctcggctcactgcaccctccgtctctcgggttcaagcaattgtctgcctcagcctcccgagtagctgggattacaggtgcgcactaccacaccaagctaatttttgtattttttagtagagatggggtttcaccatcttggccaggctggtcttgaattcctgacctcagttgatccacccaccttggcctcccaaagtgctagtattatgggcgtgaaccaccatgcccagccgaaaagcttttgaggggctgacttcaatccatgtaggaaagtaaaatggaaggaaattgggtgcatttctaggacttttctaacatatgtctataatatagtgtttaggttcttttttttttcaggaatacatttggaaattcaaaacaattggcaaactttgtattaatgtgttaagtgcaggagacattggtattctgggcaccttcctaatatgctttacaatctgcactttaactgacttaagtggcattaaacatttgagagctaactatatttttataagactactatacaaactacagagtttatgatttaaggtacttaaagcttctatggttgacattgtatatataattttttaaaaaggttttctatatggggattttctatttatgtaggtaatattgttctatttgtatatattgagataatttatttaatatactttaaataaaggtgactgggaattgt

SEQ ID NO: 326907 - DNA, 892 bp, Homo sapiens
ctctggtatctactttgagggttgaaatagggggcctgaccccaggtgaatgtggctgccttcccagagcccccatttgcaagaccctccagacccccaggtgcttctgcttgtgtcttttgtggcaccaggcaagaatgtagcagcgtcagcagcccctctggtgactgtggcatggttgacattcatttcccccctaattaatggcatcctcatgattctcttttatattaatagttcttgagtttttttgtaagctacttcaaatcctttgttggtgcaagatagaagatattttatgtgtttgttttgcatgtgcacacacatatttggcctttgaattcctgacctcagttgatccacccaccttggcctcccaaagtgctagtattatgggcgtgaaccaccatgcccagccgaaaagcttttgaggggctgacttcaatccatgtaggaaagtaaaatggaaggaaattgggtgcatttctaggacttttctaacatatgtctataatatagtgtttaggttcttttttttttcaggaatacatttggaaattcaaaacaattggcaaactttgtattaatgtgttaagtgcaggagacattggtattctgggcaccttcctaatatgctttacaatctgcactttaactgacttaagtggcattaaacatttgagagctaactatatttttataagactactatacaaactacagagtttatgatttaaggtacttaaagcttctatggttgacattgtatatataattttttaaaaaggttttctatatggggattttctatttatgtaggtaatattgttctatttgtatatattgagataatttatttaatatactttaaataaaggtgactgggaattgt

SEQ ID NO: 326908 - DNA, 702 bp, Homo sapiens
  misc_feature (17)..(17): n is a, c, g, or t
  misc_feature (32)..(32): n is a, c, g, or t
  misc_feature (41)..(41): n is a, c, g, or t
  misc_feature (71)..(71): n is a, c, g, or t
  misc_feature (192)..(192): n is a, c, g, or t
  misc_feature (195)..(195): n is a, c, g, or t
caacttaacactgtacngtcacacaatgtacnttcaccacntgtattatctatcatttgtttccatctgtnaatctgacaccataccctcctttgaatcttttgagattccttctgtaactctcagttgttcattcttcttttgcctgtcccttaaaaagttgtatttcttggggtacctgagatgtatttngtnctacatgttaaatagggcacaccatgcccagccgaaaagcttttgaggggctgacttcaatccatgtaggaaagtaaaatggaaggaaattgggtgcatttctaggacttttctaacatatgtctataatatagtgtttaggttcttttttttttcaggaatacatttggaaattcaaaacaattggcaaactttgtattaatgtgttaagtgcaggagacattggtattctgggcaccttcctaatatgctttacaatctgcactttaactgacttaagtggcattaaacatttgagagctaactatatttttataagactactatacaaactacagagtttatgatttaaggtacttaaagcttctatggttgacattgtatatataattttttaaaaaggttttctatatggggattttctatttatgtaggtaatattgttctatttgtatatattgagataatttatttaatatactttaaataaaggtgactgggaattgt

SEQ ID NO: 326909 - DNA, 974 bp, Homo sapiens
  misc_feature (2)..(2): n is a, c, g, or t
  misc_feature (4)..(4): n is a, c, g, or t
gngngcgccgccggccctttatagcgcgcggggcaccggctccccaagactgcgagctccccgcaccccctcgcactccctctggccggcccagggcgccttcagcccaacctccccagccccacgggcgccacggaacccgctcgatctcgccgccaactggtagacatggagacccctgcctggccccgggtcccgcgccccgagaccgccgtcgctcggacgctcctgctcggctgggtcttcgcccaggtggccggcgcttcaggcactacaaatactgtggcagcatataatttaacttggaaatcaactaatttcaagacaattttggagtgggaacccaaacccgtcaatcaagtctacactgttcaaataagcactaagtcaggagattggaaaagcaaatgcttttacacaacagacacagagtgtgacctcaccgacgagattgtgaaggatgtgaagcagacgtacttggcacgggtcttctcctacccggcagggaatgtggagagcaccggttctgctggggagcctctgtatgagaactccccagagttcacaccttacctggagacaaacctcggacagccaacaattcagagttttgaacaggtgggaacaaaagtgaatgtgaccgtagaagatgaacggactttagtcagaaggaacaacactttcctaagcctccgggatgtttttggcaaggacttaatttatacactttattattggaaatcttcaagttcaggaaaggtgagcattttttaatttgtttttatgacctgttttaaattgtgaatacttgggttttacaacccatttcttccccaattcaaaaatagcagaacagagttgttgagaaggtgatggagtagaagggggagcgcgcactgtggggaggggtggacaacaggcctggtcctacctgtgactctgcactaccctgtgactctgggcagggccccctc

SEQ ID NO: 326910 - DNA, 1454 bp, Homo sapiens
  misc_feature (2)..(2): n is a, c, g, or t
  misc_feature (4)..(4): n is a, c, g, or t
gngngcgccgccggccctttatagcgcgcggggcaccggctccccaagactgcgagctccccgcaccccctcgcactccctctggccggcccagggcgccttcagcccaacctccccagccccacgggcgccacggaacccgctcgatctcgccgccaactggtagacatggagacccctgcctggccccgggtcccgcgccccgagaccgccgtcgctcggacgctcctgctcggctgggtcttcgcccaggtggccggcgcttcaggtttgggtagaggcaatccaaaagggctggattgctgcttagattggagcaggtacaacgttgtgcatgccccgtatttctacgaggtgttcgggacggcgtagagactgggacctgctgcgtactggcaaagcagaccttcataagaaataatcctgatccaatacagccgacggtgtgacaggccacacgtccccgtgggtctctgtggaagtttcagtgtagcgacatttcagataaaagtggaaaaagtgaagtttggcttttttcatttgtatgcagtcctaactcttgtcacacgtgtgggatttatctttttccataacttactgaaaacccttcctggcgggctgaacctgactcttcctgagctgagtcctggactggcacactgatggctctgggctcttcccggtcaagttataacaaggctttgcccatgaataatttcaaacgaaaatgtcaagatccttgccggtgtcctgggattacaaggcactacaaatactgtggcagcatataatttaacttggaaatcaactaatttcaagacaattttggagtgggaacccaaacccgtcaatcaagtctacactgttcaaataaggtaagctgggtacagaaaaagaaaattaaggtcttggatgtttctactgtcctatgctgaacaagaatgtctttaaagctgattactggatgaaattatttaacagatgacgaagaagaagggattctgggcaattcgctggccggtgtcatactctattaggcctgcaacatttccagaccttaaacggatagaacattttaatggttttaatggttttgggaaatgatgggagagttcctaagtggagtataaactgtggagagatgaaccatcttgagtaggcactgaagtgtgcttggggtcatgatagattaattaatctcatctaaacatggatgtctttttctgtggctgtctagactgtgaacaatgtctaacaccttagggaagaggtggggaggaatcccaatgtatacattacccttaagcagtgtttgattcattcatctttggactccatgaatcgaaatctggtagaatacatgatcttagtggaggaggccaaatgcgtgactcactgagcctggcagagcagaaatactctgctgtctgcaccctctgggtctggtgtggctc

SEQ ID NO: 326911 - DNA, 669 bp, Homo sapiens
cccaagactgcgagctccccgcaccccctcgcactccctctggccggcccagggcgccttcagcccaacctccccagccccacgggcgccacggaacccgctcgatctcgccgccaactggtagacatggagacccctgcctggccccgggtcccgcgccccgagaccgccgtcgctcggacgctcctgctcggctgggtcttcgcccaggtggccggcgcttcaggtgagtggcaccagcccctggaagcccggggcgcgccacacgcaggagggaggcgacagtcctggctggcagcgggctcgccctggttccccggggcgcccatgttgtcccccgcgcctacgggactcggctgcgctcacccagcccggcttgaatgaaccgagtccgtcgggcgccggcgggagttgcagggagggagttggcgccccagaccccgctgccccttccgctggagagttttgctcggggtgtccgagtaattggactgttgttgcataagcggacttttagctcccgctttaactctggggaaagggcttcccagtgagttgcgaccttcaatatgataggacttgtgcctgcgtctgcacgtgttggcgtgcagaggtttggatattatctttcattatatgtgcatcttcccttaataaagagcgtccctg

SEQ ID NO: 326912 - DNA, 2339 bp, Homo sapiens
  misc_feature (2)..(2): n is a, c, g, or t
  misc_feature (4)..(4): n is a, c, g, or t
gngngcgccgccggccctttatagcgcgcggggcaccggctccccaagactgcgagctccccgcaccccctcgcactccctctggccggcccagggcgccttcagcccaacctccccagccccacgggcgccacggaacccgctcgatctcgccgccaactggtagacatggagacccctgcctggccccgggtcccgcgccccgagaccgccgtcgctcggacgctcctgctcggctgggtcttcgcccaggtggccggcgcttcaggcactacaaatactgtggcagcatataatttaacttggaaatcaactaatttcaagacaattttggagtgggaacccaaacccgtcaatcaagtctacactgttcaaataagcactaagtcaggagattggaaaagcaaatgcttttacacaacagacacagagtgtgacctcaccgacgagattgtgaaggatgtgaagcagacgtacttggcacgggtcttctcctacccggcagggaatgtggagagcaccggttctgctggggagcctctgtatgagaactccccagagttcacaccttacctggagacaaacctcggacagccaacaattcagagttttgaacaggtgggaacaaaagtgaatgtgaccgtagaagatgaacggactttagtcagaaggaacaacactttcctaagcctccgggatgtttttggcaaggacttaatttatacactttattattggaaatcttcaagttcaggaaagaaaacagccaaaacaaacactaatgagtttttgattgatgtggataaaggagaaaactactgtttcagtgttcaagcagtgattccctcccgaacagttaaccggaagagtacagacagcccggtagagtgtatgggccaggagaaaggggaattcagagaaatattctacatcattggagctgtggtatttgtggtcatcatccttgtcatcatcctggctatatctctacacaagtgtagaaaggcaggagtggggcagagctggaaggagaactccccactgaatgtttcataaaggaagcactgttggagctactgcaaatgctatattgcactgtgaccgagaacttttaagaggatagaatacatggaaacgcaaatgagtatttcggagcatgaagaccctggagttcaaaaaactcttgatatgacctgttattaccattagcattctggttttgacatcagcattagtcactttgaaatgtaacgaatggtactacaaccaattccaagttttaatttttaacaccatggcaccttttgcacataacatgctttagattatatattccgcactcaaggagtaaccaggtcgtccaagcaaaaacaaatgggaaaatgtcttaaaaaatcctgggtggacttttgaaaagcttttttttttttttttttttgagacggagtcttgctctgttgcccaggctggagtgcagtagcacgatctcggctcactgcaccctccgtctctcgggttcaagcaattgtctgcctcagcctcccgagtagctgggattacaggtgcgcactaccacaccaagctaatttttgtattttttagtagagatggggtttcaccatcttggccaggctggtcttgaattcctgacctcagttgatccacccaccttggcctcccaaagtgctagtattatgggcgtgaaccaccatgcccagccgaaaagcttttgaggggctgacttcaatccatgtaggaaagtaaaatggaaggaaattgggtgcatttctaggacttttctaacatatgtctataatatagtgtttaggttcttttttttttcaggaatacatttggaaattcaaaacaattggcaaactttgtattaatgtgttaagtgcaggagacattggtattctgggcaccttcctaatatgctttacaatctgcactttaactgacttaagtggcattaaacatttgagagctaactatatttttataagactactatacaaactacagagtttatgatttaaggtacttaaagcttctatggttgacattgtatatataattttttaaaaaggttttctatatggggattttctatttatgtaggtaatattgttctatttgtatatattgagataatttatttaatatactttaaataaaggtgactgggaattgtactgttgtacttattctatcttccatttattatttatgtacaatttggtgtttgtattagctctactacagtaaatgactgtaaaattgtcaaaaaaataaatatattaaataaatactggccgtcgtttaccgtcgtgctgggt

SEQ ID NO: 326913 - DNA, 2034 bp, Homo sapiens
  misc_feature (2)..(2): n is a, c, g, or t
  misc_feature (4)..(4): n is a, c, g, or t
gngngcgccgccggccctttatagcgcgcggggcaccggctccccaagactgcgagctccccgcaccccctcgcactccctctggccggcccagggcgccttcagcccaacctccccagccccacgggcgccacggaacccgctcgatctcgccgccaactggtagacatggagacccctgcctggccccgggtcccgcgccccgagaccgccgtcgctcggacgctcctgctcggctgggtcttcgcccaggtggccggcgcttcaggcactacaaatactgtggcagcatataatttaacttggaaatcaactaatttcaagacaattttggagtgggaacccaaacccgtcaatcaagtctacactgttcaaataagcactaagtcaggagattggaaaagcaaatgcttttacacaacagacacagagtgtgacctcaccgacgagattgtgaaggatgtgaagcagacgtacttggcacgggtcttctcctacccggcagggaatgtggagagcaccggttctgctggggagcctctgtatgagaactccccagagttcacaccttacctggagacaaacctcggacagccaacaattcagagttttgaacaggtgggaacaaaagtgaatgtgaccgtagaagatgaacggactttagtcagaaggaacaacactttcctaagcctccgggatgtttttggcaaggacttaatttatacactttattattggaaatcttcaagttcaggaaagaaatattctacatcattggagctgtggtatttgtggtcatcatccttgtcatcatcctggctatatctctacacaagtgtagaaaggcaggagtggggcagagctggaaggagaactccccactgaatgtttcataaaggaagcactgttggagctactgcaaatgctatattgcactgtgaccgagaacttttaagaggatagaatacatggaaacgcaaatgagtatttcggagcatgaagaccctggagttcaaaaaactcttgatatgacctgttattaccattagcattctggttttgacatcagcattagtcactttgaaatgtaacgaatggtactacaaccaattccaagttttaatttttaacaccatggcaccttttgcacataacatgctttagattatatattccgcactcaaggagtaaccaggtcgtccaagcaaaaacaaatgggaaaatgtcttaaaaaatcctgggtggacttttgaaaagcttttttttttttttttttttgagacggagtcttgctctgttgcccaggctggagtgcagtagcacgatctcggctcactgcaccctccgtctctcgggttcaagcaattgtctgcctcagcctcccgagtagctgggattacaggtgcgcactaccacaccaagctaatttttgtattttttagtagagatggggtttcaccatcttggccaggctggtcttgaattcctgacctcagttgatccacccaccttggcctcccaaagtgctagtattatgggcgtgaaccaccatgcccagccgaaaagcttttgaggggctgacttcaatccatgtaggaaagtaaaatggaaggaaattgggtgcatttctaggacttttctaacatatgtctataatatagtgtttaggttcttttttttttcaggaatacatttggaaattcaaaacaattggcaaactttgtattaatgtgttaagtgcaggagacattggtattctgggcaccttcctaatatgctttacaatctgcactttaactgacttaagtggcattaaacatttgagagctaactatatttttataagactactatacaaactacagagtttatgatttaaggtacttaaagcttctatggttgacattgtatatataattttttaaaaaggttttctatatggggattttctatttatgtaggtaatattgttctatttgtatatattgagataatttatttaatatactttaaataaaggtgactgggaattgt

SEQ ID NO: 326914 - DNA, 1378 bp, Homo sapiens
  misc_feature (2)..(2): n is a, c, g, or t
  misc_feature (4)..(4): n is a, c, g, or t
gngngcgccgccggccctttatagcgcgcggggcaccggctccccaagactgcgagctccccgcaccccctcgcactccctctggccggcccagggcgccttcagcccaacctccccagccccacgggcgccacggaacccgctcgatctcgccgccaactggtagacatggagacccctgcctggccccgggtcccgcgccccgagaccgccgtcgctcggacgctcctgctcggctgggtcttcgcccaggtggccggcgcttcaggcactacaaatactgtggcagcatataatttaacttggaaatcaactaatttcaagacaattttggagtgggaacccaaacccgtcaatcaagtctacactgttcaaataagcactaagtcaggagattggaaaagcaaatgcttttacacaacagacacagagtgtgacctcaccgacgagattgtgaaggatgtgaagcagacgtacttggcacgggtcttctcctacccggcagggaatgtggagagcaccggttctgctggggagcctctgtatgagaactccccagagttcacaccttacctggagacaaacctcggacagccaacaattcagagttttgaacaggtgggaacaaaagtgaatgtgaccgtagaagatgaacggactttagtcagaaggaacaacactttcctaagcctccgggatgtttttggcaaggacttaatttatacactttattattggaaatcttcaagttcaggaaagaaaacagccaaaacaaacactaatgagtttttgattgatgtggataaaggagaaaactactgtttcagtgttcaagcagtgattccctcccgaacagttaaccggaagagtacagacagcccggtagagtgtatgggccaggagaaaggggaattcagagaaatattctacatcattggagctgtggtatttgtggtcatcatccttgtcatcatcctggctatatctctacacaagtgtagaaaggcaggagtggggcagagctggaaggagaactccccactgaatgtttcataaaggaagcactgttggagctactgcaaatgctatattgcactgtgaccgagaacttttaagaggatagaatacatggaaacgcaaatgagtatttcggagcatgaagaccctggagttcaaaaaactcttgatatgacctgttattaccattagcattctggttttgacatcagcattagtcactttgaaatgtaacgaatggtactacaaccaattccaagttttaatttttaacaccatgtttctaagccccaaaaccccatgggtttttctttgtgtttcgttttgttttttaaaaaataacagtgggcgctcgtaggag

SEQ ID NO: 326915 - DNA, 692 bp, Homo sapiens
  misc_feature (2)..(2): n is a, c, g, or t
  misc_feature (4)..(4): n is a, c, g, or t
gngngcgccgccggccctttatagcgcgcggggcaccggctccccaagactgcgagctccccgcaccccctcgcactccctctggccggcccagggcgccttcagcccaacctccccagccccacgggcgccacggaacccgctcgatctcgccgccaactggtagacatggagacccctgcctggccccgggtcccgcgccccgagaccgccgtcgctcggacgctcctgctcggctgggtcttcgcccaggtggccggcgcttcaggcactacaaatactgtggcagcatataatttaacttggaaatcaactaatttcaagacaattttggagtgggaacccaaacccgtcaatcaagtctacactgttcaaataagcactaagtcaggagattggaaaagcaaatgcttttacacaacagacacagagtgtgacctcaccgacgagattgtgaaggatgtgaagcagacgtacttggcacgggtcttctcctacccggcagggaatgtggagagcaccggttctgctggggagcctctgtatgagaactccccagagttcacaccttacctggagagtaagtggcttgggctgtaataccgttcattcttgttagaaacgtctgaacattctcgtgatcttgtgcctttaggggctacaaaattaaaaatatttattctttttttctc

SEQ ID NO: 326916 - DNA, 3345 bp, Homo sapiens
cagagtatctttttctatgtgttccatgtatttgtgtctttggagctatagtctcttgtagacagcatatcactatctgtttgttttgttttgttttttctgtccattctgccaatttctgccttttgattggaaaatttaatccatttgcatttaaagtaattaaggaaggactttcttctaccatttaacacttcttctatatgtcatatacttttttggcccctcatttcctctttatggccttcttttctgtttttttgtagtgaactagtctgattctctttccactcccctttgtgtatatttgttagatgttttatttgtggttgctatggggattatagttaacatcctacacttaaaacaatctaatttaaactgataccaatttaccttcaatagcatacaaaatctctactcctgtaaagctctgcccctgccccccttatgttattgatggcacaaattgcctaataaataatttatagttatttgtatgagtttgtcttttaaatcatttaggaaataaaaagtggagttagaaaacagtatgatagtaatactgacttttatatttgtcaatatatttatcttattttggatccttatttcattatatagatttgagttactgtctagtgcccttccatttcggcccaaaggattcccttatgcatttcttgcagggcaagtctaattgtaataaactccctcagcttttgttttatctgagaatgtcttgatttctcccttatttttgatggataattttgccagatacatgaatttttggtaacagtatttttctttcagcactttaaatatgtcatcccactaccttctgacttcatggtttctcatgagatattagatgttataaaatttgaggattcctcattcttgatgagtcagttctgtcttattgcttttcggatttgctcagcttttgtcttttgacagtttgattataacgcggctcagtgtgggtctctgagtttatcccacttagagtttgttgagtttcttggagtcatagatttatgtcttttatcaaattttggacatatttggctattatttcttcaatttttttcactgcttctttcttttccttctgaaatattcttaatgtatatgttggtctgtttgatgctgtctcaccagtttcttaggctgtgttctctttgttcctcagacttgattattgcagttgcccttctttttatttttttcaagtttgttgattcttctccctgttcagatcaactgttgaactcctctagtgaatttatttcagttactgtacttttcagctccaagatttatctttggttcctttttataacgtctgtgtctttattgatattctcattttgttcatatgtctctttcttcctttagttctttgtccatgttttcctttagctctttgggcttatttaagacaattgtttaaagtctttgcatagtaagtccaatgtctgtgtttcttcagggatggttttcattattttgttttcaatgagccatactttcctgtgtctttgtatgctgtctttttgttgttgaaaactgtatgtttgaacatcataacgtggtggccctgaaaatcagatattccccccttcctgagagttagttttatttttattattgaagattgtagcagtctattgctacatgtgcagtcatttccaaactatttttgcaaagactgtattccttctgtgtgtcatcactgaagtctctgttccttagtttgtgtttaatagtttgacatagatttccttgaaaggagttaaaactagcagaaaaatctctctcccagtctttccagtctttgtagattggttctgtgctgggcttttccattaatacttagccaggcttgtactgagcctaacaatcaggcccaaaagcgtagggtctttgcagatcttgtctgagcatgcttcttgctgtgtatgcacgtagttttctaaatctccctgtatgtgctgttgaatattctaatttcccaaagaaactcctttgcagctttttctcacagaacatagatggttttttggatatcttgaccatagtctttcgacccaggtgtttgcggttgttagttcaccttacacttttttcaagcattgcctactgcttacgatgagtgctctgtcactcctttaagtagccccagacaggctaccagagacttaaacaagaatttgtaagttctgctcagcttcctctagaaatggggatcagggtccaagacagaatgcagttgctgatttcaagactgctgcaacaccagggagcttgtgggggaagggcaagcagaaatgtcacaaagctttcttgccattttaaagttgcctgttcttgactcagcatttgcttcattgctataaactttttactgtttttcagagttctgataaaattggctatgcctgttcctgctttaaaaaatatatatatattttttagggattggggtctcactatactgaccaggctggtcttgaacttctggcctcaagccatcctctcatttcagcttcccaaagtgctgcaattacacgcgtgaaccaccacacccagcccctgcttgtttttcaatgtgcctactccaccatgttgctcaagtatgtatattttctaaactaccttgtagtgttgtgatgggaaataaatccctgagccttttgaataactcagagagatcaaaaacttagtttatcctattcgaaggattagaaaaatgatatatctttcactttttcagggataggctcctcattagaaggctcctatgtgccgatgctgtacaagacatttcatttctcttaatgtttacaacaagcttgttgccaaggctgatcttgaactcctggcctcaaacgatcctcccagctcagtctcacaaagtgttgggatgtctggccaactaatgactatcttaactcttgtgtttcaatgtttatgccttcttttatcttgactgattgtatgactatgtcttctagaacaatgttgaacagaaatggtgagagcagacatccttgctttaatatttcaccattatatatgatgttaggtatagatttttctcacagatgccttttatcagattgaggaatttatattcctactttgccgaaaggtttttgtagtatgagggggtgctgaattttgtcaaacactttttcggtaataattgagatgattggttctgcagtcatcgagatgtggattttctcctttattctgttcgtgagtgattacactggttgactaatgttaaaacaaccttactttccaggaataaaccctattatcttttttata

SEQ ID NO: 326917 - DNA, 4039 bp, Homo sapiens
cagagtatctttttctatgtgttccatgtatttgtgtctttggagctatagtctcttgtagacagcatatcactatctgtttgttttgttttgttttttctgtccattctgccaatttctgccttttgattggaaaatttaatccatttgcatttaaagtaattaaggaaggactttcttctaccatttaacacttcttctatatgtcatatacttttttggcccctcatttcctctttatggccttcttttctgtttttttgtagtgaactagtctgattctctttccactcccctttgtgtatatttgttagatgttttatttgtggttgctatggggattatagttaacatcctacacttaaaacaatctaatttaaactgataccaatttaccttcaatagcatacaaaatctctactcctgtaaagctctgcccctgccccccttatgttattgatggcacaaattgcctaataaataatttatagttatttgtatgagtttgtcttttaaatcatttaggaaataaaaagtggagttagaaaacagtatgatagtaatactgacttttatatttgtcaatatatttatcttattttggatccttatttcattatatagatttgagttactgtctagtgcccttccatttcggcccaaaggattcccttatgcatttcttgcagggcaagtctaattgtaataaactccctcagcttttgttttatctgagaatgtcttgatttctcccttatttttgatggataattttgccagatacatgaatttttggtaacagtatttttctttcagcactttaaatatgtcatcccactaccttctgacttcatggtttctcatgagatattagatgttataaaatttgaggattcctcattcttgatgagtcagttctgtcttattgcttttcggatttgctcagcttttgtcttttgacagtttgattataacgcggctcagtgtgggtctctgagtttatcccacttagagtttgttgagtttcttggagtcatagatttatgtcttttatcaaattttggacatatttggctattatttcttcaatttttttcactgcttctttcttttccttctgaaatattcttaatgtatatgttggtctgtttgatgctgtctcaccagtttcttaggctgtgttctctttgttcctcagacttgattattgcagttgcccttctttttatttttttcaagtttgttgattcttctccctgttcagatcaactgttgaactcctctagtgaatttatttcagttactgtacttttcagctccaagatttatctttggttcctttttataacgtctgtgtctttattgatattctcattttgttcatatgtctctttcttcctttagttctttgtccatgttttcctttagctctttgggcttatttaagacaattgtttaaagtctttgcatagtaagtccaatgtctgtgtttcttcagggatggttttcattattttgttttcaatgagccatactttcctgtgtctttgtatgctgtctttttgttgttgaaaactgtatgtttgaacatcataacgtggtggccctgaaaatcagatattccccccttcctgagagttagttttatttttattattgaagattgtagcagtctattgctacatgtgcagtcatttccaaactatttttgcaaagactgtattccttctgtgtgtcatcactgaagtctctgttccttagtttgtgtttaatagtttgacatagatttccttgaaaggagttaaaactagcagaaaaatctctctcccagtctttccagtctttgtagattggttctgtgctgggcttttccattaatacttagccaggcttgtactgagcctaacaatcaggcccaaaagcgtagggtctttgcagatcttgtctgagcatgcttcttgctgtgtatgcacgtagttttctaaatctccctgtatgtgctgttgaatattctaatttcccaaagaaactcctttgcagctttttctcacagaacatagatggttttttggatatcttgaccatagtctttcgacccaggtgtttgcggttgttagttcaccttacacttttttcaagcattgcctactgcttacgatgagtgctctgtcactcctttaagtagccccagacaggctaccagagacttaaacaagaatttgtaagttctgctcagcttcctctagaaatggggatcagggtccaagacagaatgcagttgctgatttcaagactgctgcaacaccagggagcttgtgggggaagggcaagcagaaatgtcacaaagctttcttgccattttaaagttgcctgttcttgactcagcatttgcttcattgctataaactttttactgtttttcagagttctgataaaattggctatgcctgttcctgctttaaaaaatatatatatattttttagggattggggtctcactatactgaccaggctggtcttgaacttctggcctcaagccatcctctcatttcagcttcccaaagtgctgcaattacacgcgtgaaccaccacacccagcccctgcttgtttttcaatgtgcctactccaccatgttgctcaagtatgtatattttctaaactaccttgtagtgttgtgatgggaaataaatccctgagccttttgaataactcagagagatcaaaaacttagtttatcctattcgaaggattagaaaaatgatatatctttcactttttcagggataggctcctcattagaaggctcctatgtgccgatgctgtacaagacatttcatttctcttaatgtttacaacaagcttgttgccaaggctgatcttgaactcctggcctcaaacgatcctcccagctcagtctcacaaagtgttgggatgtctggccaactaatgactatcttaactcttgtgtttcaatgtttatgccttcttttatcttgactgattgtatgactatgtcttctagaacaatgttgaacagaaatggtgagagcagacatccttgctttaatatttcaccattatatatgatgttaggtatagatttttctcacagatgccttttatcagattgaggaatttatattcctactttgccgaaaggtttttgtagtatgagggggtgctgaattttgtcaaacactttttcggtaataattgagatgattggttctgcagtcatcgagatgtggattttctcctttattctgttcgtgagtgattacactggttgactaatgttaaaacaaccttactttccaggaataaaccctattatcttttttatacattgctggatttgatttgctaattattttaaggacttttatttctacattcatgatagatactgctggtattttctcatgatgtcttttgcaggatttgtatcatatatggcatttctgaggtatacctaagtatcatttattcaaggacctaagaaatggaaaaatcaattgaggtgatttttccatcatgaaaaaaatttctttaaagtcatctgtctgattctgtaaaaatttcacattctttatgtgaacaaaaagctgaaagaaattcagggaaagaattaagatgtgatatcaattgccaacccaatgttttgttcttgctagttgtgttccccctccttattccatccatttcatagtaataagaaaaaaaagaattttacattgagatttttaggtaaatttttgaattacagtatatgataaaaaccttaacgttcaaactccaggtataatgaaatttaattgaaaattactatagcagtttaagtcaatttgtagttttgaaagcagttttaatattttatcttccacaaaaaggtaggaaagtttctgtgctgaacttaaatatataaaggaacacgtccaacatatttagttaaaaatccaaaagtcagaggataatttccaaatgtgtacttaaatagaaaaaaattacaaatttcatgtgcaataaagtgtctgccac

SEQ ID NO: 326918 - DNA, 4835 bp, Homo sapiens
cagagtatctttttctatgtgttccatgtatttgtgtctttggagctatagtctcttgtagacagcatatcactatctgtttgttttgttttgttttttctgtccattctgccaatttctgccttttgattggaaaatttaatccatttgcatttaaagtaattaaggaaggactttcttctaccatttaacacttcttctatatgtcatatacttttttggcccctcatttcctctttatggccttcttttctgtttttttgtagtgaactagtctgattctctttccactcccctttgtgtatatttgttagatgttttatttgtggttgctatggggattatagttaacatcctacacttaaaacaatctaatttaaactgataccaatttaccttcaatagcatacaaaatctctactcctgtaaagctctgcccctgccccccttatgttattgatggcacaaattgcctaataaataatttatagttatttgtatgagtttgtcttttaaatcatttaggaaataaaaagtggagttagaaaacagtatgatagtaatactgacttttatatttgtcaatatatttatcttattttggatccttatttcattatatagatttgagttactgtctagtgcccttccatttcggcccaaaggattcccttatgcatttcttgcagggcaagtctaattgtaataaactccctcagcttttgttttatctgagaatgtcttgatttctcccttatttttgatggataattttgccagatacatgaatttttggtaacagtatttttctttcagcactttaaatatgtcatcccactaccttctgacttcatggtttctcatgagatattagatgttataaaatttgaggattcctcattcttgatgagtcagttctgtcttattgcttttcggatttgctcagcttttgtcttttgacagtttgattataacgcggctcagtgtgggtctctgagtttatcccacttagagtttgttgagtttcttggagtcatagatttatgtcttttatcaaattttggacatatttggctattatttcttcaatttttttcactgcttctttcttttccttctgaaatattcttaatgtatatgttggtctgtttgatgctgtctcaccagtttcttaggctgtgttctctttgttcctcagacttgattattgcagttgcccttctttttatttttttcaagtttgttgattcttctccctgttcagatcaactgttgaactcctctagtgaatttatttcagttactgtacttttcagctccaagatttatctttggttcctttttataacgtctgtgtctttattgatattctcattttgttcatatgtctctttcttcctttagttctttgtccatgttttcctttagctctttgggcttatttaagacaattgtttaaagtctttgcatagtaagtccaatgtctgtgtttcttcagggatggttttcattattttgttttcaatgagccatactttcctgtgtctttgtatgctgtctttttgttgttgaaaactgtatgtttgaacatcataacgtggtggccctgaaaatcagatattccccccttcctgagagttagttttatttttattattgaagattgtagcagtctattgctacatgtgcagtcatttccaaactatttttgcaaagactgtattccttctgtgtgtcatcactgaagtctctgttccttagtttgtgtttaatagtttgacatagatttccttgaaaggagttaaaactagcagaaaaatctctctcccagtctttccagtctttgtagattggttctgtgctgggcttttccattaatacttagccaggcttgtactgagcctaacaatcaggcccaaaagcgtagggtctttgcagatcttgtctgagcatgcttcttgctgtgtatgcacgtagttttctaaatctccctgtatgtgctgttgaatattctaatttcccaaagaaactcctttgcagctttttctcacagaacatagatggttttttggatatcttgaccatagtctttcgacccaggtgtttgcggttgttagttcaccttacacttttttcaagcattgcctactgcttacgatgagtgctctgtcactcctttaagtagccccagacaggctaccagagacttaaacaagaatttgtaagttctgctcagcttcctctagaaatggggatcagggtccaagacagaatgcagttgctgatttcaagactgctgcaacaccagggagcttgtgggggaagggcaagcagaaatgtcacaaagctttcttgccattttaaagttgcctgttcttgactcagcatttgcttcattgctataaactttttactgtttttcagagttctgataaaattggctatgcctgttcctgctttaaaaaatatatatatattttttagggattggggtctcactatactgaccaggctggtcttgaacttctggcctcaagccatcctctcatttcagcttcccaaagtgctgcaattacacgcgtgaaccaccacacccagcccctgcttgtttttcaatgtgcctactccaccatgttgctcaagtatgtatattttctaaactaccttgtagtgttgtgatgggaaataaatccctgagccttttgaataactcagagagatcaaaaacttagtttatcctattcgaaggattagaaaaatgatatatctttcactttttcagggataggctcctcattagaaggctcctatgtgccgatgctgtacaagacatttcatttctcttaatgtttacaacaagcttgttgccaaggctgatcttgaactcctggcctcaaacgatcctcccagctcagtctcacaaagtgttgggatgtctggccaactaatgactatcttaactcttgtgtttcaatgtttatgccttcttttatcttgactgattgtatgactatgtcttctagaacaatgttgaacagaaatggtgagagcagacatccttgctttaatatttcaccattatatatgatgttaggtatagatttttctcacagatgccttttatcagattgaggaatttatattcctactttgccgaaaggtttttgtagtatgagggggtgctgaattttgtcaaacactttttcggtaataattgagatgattggttctgcagtcatcgagatgtggattttctcctttattctgttcgtgagtgattacactggttgactaatgttaaaacaaccttactttccaggaataaaccctattatcttttttatacattgctggatttgatttgctaattattttaaggacttttatttctacattcatgatagatactgctggtattttctcatgatgtcttttgcaggatttgtatcatatatggcatttctgaggtatacctaagtatcatttattcaaggacctaagaaatggaaaaatcaattgaggtgatttttccatcatgaaaaaaatttctttaaagtcatctgtctgattctgtaaaaatttcacattctttatgtgaacaaaaagctgaaagaaattcagggaaagaattaagatgtgatatcaattgccaacccaatgttttgttcttgctagttgtgttccccctccttattccatccatttcatagtaataagaaaaaaaagaattttacattgagatttttaggtaaatttttgaattacagtatatgataaaaaccttaacgttcaaactccaggtataatgaaatttaattgaaaattactatagcagtttaagtcaatttgtagttttgaaagcagttttaatattttatcttccacaaaaaggtaggaaagtttctgtgctgaacttaaatatataaaggaacacgtccaacatatttagttaaaaatccaaaagtcagaggataatttccaaatgtgtacttaaatagaaaaaaattacaaatttcatgtgcaataaagtgtctgccacttacgtaaaaaaaaaaaaaacccaaaactatgtacacatagaaacacgtaacatttttgtaaatagagaaaaggtctaaaaggataacattaaaatgaaaacagcagttatctctggggacagcggttgtgtggaaatgctaactgcttttcaacaatagtttgcattttctagatgagattctatccttgtataattttgttactaatataaacatcaaaaaattcttcataccagtgaatcacaagtcctcactgcaacagacataacaaatccaactcctaaaataaattatatgtagttttgaaggtagaggtgacataaaagtaggctgtatattcaaatcctacaatatattcaattttttccaattatcttttgaacaacaatttgcaaaatatatttacagtttcccttaagttatttaataagtagacttagaaaaattactagtaaactaacatttttggaaaattttcttaatttcttttgattaaattatcttgcctctgttttattagacaaatattttatcagaaaatgaatcacatgttgtgagtatttaaaatatctgtttccttcttagtcctaccaccaatgacaaaaaaacaaaatagtaacttgctaataagtaatgacttaatgcttcaaaaaacatcaacaaatttaaaagaaaggccaaacatggttgctcaagcctgtaatcccagcactttgggaggtcaaggtgggtagactgcttgagctcaagagttcgagaccagcctgggcaatgtcacgaaaccccatctctaca

SEQ ID NO: 326919 - DNA, 4256 bp, Homo sapiens
  misc_feature (4067)..(4070): n is a, c, g, or t
  misc_feature (4081)..(4081): n is a, c, g, or t
cagagtatctttttctatgtgttccatgtatttgtgtctttggagctatagtctcttgtagacagcatatcactatctgtttgttttgttttgttttttctgtccattctgccaatttctgccttttgattggaaaatttaatccatttgcatttaaagtaattaaggaaggactttcttctaccatttaacacttcttctatatgtcatatacttttttggcccctcatttcctctttatggccttcttttctgtttttttgtagtgaactagtctgattctctttccactcccctttgtgtatatttgttagatgttttatttgtggttgctatggggattatagttaacatcctacacttaaaacaatctaatttaaactgataccaatttaccttcaatagcatacaaaatctctactcctgtaaagctctgcccctgccccccttatgttattgatggcacaaattgcctaataaataatttatagttatttgtatgagtttgtcttttaaatcatttaggaaataaaaagtggagttagaaaacagtatgatagtaatactgacttttatatttgtcaatatatttatcttattttggatccttatttcattatatagatttgagttactgtctagtgcccttccatttcggcccaaaggattcccttatgcatttcttgcagggcaagtctaattgtaataaactccctcagcttttgttttatctgagaatgtcttgatttctcccttatttttgatggataattttgccagatacatgaatttttggtaacagtatttttctttcagcactttaaatatgtcatcccactaccttctgacttcatggtttctcatgagatattagatgttataaaatttgaggattcctcattcttgatgagtcagttctgtcttattgcttttcggatttgctcagcttttgtcttttgacagtttgattataacgcggctcagtgtgggtctctgagtttatcccacttagagtttgttgagtttcttggagtcatagatttatgtcttttatcaaattttggacatatttggctattatttcttcaatttttttcactgcttctttcttttccttctgaaatattcttaatgtatatgttggtctgtttgatgctgtctcaccagtttcttaggctgtgttctctttgttcctcagacttgattattgcagttgcccttctttttatttttttcaagtttgttgattcttctccctgttcagatcaactgttgaactcctctagtgaatttatttcagttactgtacttttcagctccaagatttatctttggttcctttttataacgtctgtgtctttattgatattctcattttgttcatatgtctctttcttcctttagttctttgtccatgttttcctttagctctttgggcttatttaagacaattgtttaaagtctttgcatagtaagtccaatgtctgtgtttcttcagggatggttttcattattttgttttcaatgagccatactttcctgtgtctttgtatgctgtctttttgttgttgaaaactgtatgtttgaacatcataacgtggtggccctgaaaatcagatattccccccttcctgagagttagttttatttttattattgaagattgtagcagtctattgctacatgtgcagtcatttccaaactatttttgcaaagactgtattccttctgtgtgtcatcactgaagtctctgttccttagtttgtgtttaatagtttgacatagatttccttgaaaggagttaaaactagcagaaaaatctctctcccagtctttccagtctttgtagattggttctgtgctgggcttttccattaatacttagccaggcttgtactgagcctaacaatcaggcccaaaagcgtagggtctttgcagatcttgtctgagcatgcttcttgctgtgtatgcacgtagttttctaaatctccctgtatgtgctgttgaatattctaatttcccaaagaaactcctttgcagctttttctcacagaacatagatggttttttggatatcttgaccatagtctttcgacccaggtgtttgcggttgttagttcaccttacacttttttcaagcattgcctactgcttacgatgagtgctctgtcactcctttaagtagccccagacaggctaccagagacttaaacaagaatttgtaagttctgctcagcttcctctagaaatggggatcagggtccaagacagaatgcagttgctgatttcaagactgctgcaacaccagggagcttgtgggggaagggcaagcagaaatgtcacaaagctttcttgccattttaaagttgcctgttcttgactcagcatttgcttcattgctataaactttttactgtttttcagagttctgataaaattggctatgcctgttcctgctttaaaaaatatatatatattttttagggattggggtctcactatactgaccaggctggtcttgaacttctggcctcaagccatcctctcatttcagcttcccaaagtgctgcaattacacgcgtgaaccaccacacccagcccctgcttgtttttcaatgtgcctactccaccatgttgctcaagtatgtatattttctaaactaccttgtagtgttgtgatgggaaataaatccctgagccttttgaataactcagagagatcaaaaacttagtttatcctattcgaaggattagaaaaatgatatatctttcactttttcagggataggctcctcattagaaggctcctatgtgccgatgctgtacaagacatttcatttctcttaatgtttacaacaagcttgttgccaaggctgatcttgaactcctggcctcaaacgatcctcccagctcagtctcacaaagtgttgggatgtctggccaactaatgactatcttaactcttgtgtttcaatgtttatgccttcttttatcttgactgattgtatgactatgtcttctagaacaatgttgaacagaaatggtgagagcagacatccttgctttaatatttcaccattatatatgatgttaggtatagatttttctcacagatgccttttatcagattgaggaatttatattcctactttgccgaaaggtttttgtagtatgagggggtgctgaattttgtcaaacactttttcggtaataattgagatgattggttctgcagtcatcgagatgtggattttctcctttattctgttcgtgagtgattacactggttgactaatgttaaaacaaccttactttccaggaataaaccctattatcttttttatacattgctggatttgatttgctaattattttaaggacttttatttctacattcatgatagatactgctggtattttctcatgatgtcttttgcaggatttgtatcatatatggcatttctgaggtatacctaagtatcatttattcaaggacctaagaaatggaaaaatcaattgaggtgatttttccatcatgaaaaaaatttctttaaagtcatctgtctgattctgtaaaaatttcacattctttatgtgaacaaaaagctgaaagaaattcagggaaagaattaagatgtgatatcaattgccaacccaatgttttgttcttgctagttgtgttccccctccttattccatccatttcatagtaataagaaaaaaaagaattttacattgagatttttaggtaaatttttgaattacagtatatgataaaaaccttaacgttcaaactccaggtataatgaaatttaattgaaaattactatagcagtttaagtcaatttgtagttttgaaagcagttttaatattttatcttccacaaaaaggtaggaaagtttctgtgctgaacttaaatatataaaggaacacgtccaacatatttagttaaaaatccaaaagtcagaggataatttccaaatgtgtacttaaatagaaaaaaattacaaatttcatgtgcaataaagtgtctgccacttacgtaaaaaaaaaaaaaacccaaatnnnnttccccttagnaaccccctatacctctcggggactcaggagaaagggtctacaggctaccctaacctggacaccgcggtactcccggggaccgcggtgcggtgcaaatcgcacgggtctcaccacggtgggctctccacaggaccaccggcaaccggccaataacccaaatctcaccggacaagcg

SEQ ID NO: 326920 - DNA, 6272 bp, Homo sapiens
cttccatgtgtgaaagctacttggcatgaatgcctgggccgtaccaagtgtcaccgcagcaagagggggagtcagaagaaaaacagatcagaccaagcagacaataggcccctaaagtgttccccctaagttgctttgatgttgtcctggtgtcttgataccaggaggccagggattgcgggaaaagggtcttttttgtcttcattcactttcccccctcagtttctgaaatgattctccagaatttctcctcataaaaaaggactgaatgtgggcccagttggcgtcattctgctttgacctaaacattcccatctgattgggtggcagagatcatttttggaaagttcttccgtgtcccgatgtagaagaaatagcaaattggacatattgaaagacaagggtcatctttgagaagggggttcctggactcctcacctccaggatgagcactgcagtgtcgtgacccttggggttttgtatgccctggagatgcgagattttcctctggcagcaggaggcacgcacccagagaatgctggagctgcaaggggaaaggacccacttccacagcagagaaaaacaaagaggaaaaaggcatacaggcagcgagcgctaagggacgcacccagcaagcagtgggccagtgccactgcccccagcagctgtttctgctgcaacccgagaggaactcggtgagcctgtcccgtttgtgactgcaagctcaggatttcaatcaatgcattccagtaaccctaaagtgaggagctctccatcaggaaacacacagagtagccctaagtcaaagcaggaggtgatggtccgtccccctacagtgatgtccccatctggaaacccccagctggattccaaattctccaatcagggtaaacaggggggctcagccagccaatcccagccatccccctgtgactccaagagtgggggccatacccctaaagcactccctggcccaggtgggagcatggggctgaagaatggggctggaaatggtgccaagggcaaggggaaaagggagcgaagtatttccgccgactcctttgatcagagagatcctgggactccaaacgatgactctgacattaaagaatgtaattctgctgaccacataaagtcccaggattcccagcacacaccacactcgatgaccccatcaaatgctacagcccccaggtcttctaccccctcccatggccaaactactgccacagagcccacacctgctcagaagactccagccaaagtggtgtacgtgttttctactgagatggccaataaagctgcagaagctgttttgaagggccaggttgaaactatcgtctctttccacatccagaacatttctaacaacaagacagagagaagcacagcgcctctgaacacacagatatctgcccttcggaatgatccgaaacctctcccacaacagcccccagctccggccaaccaggaccagaattcttcccagaataccagactgcagccaactccacccattccggcaccagcacccaagcctgccgcacccccacgtcccctggaccgggagagtcctggggtagaaaacaaactgattccttctgtaggaagtcctgccagctccactccactgcccccagatggtactgggcccaactcaactcccaacaatagggcagtgacccctgtctcccaggggagcaatagctcttcagcagatcccaaagcccctccgcctccaccagtgtccagtggcgagccccccacactgggagagaatcccgatggcctatctcaggagcagctggagcaccgggagcgctccttacaaactctcagagatatccagcgcatgctttttcctgatgagaaagaattcacaggagcacaaagtgggggaccgcagcagaatcctggggtattagatgggcctcagaaaaaaccagaagggccaatacaggccatgatggcccaatcccaaagcctaggtaagggacctgggccccggacagacgtgggagctccatttggccctcaaggacatagagatgtacccttttctccagatgaaatggttccaccttctatgaactcccagtctgggaccataggacccgaccaccttgaccatatgactcccgagcagatagcgtggctgaaactgcagcaggagttttatgaagagaagaggaggaagccggaacaagtggttgtccagcagtgttccctccaggacatgatggtccatcagcacgggcctcggggagtggtccgaggacccccccctccataccagatgacccctagtgaaggctgggcacctgggggtacagagccattttctgatggtatcaacatgccacattctctgcccccgaggggcatggctccccaccccaacatgccagggagccagatgcgcctccctggatttgcaggcatgataaactctgaaatggaagggccgaatgtccccaaccctgcatctagaccaggtctttctggagtcagttggccagatgatgtgccaaaaatcccagatggtcgaaattttcctcctggccagggcattttcagcggtcctggccgaggggaacgcttcccaaacccccaaggattgtctgaagagatgtttcagcagcagctggcagagaaacagctgggtctccccccagggatggccatggaaggcatcaggcccagcatggagatgaacaggatgattccaggctcccagcgccacatggagcctgggaataaccccattttccctcgaataccagttgagggccctctgagtccttctaggggtgactttccaaaaggaattcccccacagatgggccctggtcgggaacttgagtttgggatggttcctagtgggatgaagggagatgtcaatctaaatgtcaacatgggatccaactctcagatgatacctcagaagatgagagaggctggggcgggccctgaggagatgctgaaattacgcccaggtggctcagacatgctgcctgctcagcagaagatggtgccactgccatttggtgagcacccccagcaggagtatggcatgggccccagaccattccttcccatgtctcagggtccaggcagcaacagtggcttgcggaatctcagagaaccaattgggcccgaccagaggactaacagccggctcagtcatatgccaccactacctctcaacccttccagtaaccccaccagcctcaacacagctcctccagttcagcgcggcctggggcggaagcccttggatatatctgtggcaggcagccaggtgcattccccaggcattaaccctctgaagtctcccacgatgcaccaagtccagtcaccaatgctgggctcgccctcggggaacctcaagtccccccagactccatcgcagctggcaggcatgctggcgggcccagctgctgctgcttccattaagtccccccctgttttggggtctgctgctgcttcacctgtccacctcaagtctccatcacttcctgccccgtcacctggatggacctcttctccaaaacctccccttcagagtcctgggatccctccaaaccataaagcacccctcaccatggcctccccagccatgctgggaaatgtagagtcaggtggccccccacctcctacagccagccagcctgcctctgtgaatatccctggaagtcttccctctagtacaccttataccatgcctccagagccaaccctttcccagaacccactctctattatgatgtctcgaatgtccaagtttgcaatgcccagttccaccccgttataccatgatgctatcaagactgtggccagctcagatgacgactcccctccagctcgttctcccaacttgccatcaatgaataatatgccaggaatgggcattaatacacagaatcctcgaatttcaggtccaaaccccgtggttccgatgccaaccctcagcccaatgggaatgacccagccactttctcactccaatcagatgccctctccaaatgccgtgggacccaacatacctcctcatggggtcccaatggggcctggcttgatgtcacacaatcctatcatggggcatgggtcccaggagccaccgatggtacctcaaggacggatgggcttcccccagggcttccctccagtacagtctcccccacagcaggttccattccctcacaatggccccagtggggggcagggcagcttcccaggagggatgggtttcccaggagaaggcccccttggccgccccagcaacctgccccaaagttcagcagatgcagcactttgcaagcctggaggccccgggggtcctgactccttcactgtcctggggaacagcatgccttcggtgtttacagacccagatctgcaggaggtcatccgacctggagccaccggaatacctgagtttgatctatcccgcattattccatctgagaagcccagccagacgctgcaatatttccctcgaggggaagttccaggccgtaaacagccccagggtcctggacctgggttttcacacatgcaggggatgatgggcgaacaagcccccagaatgggactagcattacctggcatgggaggtccagggccagtgggaactccggacatccctcttggtacagctccatccatgccaggccacaaccccatgagaccaccagcctttctccaacaaggcatgatgggacctcaccatcggatgatgtcaccagcacaatctacaatgcccggccagcccaccctgatgagcaatccagctgctgccgtgggcatgattcctggcaaggatcgggggcctgccgggctctacacccaccctgggcctgtgggctctccaggcatgatgatgtccatgcagggcatgatgggaccccaacagaacatcatgatccccccacagatgaggccccggggcatggctgctgacgtgggcatgggtggatttagccaaggacctggcaacccaggaaacatgatgttttaagctgctaagatgggatgtgccgatccttgtcaaaatgagattccaggtcctgagagctgctttgagggagttccaggagtacttactattggtcatgcaataggagaacagagacccgagggctgctttgggggaggggggaactcgagaatgtatggatttacctgaaaacaaattattcatttaatcaacaggtgtgttttttttaagatttattttttaaaaattatttttgtggacttgggtatcaatgatggcacctacttttgggaatctgtagctgtgctttgagaattgccatcggtcatgtgttgcaccgttctctgtatgtttacgtcctttggactggcttctcccaggattcttttctgtttttgtttttttgatttgggctttatttttttctgtgtactgtactatattgtaaaagggattttagcagagactttagtctttggggcaagaggagaacaggaatgctgggctgtttactttaggtggagaatccatcttcagacctttggactattttctttcaactgcagtgtatagaaaaaccaaactacgacctcagagcagagtattaatgaaaagcacaaaaaaaggaactaagttcagcgaggggtggggggaggggggagatttttcttttgaaaaataatgactcttaggacatttgtttttcagttcaagtgctcttcagcactgtcttgtctcccaatataccaacccactggcacatttttctcttgttttctctctccgattttgctctgtctcctcagttaagtgtttccttcctttgtgccccccgctggtgaccctctgcttccctctctctttccctttggcagctgcaatacacagtgttattttggggaaataaatctagcaaagcctcgccttccatgccgagcgtcctcttggctctgagagggaaaggtctgtccttgggatgctctctggtcttttttccccctaagtctttctctttcccatcatacccttccctgcccaccttgttttctgttctccttttattaggaattcccaagtgaattttattaatgtgggagtggaacagatgctaaaagctatccaggattttgtttctgtttgttttaaattttgtggttccttccctttcctccccctcccatgcgtaagacgttctgtgtaacctccattaaatttggtacaaaaccactcgccagagctgtggtgtcagaaaaataaaatatattgtttctta

SEQ ID NO: 326921 - DNA, 6152 bp, Homo sapiens
cgccgccgctgccgccgccggggggagacgctgcgccgccgctgccgctggccccggccccgcggggctgagagccgccccggacccaagcctctttccctgctccgcacctcctctcccctcccccactcctgcctccggggactgaatgtgggcccagttggcgtcattctgctttgacctaaacattcccatctgattgggtggcagagatcatttttggaaagttcttccgtgtcccgatgtagaagaaatagcaaattggacatattgaaagacaagggtcatctttgagaagggggttcctggactcctcacctccaggatgagcactgcagtgtcgtgacccttggggttttgtatgccctggagatgcgagattttcctctggcagcaggaggcacgcacccagagaatgctggagctgcaaggggaaaggacccacttccacagcagagaaaaacaaagaggaaaaaggcatacaggcagcgagcgctaagggacgcacccagcaagcagtgggccagtgccactgcccccagcagctgtttctgctgcaacccgagaggaactcggtgagcctgtcccgtttgtgactgcaagctcaggatttcaatcaatgcattccagtaaccctaaagtgaggagctctccatcaggaaacacacagagtagccctaagtcaaagcaggaggtgatggtccgtccccctacagtgatgtccccatctggaaacccccagctggattccaaattctccaatcagggtaaacaggggggctcagccagccaatcccagccatccccctgtgactccaagagtgggggccatacccctaaagcactccctggcccaggtgggagcatggggctgaagaatggggctggaaatggtgccaagggcaaggggaaaagggagcgaagtatttccgccgactcctttgatcagagagatcctgggactccaaacgatgactctgacattaaagaatgtaattctgctgaccacataaagtcccaggattcccagcacacaccacactcgatgaccccatcaaatgctacagcccccaggtcttctaccccctcccatggccaaactactgccacagagcccacacctgctcagaagactccagccaaagtggtgtacgtgttttctactgagatggccaataaagctgcagaagctgttttgaagggccaggttgaaactatcgtctctttccacatccagaacatttctaacaacaagacagagagaagcacagcgcctctgaacacacagatatctgcccttcggaatgatccgaaacctctcccacaacagcccccagctccggccaaccaggaccagaattcttcccagaataccagactgcagccaactccacccattccggcaccagcacccaagcctgccgcacccccacgtcccctggaccgggagagtcctggggtagaaaacaaactgattccttctgtaggaagtcctgccagctccactccactgcccccagatggtactgggcccaactcaactcccaacaatagggcagtgacccctgtctcccaggggagcaatagctcttcagcagatcccaaagcccctccgcctccaccagtgtccagtggcgagccccccacactgggagagaatcccgatggcctatctcaggagcagctggagcaccgggagcgctccttacaaactctcagagatatccagcgcatgctttttcctgatgagaaagaattcacaggagcacaaagtgggggaccgcagcagaatcctggggtattagatgggcctcagaaaaaaccagaagggccaatacaggccatgatggcccaatcccaaagcctaggtaagggacctgggccccggacagacgtgggagctccatttggccctcaaggacatagagatgtacccttttctccagatgaaatggttccaccttctatgaactcccagtctgggaccataggacccgaccaccttgaccatatgactcccgagcagatagcgtggctgaaactgcagcaggagttttatgaagagaagaggaggaagccggaacaagtggttgtccagcagtgttccctccaggacatgatggtccatcagcacgggcctcggggagtggtccgaggacccccccctccataccagatgacccctagtgaaggctgggcacctgggggtacagagccattttctgatggtatcaacatgccacattctctgcccccgaggggcatggctccccaccccaacatgccagggagccagatgcgcctccctggatttgcaggcatgataaactctgaaatggaagggccgaatgtccccaaccctgcatctagaccaggtctttctggagtcagttggccagatgatgtgccaaaaatcccagatggtcgaaattttcctcctggccagggcattttcagcggtcctggccgaggggaacgcttcccaaacccccaaggattgtctgaagagatgtttcagcagcagctggcagagaaacagctgggtctccccccagggatggccatggaaggcatcaggcccagcatggagatgaacaggatgattccaggctcccagcgccacatggagcctgggaataaccccattttccctcgaataccagttgagggccctctgagtccttctaggggtgactttccaaaaggaattcccccacagatgggccctggtcgggaacttgagtttgggatggttcctagtgggatgaagggagatgtcaatctaaatgtcaacatgggatccaactctcagatgatacctcagaagatgagagaggctggggcgggccctgaggagatgctgaaattacgcccaggtggctcagacatgctgcctgctcagcagaagatggtgccactgccatttggtgagcacccccagcaggagtatggcatgggccccagaccattccttcccatgtctcagggtccaggcagcaacagtggcttgcggaatctcagagaaccaattgggcccgaccagaggactaacagccggctcagtcatatgccaccactacctctcaacccttccagtaaccccaccagcctcaacacagctcctccagttcagcgcggcctggggcggaagcccttggatatatctgtggcaggcagccaggtgcattccccaggcattaaccctctgaagtctcccacgatgcaccaagtccagtcaccaatgctgggctcgccctcggggaacctcaagtccccccagactccatcgcagctggcaggcatgctggcgggcccagctgctgctgcttccattaagtccccccctgttttggggtctgctgctgcttcacctgtccacctcaagtctccatcacttcctgccccgtcacctggatggacctcttctccaaaacctccccttcagagtcctgggatccctccaaaccataaagcacccctcaccatggcctccccagccatgctgggaaatgtagagtcaggtggccccccacctcctacagccagccagcctgcctctgtgaatatccctggaagtcttccctctagtacaccttataccatgcctccagagccaaccctttcccagaacccactctctattatgatgtctcgaatgtccaagtttgcaatgcccagttccaccccgttataccatgatgctatcaagactgtggccagctcagatgacgactcccctccagctcgttctcccaacttgccatcaatgaataatatgccaggaatgggcattaatacacagaatcctcgaatttcaggtccaaaccccgtggttccgatgccaaccctcagcccaatgggaatgacccagccactttctcactccaatcagatgccctctccaaatgccgtgggacccaacatacctcctcatggggtcccaatggggcctggcttgatgtcacacaatcctatcatggggcatgggtcccaggagccaccgatggtacctcaaggacggatgggcttcccccagggcttccctccagtacagtctcccccacagcaggttccattccctcacaatggccccagtggggggcagggcagcttcccaggagggatgggtttcccaggagaaggcccccttggccgccccagcaacctgccccaaagttcagcagatgcagcactttgcaagcctggaggccccgggggtcctgactccttcactgtcctggggaacagcatgccttcggtgtttacagacccagatctgcaggaggtcatccgacctggagccaccggaatacctgagtttgatctatcccgcattattccatctgagaagcccagccagacgctgcaatatttccctcgaggggaagttccaggccgtaaacagccccagggtcctggacctgggttttcacacatgcaggggatgatgggcgaacaagcccccagaatgggactagcattacctggcatgggaggtccagggccagtgggaactccggacatccctcttggtacagctccatccatgccaggccacaaccccatgagaccaccagcctttctccaacaaggcatgatgggacctcaccatcggatgatgtcaccagcacaatctacaatgcccggccagcccaccctgatgagcaatccagctgctgccgtgggcatgattcctggcaaggatcgggggcctgccgggctctacacccaccctgggcctgtgggctctccaggcatgatgatgtccatgcagggcatgatgggaccccaacagaacatcatgatccccccacagatgaggccccggggcatggctgctgacgtgggcatgggtggatttagccaaggacctggcaacccaggaaacatgatgttttaagctgctaagatgggatgtgccgatccttgtcaaaatgagattccaggtcctgagagctgctttgagggagttccaggagtacttactattggtcatgcaataggagaacagagacccgagggctgctttgggggaggggggaactcgagaatgtatggatttacctgaaaacaaattattcatttaatcaacaggtgtgttttttttaagatttattttttaaaaattatttttgtggacttgggtatcaatgatggcacctacttttgggaatctgtagctgtgctttgagaattgccatcggtcatgtgttgcaccgttctctgtatgtttacgtcctttggactggcttctcccaggattcttttctgtttttgtttttttgatttgggctttatttttttctgtgtactgtactatattgtaaaagggattttagcagagactttagtctttggggcaagaggagaacaggaatgctgggctgtttactttaggtggagaatccatcttcagacctttggactattttctttcaactgcagtgtatagaaaaaccaaactacgacctcagagcagagtattaatgaaaagcacaaaaaaaggaactaagttcagcgaggggtggggggaggggggagatttttcttttgaaaaataatgactcttaggacatttgtttttcagttcaagtgctcttcagcactgtcttgtctcccaatataccaacccactggcacatttttctcttgttttctctctccgattttgctctgtctcctcagttaagtgtttccttcctttgtgccccccgctggtgaccctctgcttccctctctctttccctttggcagctgcaatacacagtgttattttggggaaataaatctagcaaagcctcgccttccatgccgagcgtcctcttggctctgagagggaaaggtctgtccttgggatgctctctggtcttttttccccctaagtctttctctttcccatcatacccttccctgcccaccttgttttctgttctccttttattaggaattcccaagtgaattttattaatgtgggagtggaacagatgctaaaagctatccaggattttgtttctgtttgttttaaattttgtggttccttccctttcctccccctcccatgcgtaagacgttctgtgtaacctccattaaatttggtacaaaaccactcgccagagctgtggtgtcagaaaaataaaatatattgtttctta

SEQ ID NO: 326922 - DNA, 5930 bp, Homo sapiens
cgccgccgctgccgccgccggggggagacgctgcgccgccgctgccgctggccccggccccgcggggctgagagccgccccggacccaagcctctttccctgctccgcacctcctctcccctcccccactcctgcctccggggactgaatgtgggcccagttggcgtcattctgctttgacctaaacattcccatctgattgggtggcagagatcatttttggaaagttcttccgtgtcccgatgtagaagaaatagcaaattggacatattgaaagacaagggtcatctttgagaagggggttcctggactcctcacctccaggatgagcactgcagtgtcgtgacccttggggttttgtatgccctggagatgcgagattttcctctggcagcaggaggcacgcacccagagaatgctggagctgcaaggggaaaggacccacttccacagcagagaaaaacaaagaggaaaaaggcatacaggcagcgagcgctaagggacgcacccagcaagcagtgggccagtgccactgcccccagcagctgtttctgctgcaacccgagaggaactcggtgagcctgtcccgtttgtgactgcaagctcaggatttcaatcaatgcattccagtaaccctaaagtgaggagctctccatcaggaaacacacagagtagccctaagtcaaagcaggaggtgatggtccgtccccctacagtgatgtccccatctggaaacccccagctggattccaaattctccaatcaggaatgtaattctgctgaccacataaagtcccaggattcccagcacacaccacactcgatgaccccatcaaatgctacagcccccaggtcttctaccccctcccatggccaaactactgccacagagcccacacctgctcagaagactccagccaaagtggtgtacgtgttttctactgagatggccaataaagctgcagaagctgttttgaagggccaggttgaaactatcgtctctttccacatccagaacatttctaacaacaagacagagagaagcacagcgcctctgaacacacagatatctgcccttcggaatgatccgaaacctctcccacaacagcccccagctccggccaaccaggaccagaattcttcccagaataccagactgcagccaactccacccattccggcaccagcacccaagcctgccgcacccccacgtcccctggaccgggagagtcctggggtagaaaacaaactgattccttctgtaggaagtcctgccagctccactccactgcccccagatggtactgggcccaactcaactcccaacaatagggcagtgacccctgtctcccaggggagcaatagctcttcagcagatcccaaagcccctccgcctccaccagtgtccagtggcgagccccccacactgggagagaatcccgatggcctatctcaggagcagctggagcaccgggagcgctccttacaaactctcagagatatccagcgcatgctttttcctgatgagaaagaattcacaggagcacaaagtgggggaccgcagcagaatcctggggtattagatgggcctcagaaaaaaccagaagggccaatacaggccatgatggcccaatcccaaagcctaggtaagggacctgggccccggacagacgtgggagctccatttggccctcaaggacatagagatgtacccttttctccagatgaaatggttccaccttctatgaactcccagtctgggaccataggacccgaccaccttgaccatatgactcccgagcagatagcgtggctgaaactgcagcaggagttttatgaagagaagaggaggaagccggaacaagtggttgtccagcagtgttccctccaggacatgatggtccatcagcacgggcctcggggagtggtccgaggacccccccctccataccagatgacccctagtgaaggctgggcacctgggggtacagagccattttctgatggtatcaacatgccacattctctgcccccgaggggcatggctccccaccccaacatgccagggagccagatgcgcctccctggatttgcaggcatgataaactctgaaatggaagggccgaatgtccccaaccctgcatctagaccaggtctttctggagtcagttggccagatgatgtgccaaaaatcccagatggtcgaaattttcctcctggccagggcattttcagcggtcctggccgaggggaacgcttcccaaacccccaaggattgtctgaagagatgtttcagcagcagctggcagagaaacagctgggtctccccccagggatggccatggaaggcatcaggcccagcatggagatgaacaggatgattccaggctcccagcgccacatggagcctgggaataaccccattttccctcgaataccagttgagggccctctgagtccttctaggggtgactttccaaaaggaattcccccacagatgggccctggtcgggaacttgagtttgggatggttcctagtgggatgaagggagatgtcaatctaaatgtcaacatgggatccaactctcagatgatacctcagaagatgagagaggctggggcgggccctgaggagatgctgaaattacgcccaggtggctcagacatgctgcctgctcagcagaagatggtgccactgccatttggtgagcacccccagcaggagtatggcatgggccccagaccattccttcccatgtctcagggtccaggcagcaacagtggcttgcggaatctcagagaaccaattgggcccgaccagaggactaacagccggctcagtcatatgccaccactacctctcaacccttccagtaaccccaccagcctcaacacagctcctccagttcagcgcggcctggggcggaagcccttggatatatctgtggcaggcagccaggtgcattccccaggcattaaccctctgaagtctcccacgatgcaccaagtccagtcaccaatgctgggctcgccctcggggaacctcaagtccccccagactccatcgcagctggcaggcatgctggcgggcccagctgctgctgcttccattaagtccccccctgttttggggtctgctgctgcttcacctgtccacctcaagtctccatcacttcctgccccgtcacctggatggacctcttctccaaaacctccccttcagagtcctgggatccctccaaaccataaagcacccctcaccatggcctccccagccatgctgggaaatgtagagtcaggtggccccccacctcctacagccagccagcctgcctctgtgaatatccctggaagtcttccctctagtacaccttataccatgcctccagagccaaccctttcccagaacccactctctattatgatgtctcgaatgtccaagtttgcaatgcccagttccaccccgttataccatgatgctatcaagactgtggccagctcagatgacgactcccctccagctcgttctcccaacttgccatcaatgaataatatgccaggaatgggcattaatacacagaatcctcgaatttcaggtccaaaccccgtggttccgatgccaaccctcagcccaatgggaatgacccagccactttctcactccaatcagatgccctctccaaatgccgtgggacccaacatacctcctcatggggtcccaatggggcctggcttgatgtcacacaatcctatcatggggcatgggtcccaggagccaccgatggtacctcaaggacggatgggcttcccccagggcttccctccagtacagtctcccccacagcaggttccattccctcacaatggccccagtggggggcagggcagcttcccaggagggatgggtttcccaggagaaggcccccttggccgccccagcaacctgccccaaagttcagcagatgcagcactttgcaagcctggaggccccgggggtcctgactccttcactgtcctggggaacagcatgccttcggtgtttacagacccagatctgcaggaggtcatccgacctggagccaccggaatacctgagtttgatctatcccgcattattccatctgagaagcccagccagacgctgcaatatttccctcgaggggaagttccaggccgtaaacagccccagggtcctggacctgggttttcacacatgcaggggatgatgggcgaacaagcccccagaatgggactagcattacctggcatgggaggtccagggccagtgggaactccggacatccctcttggtacagctccatccatgccaggccacaaccccatgagaccaccagcctttctccaacaaggcatgatgggacctcaccatcggatgatgtcaccagcacaatctacaatgcccggccagcccaccctgatgagcaatccagctgctgccgtgggcatgattcctggcaaggatcgggggcctgccgggctctacacccaccctgggcctgtgggctctccaggcatgatgatgtccatgcagggcatgatgggaccccaacagaacatcatgatccccccacagatgaggccccggggcatggctgctgacgtgggcatgggtggatttagccaaggacctggcaacccaggaaacatgatgttttaagctgctaagatgggatgtgccgatccttgtcaaaatgagattccaggtcctgagagctgctttgagggagttccaggagtacttactattggtcatgcaataggagaacagagacccgagggctgctttgggggaggggggaactcgagaatgtatggatttacctgaaaacaaattattcatttaatcaacaggtgtgttttttttaagatttattttttaaaaattatttttgtggacttgggtatcaatgatggcacctacttttgggaatctgtagctgtgctttgagaattgccatcggtcatgtgttgcaccgttctctgtatgtttacgtcctttggactggcttctcccaggattcttttctgtttttgtttttttgatttgggctttatttttttctgtgtactgtactatattgtaaaagggattttagcagagactttagtctttggggcaagaggagaacaggaatgctgggctgtttactttaggtggagaatccatcttcagacctttggactattttctttcaactgcagtgtatagaaaaaccaaactacgacctcagagcagagtattaatgaaaagcacaaaaaaaggaactaagttcagcgaggggtggggggaggggggagatttttcttttgaaaaataatgactcttaggacatttgtttttcagttcaagtgctcttcagcactgtcttgtctcccaatataccaacccactggcacatttttctcttgttttctctctccgattttgctctgtctcctcagttaagtgtttccttcctttgtgccccccgctggtgaccctctgcttccctctctctttccctttggcagctgcaatacacagtgttattttggggaaataaatctagcaaagcctcgccttccatgccgagcgtcctcttggctctgagagggaaaggtctgtccttgggatgctctctggtcttttttccccctaagtctttctctttcccatcatacccttccctgcccaccttgttttctgttctccttttattaggaattcccaagtgaattttattaatgtgggagtggaacagatgctaaaagctatccaggattttgtttctgtttgttttaaattttgtggttccttccctttcctccccctcccatgcgtaagacgttctgtgtaacctccattaaatttggtacaaaaccactcgccagagctgtggtgtcagaaaaataaaatatattgtttctta

SEQ ID NO: 326923 - DNA, 5698 bp, Homo sapiens
cgccgccgctgccgccgccggggggagacgctgcgccgccgctgccgctggccccggccccgcggggctgagagccgccccggacccaagcctctttccctgctccgcacctcctctcccctcccccactcctgcctccggggactgaatgtgggcccagttggcgtcattctgctttgacctaaacattcccatctgattgggtggcagagatcatttttggaaagttcttccgtgtcccgatgtagaagaaatagcaaattggacatattgaaagacaagggtcatctttgagaagggggttcctggactcctcacctccaggatgagcactgcagtgtcgtgacccttggggttttgtatgccctggagatgcgagattttcctctggcagcaggaggcacgcacccagagaatgctggagctgcaaggggaaaggacccacttccacagcagagaaaaacaaagaggaaaaaggcatacaggcagcgagcgctaagggacgcacccagcaagcagtgggccagtgccactgcccccagcagctgtttctgctgcaacccgagaggaactcggtgagcctgtcccgtttgtgactgcaagctcaggatttcaatcaatgcattccagtaaccctaaagtgaggagctctccatcaggaaacacacagagtagccctaagtcaaagcaggaggtgatggtccgtccccctacagtgatgtccccatctggaaacccccagctggattccaaattctccaatcagggtaaacaggggggctcagccagccaatcccagccatccccctgtgactccaagagtgggggccatacccctaaagcactccctggcccaggtgggagcatggggctgaagaatggggctggaaatggtgccaagggcaaggggaaaagggagcgaagtatttccgccgactcctttgatcagagagatcctgggactccaaacgatgactctgacattaaagaatgtaattctgctgaccacataaagtcccaggattcccagcacacaccacactcgatgaccccatcaaatgctacagcccccaggtcttctaccccctcccatggccaaactactgccacagagcccacacctgctcagaagactccagccaaagtggtgtacgtgttttctactgagatggccaataaagctgcagaagctgttttgaagggccaggttgaaactatcgtctctttccacatccagaacatttctaacaacaagacagagagaagcacagcgcctctgaacacacagatatctgcccttcggaatgatccgaaacctctcccacaacagcccccagctccggccaaccaggaccagaattcttcccagaataccagactgcagccaactccacccattccggcaccagcacccaagcctgccgcacccccacgtcccctggaccgggagagtcctggggtagaaaacaaactgattccttctgtaggaagtcctgccagctccactccactgcccccagatggtactgggcccaactcaactcccaacaatagggcagtgacccctgtctcccaggggagcaatagctcttcagcagatcccaaagcccctccgcctccaccagtgtccagtggcgagccccccacactgggagagaatcccgatggcctatctcaggagcagctggagcaccgggagcgctccttacaaactctcagagatatccagcgcatgctttttcctgatgagaaagaattcacaggagcacaaagtgggggaccgcagcagaatcctggggtattagatgggcctcagaaaaaaccagaagggccaatacaggccatgatggcccaatcccaaagcctaggtaagggacctgggccccggacagacgtgggagctccatttggccctcaaggacatagagatgtacccttttctccagatgaaatggttccaccttctatgaactcccagtctgggaccataggacccgaccaccttgaccatatgactcccgagcagatagcgtggctgaaactgcagcaggagttttatgaagagaagaggaggaagccggaacaagtggttgtccagcagtgttccctccaggacatgatggtccatcagcacgggcctcggggagtggtccgaggacccccccctccataccagatgacccctagtgaaggctgggcacctgggggtacagagccattttctgatggtatcaacatgccacattctctgcccccgaggggcatggctccccaccccaacatgccagggagccagatgcgcctccctggatttgcaggcatgataaactctgaaatggaagggccgaatgtccccaaccctgcatctagaccaggtctttctggagtcagttggccagatgatgtgccaaaaatcccagatggtcgaaattttcctcctggccagggcattttcagcggtcctggccgaggggaacgcttcccaaacccccaaggattgtctgaagagatgtttcagcagcagctggcagagaaacagctgggtctccccccagggatggccatggaaggcatcaggcccagcatggagatgaacaggatgattccaggctcccagcgccacatggagcctgggaataaccccattttccctcgaataccagttgagggccctctgagtccttctaggggtgactttccaaaaggaattcccccacagatgggccctggtcgggaacttgagtttgggatggttcctagtgggatgaagggagatgtcaatctaaatgtcaacatgggatccaactctcagatgatacctcagaagatgagagaggctggggcgggccctgaggagatgctgaaattacgcccaggtggctcagacatgctgcctgctcagcagaagatggtgccactgccatttggtgagcacccccagcaggagtatggcatgggccccagaccattccttcccatgtctcagggtccaggcagcaacagtggcttgcggaatctcagagaaccaattgggcccgaccagaggactaacagccggctcagtcatatgccaccactacctctcaacccttccagtaaccccaccagcctcaacacagctcctccagttcagcgcggcctggggcggaagcccttggatatatctgtggcaggcagccaggtgcattccccaggcattaaccctctgaagtctcccacgatgcaccaagtccagtcaccaatgctgggctcgccctcggggaacctcaagtccccccagactccatcgcagctggcaggcatgctggcgggcccagctgctgctgcttccattaagtccccccctgttttggggtctgctgctgcttcacctgtccacctcaagtctccatcacttcctgccccgtcacctggatggacctcttctccaaaacctccccttcagagtcctgggatccctccaaaccataaagcacccctcaccatggcctccccagccatgctgggaaatgtagagtcaggtggccccccacctcctacagccagccagcctgcctctgtgaatatccctggaagtcttccctctagtacaccttataccatgcctccagagccaaccctttcccagaacccactctctattatgatgtctcgaatgtccaagtttgcaatgcccagttccaccccgttataccatgatgctatcaagactgtggccagctcagatgacgactcccctccagctcgttctcccaacttgccatcaatgaataatatgccaggaatgggcattaatacacagaatcctcgaatttcaggtccaaaccccgtggttccgatgccaaccctcagcccaatgggaatgacccagccactttctcactccaatcagatgccctctccaaatgccgtgggacccaacatacctcctcatggggtcccaatggggcctggcttgatgtcacacaatcctatcatggggcatgggtcccaggagccaccgatggtacctcaaggacggatgggcttcccccagggcttccctccagtacagtctcccccacagcaggttccattccctcacaatggccccagtggggggcagggcagcttcccaggagggatgggtttcccaggagaaggcccccttggccgccccagcaacctgccccaaagttcagcagatgcagcactttgcaagcctggaggccccgggggtcctgactccttcactgtcctggggaacagcatgccttcggtgtttacagacccagatctgcaggaggtcatccgacctggagccaccggaatacctgagtttgatctatcccgcattattccatctgagaagcccagccagacgctgcaatatttccctcgaggggaagttccaggccgtaaacagccccagggtcctggacctgggttttcacacatgcaggggatgatgggcgaacaagcccccagaatgggactagcattacctggcatgggaggtccagggccagtgggaactccggacatccctcttggtacagctccatccatgccaggccacaaccccatgagaccaccagcctttctccaacaaggcatgatgggacctcaccatcggatgatgtcaccagcacaatctacaatgcccggccagcccaccctgatgagcaatccagctgctgccgtgggcatgattcctggcaaggatcgggggcctgccgggctctacacccaccctgggcctgtgggctctccaggcatgatgatgtccatgcagggcatgatgggaccccaacagaacatcatgatccccccacagatgaggccccggggcatggctgctgacgtgggcatgggtggatttagccaaggacctggcaacccaggaaacatgatgttttaagctgctaagatgggatgtgccgatccttgtcaaaatgagattccaggtcctgagagctgctttgagggagttccaggagtacttactattggtcatgcaataggagaacagagacccgagggctgctttgggggaggggggaactcgagaatgtatggatttacctgaaaacaaattattcatttaatcaacaggtgtgttttttttaagatttattttttaaaaattatttttgtggacttgggtatcaatgatggcacctacttttgggaatctgtagctgtgctttgagaattgccatcggtcatgtgttgcaccgttctctgtatgtttacgtcctttggactggcttctcccaggattcttttctgtttttgtttttttgatttgggctttatttttttctgtgtactgtactatattgtaaaagggattttagcagagactttagtctttggggcaagaggagaacaggaatgctgggctgtttactttaggtggagaatccatcttcagacctttggactattttctttcaactgcagtgtatagaaaaaccaaactacgacctcagagcagagtattaatgaaaagcacaaaaaaaggaactaagttcagcgagtggaacagatgctaaaagctatccaggattttgtttctgtttgttttaaattttgtggttccttccctttcctccccctcccatgcgtaagacgttctgtgtaacctccattaaatttggtacaaaaccactcgccagagctgtggtgtcagaaaaataaaatatattgtttctta

SEQ ID NO: 326924 - DNA, 4058 bp, Homo sapiens
cgccgccgctgccgccgccggggggagacgctgcgccgccgctgccgctggccccggccccgcggggctgagagccgccccggacccaagcctctttccctgctccgcacctcctctcccctcccccactcctgcctccggggactgaatgtgggcccagttggcgtcattctgctttgacctaaacattcccatctgattgggtggcagagatcatttttggaaagttcttccgtgtcccgatgtagaagaaatagcaaattggacatattgaaagacaagggtcatctttgagaagggggttcctggactcctcacctccaggatgagcactgcagtgtcgtgacccttggggttttgtatgccctggagatgcgagattttcctctggcagcaggaggcacgcacccagagaatgctggagctgcaaggggaaaggacccacttccacagcagagaaaaacaaagaggaaaaaggcatacaggcagcgagcgctaagggacgcacccagcaagcagtgggccagtgccactgcccccagcagctgtttctgctgcaacccgagaggaactcggtgagcctgtcccgtttgtgactgcaagctcaggatttcaatcaatgcattccagtaaccctaaagtgaggagctctccatcaggaaacacacagagtagccctaagtcaaagcaggaggtgatggtccgtccccctacagtgatgtccccatctggaaacccccagctggattccaaattctccaatcagggtaaacaggggggctcagccagccaatcccagccatccccctgtgactccaagagtgggggccatacccctaaagcactccctggcccaggtgggagcatggggctgaagaatggggctggaaatggtgccaagggcaaggggaaaagggagcgaagtatttccgccgactcctttgatcagagagatcctgggactccaaacgatgactctgacattaaagaatgtaattctgctgaccacataaagtcccaggattcccagcacacaccacactcgatgaccccatcaaatgctacagcccccaggtcttctaccccctcccatggccaaactactgccacagagcccacacctgctcagaagactccagccaaagtggtgtacgtgttttctactgagatggccaataaagctgcagaagctgttttgaagggccaggttgaaactatcgtctctttccacatccagaacatttctaacaacaagacagagagaagcacagcgcctctgaacacacagatatctgcccttcggaatgatccgaaacctctcccacaacagcccccagctccggccaaccaggaccagaattcttcccagaataccagactgcagccaactccacccattccggcaccagcacccaagcctgccgcacccccacgtcccctggaccgggagagtcctggggtagaaaacaaactgattccttctgtaggaagtcctgccagctccactccactgcccccagatggtactgggcccaactcaactcccaacaatagggcagtgacccctgtctcccaggggagcaatagctcttcagcagatcccaaagcccctccgcctccaccagtgtccagtggcgagccccccacactgggagagaatcccgatggcctatctcaggagcagctggagcaccgggagcgctccttacaaactctcagagatatccagcgcatgctttttcctgatgagaaagaattcacaggagcacaaagtgggggaccgcagcagaatcctggggtattagatgggcctcagaaaaaaccagaagggccaatacaggccatgatggcccaatcccaaagcctaggtaagggacctgggccccggacagacgtgggagctccatttggccctcaaggacatagagatgtacccttttctccagatgaaatggttccaccttctatgaactcccagtctgggaccataggacccgaccaccttgaccatatgactcccgagcagatagcgtggctgaaactgcagcaggagttttatgaagagaagaggaggaagccggaacaagtggttgtccagcagtgttccctccaggacatgatggtccatcagcacgggcctcggggagtggtccgaggacccccccctccataccagatgacccctagtgaaggctgggcacctgggggtacagagccattttctgatggtatcaacatgccacattctctgcccccgaggggcatggctccccaccccaacatgccagggagccagatgcgcctccctggatttgcaggcatgataaactctgaaatggaagggccgaatgtccccaaccctgcatctagaccaggtctttctggagtcagttggccagatgatgtgccaaaaatcccagatggtcgaaattttcctcctggccagggcattttcagcggtcctggccgaggggaacgcttcccaaacccccaaggattgtctgaagagatgtttcagcagcagctggcagagaaacagctgggtctccccccagggatggccatggaaggcatcaggcccagcatggagatgaacaggatgattccaggctcccagcgccacatggagcctgggaataaccccattttccctcgaataccagttgagggccctctgagtccttctaggggtgactttccaaaaggaattcccccacagatgggccctggtcgggaacttgagtttgggatggttcctagtgggatgaagggagatgtcaatctaaatgtcaacatgggatccaactctcagatgatacctcagaagatgagagaggctggggcgggccctgaggagatgctgaaattacgcccaggtggctcagacatgctgcctgctcagcagaagatggtgccactgccatttggtgagcacccccagcaggagtatggcatgggccccagaccattccttcccatgtctcagggtccaggcagcaacagtggcttgcggaatctcagagaaccaattgggcccgaccagaggactaacagccggctcagtcatatgccaccactacctctcaacccttccagtaaccccaccagcctcaacacagctcctccagttcagcgcggcctggggcggaagcccttggatatatctgtggcaggcagccaggtgcattccccaggcattaaccctctgaagtctcccacgatgcaccaagtccagtcaccaatgctgggctcgccctcggggaacctcaagtccccccagactccatcgcagctggcaggcatgctggcgggcccagctgctgctgcttccattaagtccccccctgttttggggtctgctgctgcttcacctgtccacctcaagtctccatcacttcctgccccgtcacctggatggacctcttctccaaaacctccccttcagagtcctgggatccctccaaaccataaagcacccctcaccatggcctccccagccatgctgggaaatgtagagtcaggtggccccccacctcctacagccagccagcctgcctctgtgaatatccctggaagtcttccctctagtacaccttataccatgcctccagagccaaccctttcccagaacccactctctattatgatgtctcgaatgtccaagtttgcaatgcccagttccaccccgttataccatgatgctatcaagactgtggccagctcagatgacgactcccctccagctcgttctcccaacttgccatcaatgaataatatgccaggtaagaaatcagaaaggcaggttgtggagtgagtgctagaccaaagagaaacctcttgaagcgttttctcaatggctatacacctgaataggtggaagttcaacaagtagaaaaaatcttccatctaaggtagtttcagtagaatgaaagtgtcttgactagaggaagataatttcttattagcttgattccttatttgtttgtaagaaagcaggtttctttatagttctgatgcttctgtgtacctggatggttttgagggtttgttgtttttgt

SEQ ID NO: 326925 - DNA, 331 bp, Homo sapiens
cagccatgctgggaaatgtagagtcaggtcagtatgcttgcatcctcacagttgcacctagtagctggagactgctagacctgatagttactttaagaaaactggtgtcttgagtacacagacagaggaggcagtctttgttgaaatggccatatttgtggcaaggtgcataatcagtgcttccatggggttatgcagaagtgtccaatctcagcaaaaaatacgtatgtcagagagactgttgaagaggggaaatggggaatatgtgttgggttcacagaataatttacattcgcacaatgaacaaatgcaataaaatgtcttaacagtg

SEQ ID NO: 326926 - DNA, 447 bp, Homo sapiens
ttggaaagttcttccgtgtcccgatgtagaagaaatagcaaattggacatattgaaaggtaaagaatatcctgataagtcagttccttttgtgattcaatctgaatatgttggatttttgtttctgtttctatagggcctcttgtaagttaaaactacgtttattcattattctaagaattctcaaggcaaaagtcatcaaactaaatgcaagtcaaaaatataagagcagttacacctttctgtgagcagggacttgtacaataactcatttcatagggccaaggataaaggcaggtggtgagaagttaaacaggtatttatcataccatcgttgtgtgtgaatgcaaggtaaaggtagcaatacacaagccccaagctcattataatacatggatcaaacagcattgattgagtttcttccaggtatcaggtgctgagaggagga

SEQ ID NO: 326927 - DNA, 5615 bp, Homo sapiens
ggctgaggtgaatcatggggtggttattttagtcctaagggtctccttgacccccaatagaaactgcctctctctaatttgtgctgaccagctgtatctggtgtctgatcttcctttgttatttgtttcttttagtagccctaagtcaaagcaggaggtgatggtccgtccccctacagtgatgtccccatctggaaacccccagctggattccaaattctccaatcagggtaaacaggggggctcagccagccaatcccagccatccccctgtgactccaagagtgggggccatacccctaaagcactccctggcccaggtgggagcatggggctgaagaatggggctggaaatggtgccaagggcaaggggaaaagggagcgaagtatttccgccgactcctttgatcagagagatcctgggactccaaacgatgactctgacattaaagaatgtaattctgctgaccacataaagtcccaggattcccagcacacaccacactcgatgaccccatcaaatgctacagcccccaggtcttctaccccctcccatggccaaactactgccacagagcccacacctgctcagaagactccagccaaagtggtgtacgtgttttctactgagatggccaataaagctgcagaagctgttttgaagggccaggttgaaactatcgtctctttccacatccagaacatttctaacaacaagacagagagaagcacagcgcctctgaacacacagatatctgcccttcggaatgatccgaaacctctcccacaacagcccccagctccggccaaccaggaccagaattcttcccagaataccagactgcagccaactccacccattccggcaccagcacccaagcctgccgcacccccacgtcccctggaccgggagagtcctggggtagaaaacaaactgattccttctgtaggaagtcctgccagctccactccactgcccccagatggtactgggcccaactcaactcccaacaatagggcagtgacccctgtctcccaggggagcaatagctcttcagcagatcccaaagcccctccgcctccaccagtgtccagtggcgagccccccacactgggagagaatcccgatggcctatctcaggagcagctggagcaccgggagcgctccttacaaactctcagagatatccagcgcatgctttttcctgatgagaaagaattcacaggagcacaaagtgggggaccgcagcagaatcctggggtattagatgggcctcagaaaaaaccagaagggccaatacaggccatgatggcccaatcccaaagcctaggtaagggacctgggccccggacagacgtgggagctccatttggccctcaaggacatagagatgtacccttttctccagatgaaatggttccaccttctatgaactcccagtctgggaccataggacccgaccaccttgaccatatgactcccgagcagatagcgtggctgaaactgcagcaggagttttatgaagagaagaggaggaagccggaacaagtggttgtccagcagtgttccctccaggacatgatggtccatcagcacgggcctcggggagtggtccgaggacccccccctccataccagatgacccctagtgaaggctgggcacctgggggtacagagccattttctgatggtatcaacatgccacattctctgcccccgaggggcatggctccccaccccaacatgccagggagccagatgcgcctccctggatttgcaggcatgataaactctgaaatggaagggccgaatgtccccaaccctgcatctagaccaggtctttctggagtcagttggccagatgatgtgccaaaaatcccagatggtcgaaattttcctcctggccagggcattttcagcggtcctggccgaggggaacgcttcccaaacccccaaggattgtctgaagagatgtttcagcagcagctggcagagaaacagctgggtctccccccagggatggccatggaaggcatcaggcccagcatggagatgaacaggatgattccaggctcccagcgccacatggagcctgggaataaccccattttccctcgaataccagttgagggccctctgagtccttctaggggtgactttccaaaaggaattcccccacagatgggccctggtcgggaacttgagtttgggatggttcctagtgggatgaagggagatgtcaatctaaatgtcaacatgggatccaactctcagatgatacctcagaagatgagagaggctggggcgggccctgaggagatgctgaaattacgcccaggtggctcagacatgctgcctgctcagcagaagatggtgccactgccatttggtgagcacccccagcaggagtatggcatgggccccagaccattccttcccatgtctcagggtccaggcagcaacagtggcttgcggaatctcagagaaccaattgggcccgaccagaggactaacagccggctcagtcatatgccaccactacctctcaacccttccagtaaccccaccagcctcaacacagctcctccagttcagcgcggcctggggcggaagcccttggatatatctgtggcaggcagccaggtgcattccccaggcattaaccctctgaagtctcccacgatgcaccaagtccagtcaccaatgctgggctcgccctcggggaacctcaagtccccccagactccatcgcagctggcaggcatgctggcgggcccagctgctgctgcttccattaagtccccccctgttttggggtctgctgctgcttcacctgtccacctcaagtctccatcacttcctgccccgtcacctggatggacctcttctccaaaacctccccttcagagtcctgggatccctccaaaccataaagcacccctcaccatggcctccccagccatgctgggaaatgtagagtcaggtggccccccacctcctacagccagccagcctgcctctgtgaatatccctggaagtcttccctctagtacaccttataccatgcctccagagccaaccctttcccagaacccactctctattatgatgtctcgaatgtccaagtttgcaatgcccagttccaccccgttataccatgatgctatcaagactgtggccagctcagatgacgactcccctccagctcgttctcccaacttgccatcaatgaataatatgccaggaatgggcattaatacacagaatcctcgaatttcaggtccaaaccccgtggttccgatgccaaccctcagcccaatgggaatgacccagccactttctcactccaatcagatgccctctccaaatgccgtgggacccaacatacctcctcatggggtcccaatggggcctggcttgatgtcacacaatcctatcatggggcatgggtcccaggagccaccgatggtacctcaaggacggatgggcttcccccagggcttccctccagtacagtctcccccacagcaggttccattccctcacaatggccccagtggggggcagggcagcttcccaggagggatgggtttcccaggagaaggcccccttggccgccccagcaacctgccccaaagttcagcagatgcagcactttgcaagcctggaggccccgggggtcctgactccttcactgtcctggggaacagcatgccttcggtgtttacagacccagatctgcaggaggtcatccgacctggagccaccggaatacctgagtttgatctatcccgcattattccatctgagaagcccagccagacgctgcaatatttccctcgaggggaagttccaggccgtaaacagccccagggtcctggacctgggttttcacacatgcaggggatgatgggcgaacaagcccccagaatgggactagcattacctggcatgggaggtccagggccagtgggaactccggacatccctcttggtacagctccatccatgccaggccacaaccccatgagaccaccagcctttctccaacaaggcatgatgggacctcaccatcggatgatgtcaccagcacaatctacaatgcccggccagcccaccctgatgagcaatccagctgctgccgtgggcatgattcctggcaaggatcgggggcctgccgggctctacacccaccctgggcctgtgggctctccaggcatgatgatgtccatgcagggcatgatgggaccccaacagaacatcatgatccccccacagatgaggccccggggcatggctgctgacgtgggcatgggtggatttagccaaggacctggcaacccaggaaacatgatgttttaagctgctaagatgggatgtgccgatccttgtcaaaatgagattccaggtcctgagagctgctttgagggagttccaggagtacttactattggtcatgcaataggagaacagagacccgagggctgctttgggggaggggggaactcgagaatgtatggatttacctgaaaacaaattattcatttaatcaacaggtgtgttttttttaagatttattttttaaaaattatttttgtggacttgggtatcaatgatggcacctacttttgggaatctgtagctgtgctttgagaattgccatcggtcatgtgttgcaccgttctctgtatgtttacgtcctttggactggcttctcccaggattcttttctgtttttgtttttttgatttgggctttatttttttctgtgtactgtactatattgtaaaagggattttagcagagactttagtctttggggcaagaggagaacaggaatgctgggctgtttactttaggtggagaatccatcttcagacctttggactattttctttcaactgcagtgtatagaaaaaccaaactacgacctcagagcagagtattaatgaaaagcacaaaaaaaggaactaagttcagcgaggggtggggggaggggggagatttttcttttgaaaaataatgactcttaggacatttgtttttcagttcaagtgctcttcagcactgtcttgtctcccaatataccaacccactggcacatttttctcttgttttctctctccgattttgctctgtctcctcagttaagtgtttccttcctttgtgccccccgctggtgaccctctgcttccctctctctttccctttggcagctgcaatacacagtgttattttggggaaataaatctagcaaagcctcgccttccatgccgagcgtcctcttggctctgagagggaaaggtctgtccttgggatgctctctggtcttttttccccctaagtctttctctttcccatcatacccttccctgcccaccttgttttctgttctccttttattaggaattcccaagtgaattttattaatgtgggagtggaacagatgctaaaagctatccaggattttgtttctgtttgttttaaattttgtggttccttccctttcctccccctcccatgcgtaagacgttctgtgtaacctccattaaatttggtacaaaaccactcgccagagctgtggtgtcagaaaaataaaatatattgtttctta

SEQ ID NO: 326928 - DNA, 6550 bp, Homo sapiens
cgccgccgctgccgccgccggggggagacgctgcgccgccgctgccgctggccccggccccgcggggctgagagccgccccggacccaagcctctttccctgctccgcacctcctctcccctcccccactcctgcctccggggactgaatgtgggcccagttggcgtcattctgctttgacctaaacattcccatctgattgggtggcagagatcatttttggaaagttcttccgtgtcccgatgtagaagaaatagcaaattggacatattgaaagacaagggtcatctttgagaagggggttcctggactcctcacctccaggatgagcactgcagtgtcgtgacccttggggttttgtatgccctggagatgcgagattttcctctggcagcaggaggcacgcacccagagaatgctggagctgcaaggggaaaggacccacttccacagcagagaaaaacaaagaggaaaaaggcatacaggcagcgagcgctaagggacgcacccagcaagcagtgggccagtgccactgcccccagcagctgtttctgctgcaacccgagaggaactcggtgagcctgtcccgtttgtgactgcaagctcaggatttcaatcaatgcattccagtaaccctaaagtgaggagctctccatcaggaaacacacagagtagccctaagtcaaagcaggaggtgatggtccgtccccctacagtgatgtccccatctggaaacccccagctggattccaaattctccaatcagggtaaacaggggggctcagccagccaatcccagccatccccctgtgactccaagagtgggggccatacccctaaagcactccctggcccaggtgggagcatggggctgaagaatggggctggaaatggtgccaagggcaaggggaaaagggagcgaagtatttccgccgactcctttgatcagagagatcctgggactccaaacgatgactctgacattaaagaatgtaattctgctgaccacataaagtcccaggattcccagcacacaccacactcgatgaccccatcaaatgctacagcccccaggtcttctaccccctcccatggccaaactactgccacagagcccacacctgctcagaagactccagccaaagtggtgtacgtgttttctactgagatggccaataaagctgcagaagctgttttgaagggccaggttgaaactatcgtctctttccacatccagaacatttctaacaacaagacagagagaagcacagcgcctctgaacacacagatatctgcccttcggaatgatccgaaacctctcccacaacagcccccagctccggccaaccaggaccagaattcttcccagaataccagactgcagccaactccacccattccggcaccagcacccaagcctgccgcacccccacgtcccctggaccgggagagtcctggggtagaaaacaaactgattccttctgtaggaagtcctgccagctccactccactgcccccagatggtactgggcccaactcaactcccaacaatagggcagtgacccctgtctcccaggggagcaatagctcttcagcagatcccaaagcccctccgcctccaccagtgtccagtggcgagccccccacactgggagagaatcccgatggcctatctcaggagcagctggagcaccgggagcgctccttacaaactctcagagatatccagcgcatgctttttcctgatgagaaagaattcacaggagcacaaagtgggggaccgcagcagaatcctggggtattagatgggcctcagaaaaaaccagaagggccaatacaggccatgatggcccaatcccaaagcctaggtaagggacctgggccccggacagacgtgggagctccatttggccctcaaggacatagagatgtacccttttctccagatgaaatggttccaccttctatgaactcccagtctgggaccataggacccgaccaccttgaccatatgactcccgagcagatagcgtggctgaaactgcagcaggagttttatgaagagaagaggaggaagccggaacaagtggttgtccagcagtgttccctccaggacatgatggtccatcagcacgggcctcggggagtggtccgaggacccccccctccataccagatgacccctagtgaaggctgggcacctgggggtacagagccattttctgatggtatcaacatgccacattctctgcccccgaggggcatggctccccaccccaacatgccagggagccagatgcgcctccctggatttgcaggcatgataaactctgaaatggaagggccgaatgtccccaaccctgcatctagaccaggtctttctggagtcagttggccagatgatgtgccaaaaatcccagatggtcgaaattttcctcctggccagggcattttcagcggtcctggccgaggggaacgcttcccaaacccccaaggattgtctgaagagatgtttcagcagcagctggcagagaaacagctgggtctccccccagggatggccatggaaggcatcaggcccagcatggagatgaacaggatgattccaggctcccagcgccacatggagcctgggaataaccccattttccctcgaataccagttgagggccctctgagtccttctaggggtgactttccaaaaggaattcccccacagatgggccctggtcgggaacttgagtttgggatggttcctagtgggatgaagggagatgtcaatctaaatgtcaacatgggatccaactctcagatgatacctcagaagatgagagaggctggggcgggccctgaggagatgctgaaattacgcccaggtggctcagacatgctgcctgctcagcagaagatggtgccactgccatttggtgagcacccccagcaggagtatggcatgggccccagaccattccttcccatgtctcagggtccaggcagcaacagtggcttgcggaatctcagagaaccaattgggcccgaccagaggactaacagccggctcagtcatatgccaccactacctctcaacccttccagtaaccccaccagcctcaacacagctcctccagttcagcgcggcctggggcggaagcccttggatatatctgtggcaggcagccaggtgcattccccaggcattaaccctctgaagtctcccacgatgcaccaagtccagtcaccaatgctgggctcgccctcggggaacctcaagtccccccagactccatcgcagctggcaggcatgctggcgggcccagctgctgctgcttccattaagtccccccctgttttggggtctgctgctgcttcacctgtccacctcaagtctccatcacttcctgccccgtcacctggatggacctcttctccaaaacctccccttcagagtcctgggatccctccaaaccataaagcacccctcaccatggcctccccagccatgctgggaaatgtagagtcaggtggccccccacctcctacagccagccagcctgcctctgtgaatatccctggaagtcttccctctagtacaccttataccatgcctccagagccaaccctttcccagaacccactctctattatgatgtctcgaatgtccaagtttgcaatgcccagttccaccccgttataccatgatgctatcaagactgtggccagctcagatgacgactcccctccagctcgttctcccaacttgccatcaatgaataatatgccaggaatgggcattaatacacagaatcctcgaatttcaggtccaaaccccgtggttccgatgccaaccctcagcccaatgggaatgacccagccactttctcactccaatcagatgccctctccaaatgccgtgggacccaacatacctcctcatggggtcccaatggggcctggcttgatgtcacacaatcctatcatggggcatgggtcccaggagccaccgatggtacctcaaggacggatgggcttcccccagggcttccctccagtacagtctcccccacagcaggttccattccctcacaatggccccagtggggggcagggcagcttcccaggagggatgggtttcccaggagaaggcccccttggccgccccagcaacctgccccaaagttcagcagatgcagcactttgcaagcctggaggccccgggggtcctgactccttcactgtcctggggaacagcatgccttcggtgtttacagacccagatctgcaggaggtcatccgacctggagccaccggaatacctgagtttgatctatcccgcattattccatctgagaagcccagccagacgctgcaatatttccctcgaggggaagttccaggccgtaaacagccccagggtcctggacctgggttttcacacatgcaggggatgatgggcgaacaagcccccagaatgggactagcattacctggcatgggaggtccagggccagtgggaactccggacatccctcttggtacagctccatccatgccaggccacaaccccatgagaccaccagcctttctccaacaaggcatgatgggacctcaccatcggatgatgtcaccagcacaatctacaatgcccggccagcccaccctgatgagcaatccagctgctgccgtgggcatgattcctggcaaggatcgggggcctgccgggctctacacccaccctgggcctgtgggctctccaggcatgatgatgtccatgcagggcatgatgggaccccaacagaacatcatgatccccccacagatgaggccccggggcatggctgctgacgtgggcatgggtggatttagccaaggacctggcaacccaggaaacatgatgttttaagctgctaagatgggatgtgccgatccttgtcaaaatgagattccaggtcctgagagctgctttgagggagttccaggagtacttactattggtcatgcaataggagaacagagacccgagggctgctttgggggaggggggaactcgagaatgtatggatttacctgaaaacaaattattcatttaatcaacaggtgtgttttttttaagatttattttttaaaaattatttttgtggacttgggtatcaatgatggcacctacttttgggaatctgtagctgtgctttgagaattgccatcggtcatgtgttgcaccgttctctgtatgtttacgtcctttggactggcttctcccaggattcttttctgtttttgtttttttgatttgggctttatttttttctgtgtactgtactatattgtaaaagggattttagcagagactttagtctttggggcaagaggagaacaggaatgctgggctgtttactttaggtggagaatccatcttcagacctttggactattttctttcaactgcagtgtatagaaaaaccaaactacgacctcagagcagagtattaatgaaaagcacaaaaaaaggaactaagttcagcgaggggtggggggaggggggagatttttcttttgaaaaataatgactcttaggacatttgtttttcagttcaagtgctcttcagcactgtcttgtctcccaatataccaacccactggcacatttttctcttgttttctctctccgattttgctctgtctcctcagttaagtgtttccttcctttgtgccccccgctggtgaccctctgcttccctctctctttccctttggcagctgcaatacacagtgttattttggggaaataaatctagcaaagcctcgccttccatgccgagcgtcctcttggctctgagagggaaaggtctgtccttgggatgctctctggtcttttttccccctaagtctttctctttcccatcatacccttccctgcccaccttgttttctgttctccttttattaggaattcccaagtgaattttattaatgtgggagtggaacagatgctaaaagctatccaggattttgtttctgtttgttttaaattttgtggttccttccctttcctccccctcccatgcgtaagacgttctgtgtaacctccattaaatttggtacaaaaccactcgccagagctgtggtgtcagaaaaataaaatatattgtttcttacaaaattgaactgccttttttgttcatttggattcctgattgtttagtattgggcataccggttgccatgtgacccagaagcgtagactctttgtattggagttgatcagtaaggtgatggttagggaaaccacataaaagtaccttctcaaagcatattccatgctgttaaggaataactactcatgtaggtttattctgtactgttcctatctcagtcatgaaatcctagttataagcagaagagcaaccctggtcccattgctgaactttacctttagggcaattaatggtctttattaggaatgtttgtgagagccagtttagtggtatgaagtaattaagaaggccaaaggttgtatgtttagttatttgaataagctatgagatgtcccttg

SEQ ID NO: 326929 - DNA, 195 bp, Homo sapiens
agttctctaaagaggaagatagcagaaataggttcacaaactttattttcaaaaatcaataaatatgtagtaggcatccactatatgctctgtataatcttatcgaaatgtctaacagaaacttgatgataaaaccaaatctgccatttgcttgctaccgctctgtttcagaaattcactcacacaccacacaca

SEQ ID NO: 326930 - DNA, 924 bp, Homo sapiens
atttgattggtaagctgagtcattacttggaggactacgaatgaactacaaatacttgatgagaagccatcactttgggcttctccgaatgagagaattcttataactgggcatgtcctttacaaggacgtagaagctgagactgtcacaaggatattggtttctatttgagacatggtttctaaggacacacagaaccatgcaaagaatttaaactacatccatttgaaacacattctcctttggaagaagtgaaaagcagagtggaggtgaggaagtagaaaggacctcactgtgatctccttctttagctcaaggttgctgcaagctggagctgagctgtcagtggaacgggtcctggaaatcattaagcaaggcgtcgttgcgctgcccaaagacagactgaagatcctgtgctccaacgctgtcagccgctggccgatcgtcaggtggacagagtccttgcatgccaggcctttgtgtatgcagcttctgggttctcacagtttcatggcttgtctgtcagaaatttccagaattgaaattcaaatatgtggaagaggagcagcccgaggagttttttatcccctatgtctggtctcttgtctacaactcagcagtcggcctgtactggaatccacaggacatccagctgttcaccatggattccgactgagggcaggatgctctcccacccggacccctccagccaagcagcccttcaagttcttttatttctgggtaacagaagtagacagacaggttacttggtgtatcttctgttaaagaggattgcacgagtgtgttttcctcacacactttgatttggagaattggtgctagttggcaatagataactcagcgtagatagtattgcaaaaaggggaggaaatacacaacaataataaatgtaaaaacctgcta

SEQ ID NO: 326931 - DNA, 464 bp, Homo sapiens
catccaatcctcgatccataatgcggtccgcggggcccccccagggcacactcaggagtacaccgcaaatttccagaattgaaattcaaatatgtggaagaggagcagcccgaggagttttttatcccctatgtctggtctcttgtctacaactcagcagtcggcctgtactggaatccacaggacatccagctgttcaccatggattccgactgagggcaggatgctctcccacccggacccctccagccaagcagcccttcaagttcttttatttctgggtaacagaagtagacagacaggttacttggtgtatcttctgttaaagaggattgcacgagtgtgttttcctcacacactttgatttggagaattggtgctagttggcaatagataactcagcgtagatagtattgcaaaaaggggaggaaatacacaacaataataaatgtaaaaacctgcta

SEQ ID NO: 326932 - DNA, 666 bp, Homo sapiens
cgcgcgccgcgtgccacgtgaccacctggctggcgcgcgcgcctgggggtctggtccctagccgcgttctcggtcgcttccctcttctctcgccgcctcctggcctccgcaccgacgcggcccgggctggagccgagccggggccgagctgcaggccggaccggagccggatctgtacccgctgagacgtggaaacatggaggcctgagccggtgtgcgccacctgggctgcggcggcgacagcgacttctcctgacccctctgccaccctcccatccgtccgcgggtccgtggagctggagcagatcccccagccggctgagacaggttgtcttttggaaatgcaggtttaaggacaaattatctgcttaagctagaagatgggatcgaatagcagcagaatcggcgatcttcctaaaaatgagtacttgaaaaagttatcaggcacggaatctatctctgagaatgacccgttctggaatcagcttctctcattttctttccctgcaccaactagcagtagtgagttgaaactcttggaggaagcaaccatttcagtctgcaggtcattaggctgtctaggccggacacagtggctcacgcctataatcccagcattttgagaggctgatgcgggtggatcacgaagtcaggagttcaagacca

SEQ ID NO: 326933 - DNA, 390 bp, Homo sapiens
atgaatgttgtaccttggtatcccggacaaagctgccattatgaagtggctacactatctggggtgtataccctagggtttgttgttgcctgccgagaaagaattaggacacggacatgtgggtgggttaaggagtggaaagcttaatagacagaagaaaggagagaggagagcagctccttgagaaagagacgtgttcgaaaaaggaaggatgaaagtagtggctagcctcagctttaggggcaggcgatgaggagccagatcagtatttctatctcagattcagaagacccagctgtccatgtgcatcatcggggaagcatcttgctctcagaataagcagctcaatccagctcccaaattctgaccgtggcttcagtgcctttgtgg

SEQ ID NO: 326934 - DNA, 2638 bp, Homo sapiens
cgcgcgccgcgtgccacgtgaccacctggctggcgcgcgcgcctgggggtctggtccctagccgcgttctcggtcgcttccctcttctctcgccgcctcctggcctccgcaccgacgcggcccgggctggagccgagccggggccgagctgcaggccggaccggagccggatctgtacccgctgagacgtggaaacatggaggcctgagccggtgtgcgccacctgggctgcggcggcgacagcgacttctcctgacccctctgccaccctcccatccgtccgcgggtccgtggagctggagcagatcccccagccggctgagacaggttgtcttttggaaatgcaggtttaaggacaaattatctgcttaagctagaagatgggatcgaatagcagcagaatcggcgatcttcctaaaaatgagtacttgaaaaagttatcaggcacggaatctatctctgagaatgacccgttctggaatcagcttctctcattttctttccctgcaccaactagcagtagtgagttgaaactcttggaggaagcaaccatttcagtctgcaggtcattagttgaaaacaatcctcgaacaggaaatcttggtgcactaattaaggtcttcctttctagaaccaaagaactaaaactttcagcagaatgtcagaaccacatcttcatttggcagacacacaatgctttgtttattatttgctgtttgctgaaagtgttcatctgtcagatgtcagaggaggaattacaacttcattttacttatgaagaaaaatctcctggcaattacagttctgactcagaagatcttttggaagaattgctgtgctgtttgatgcagttgatcactgatattccactcttagatattacatatgaaatatcagtagaagctatatcaacaatggttgttttcctttcctgccaactcttccacaaagaagttttgcgacagagcatcagccacaagtatttgatgcgaggtccatgtcttccatacaccagcaaacttgtgaagaccttattatataactttatcagacaagaaaagccacctcctccaggggcccatgttttccctcagcagtcggatgggggaggactgctttatggacttgcatcaggagtagcaacaggactctggactgtcttcacactaggtggtgtgggcagcaaagcggctgcctctccagagctttcttcccctctggccaaccagagtctcctgcttctgctggtgttggccaatctgacagatgcctcagatgcgccaaacccctacagacaagccattatgtccttcaagaacacacaagatagcagtcctttcccctcatcaattccacatgccttccagatcaactttaatagtttgtacacagctctttgtgaacagcagacatctgatcaagcaactctcctcttgtataccttgctccatcaaaatagtaatattagaacatacatgttggctcgcacagatatggaaaatcttgttttaccaattcttgagattctgtatcatgttgaagaaaggaattcacaccatgtgtatatggcccttataatattgttgatccttacggaagatgatggcttcaacagatccattcatgaagtgatactaaaaaatattacttggtattcagaacgagttttaactgaaatctccttggggagtctcctgatcctggtggtaataagaaccattcaatacaacatgactaggacacgagacaagtaccttcacacaaattgtttggcagctttagcaaatatgtcggcacagtttcgttctctccatcagtatgctgcccagaggatcatcagtttattttctttgctgtctaaaaaacacaacaaagttctggaacaagccacacagtccttgagaggttcgctgagttctaatgatgttcctctaccagattatgcacaagacctaaatgtcattgaagaagtgattcgaatgatgttagagatcatcaactcctgcctgacaaattcccttcaccacaacccaaacttggtatacgccctgctttacaaacgcgatctctttgaacaatttcgaactcatccttcatttcaggatataatgcaaaatattgatctggtgatctccttctttagctcaaggttgctgcaagctggagctgagctgtcagtggaacgggtcctggaaatcattaagcaaggcgtcgttgcgctgcccaaagacagactgaagaaatttccagaattgaaattcaaatatgtggaagaggagcagcccgaggagttttttatcccctatgtctggtctcttgtctacaactcagcagtcggcctgtactggaatccacaggacatccagctgttcaccatggattccgactgagggcaggatgctctcccacccggacccctccagccaagcagcccttcaagttcttttatttctgggtaacagaagtagacagacaggttacttggtgtatcttctgttaaagaggattgcacgagtgtgttttcctcacacactttgatttggagaattggtgctagttggcaatagataactcagcgtagatagtattgcaaaaaggggaggaaatacacaacaataataaatgtaaaaacctgcta

SEQ ID NO: 326935 - DNA, 4793 bp, Homo sapiens
cgcgcgccgcgtgccacgtgaccacctggctggcgcgcgcgcctgggggtctggtccctagccgcgttctcggtcgcttccctcttctctcgccgcctcctggcctccgcaccgacgcggcccgggctggagccgagccggggccgagctgcaggccggaccggagccggatctgtacccgctgagacgtggaaacatggaggcctgagccggtgtgcgccacctgggctgcggcggcgacagcgacttctcctgacccctctgccaccctcccatccgtccgcgggtccgtggagctggagcagatcccccagccggctgagacaggttgtcttttggaaatgcaggtttaaggacaaattatctgcttaagctagaagatgggatcgaatagcagcagaatcggcgatcttcctaaaaatgagtacttgaaaaagttatcaggcacggaatctatctctgagaatgacccgttctggaatcagcttctctcattttctttccctgcaccaactagcagtagtgagttgaaactcttggaggaagcaaccatttcagtctgcaggtcattagttgaaaacaatcctcgaacaggaaatcttggtgcactaattaaggtcttcctttctagaaccaaagaactaaaactttcagcagaatgtcagaaccacatcttcatttggcagacacacaatgctttgtttattatttgctgtttgctgaaagtgttcatctgtcagatgtcagaggaggaattacaacttcattttacttatgaagaaaaatctcctggcaattacagttctgactcagaagatcttttggaagaattgctgtgctgtttgatgcagttgatcactgatattccactcttagatattacatatgaaatatcagtagaagctatatcaacaatggttgttttcctttcctgccaactcttccacaaagaagttttgcgacagagcatcagccacaagtatttgatgcgaggtccatgtcttccatacaccagcaaacttgtgaagaccttattatataactttatcagacaagaaaagccacctcctccaggggcccatgttttccctcagcagtcggatgggggaggactgctttatggacttgcatcaggagtagcaacaggactctggactgtcttcacactaggtggtgtgggcagcaaagcggctgcctctccagagctttcttcccctctggccaaccagagtctcctgcttctgctggtgttggccaatctgacagatgcctcagatgcgccaaacccctacagacaagccattatgtccttcaagaacacacaagatagcagtcctttcccctcatcaattccacatgccttccagatcaactttaatagtttgtacacagctctttgtgaacagcagacatctgatcaagcaactctcctcttgtataccttgctccatcaaaatagtaatattagaacatacatgttggctcgcacagatatggaaaatcttgttttaccaattcttgagattctgtatcatgttgaagaaaggaattcacaccatgtgtatatggcccttataatattgttgatccttacggaagatgatggcttcaacagatccattcatgaagtgatactaaaaaatattacttggtattcagaacgagttttaactgaaatctccttggggagtctcctgatcctggtggtaataagaaccattcaatacaacatgactaggacacgagacaagtaccttcacacaaattgtttggcagctttagcaaatatgtcggcacagtttcgttctctccatcagtatgctgcccagaggatcatcagtttattttctttgctgtctaaaaaacacaacaaagttctggaacaagccacacagtccttgagaggttcgctgagttctaatgatgttcctctaccagattatgcacaagacctaaatgtcattgaagaagtgattcgaatgatgttagagatcatcaactcctgcctgacaaattcccttcaccacaacccaaacttggtatacgccctgctttacaaacgcgatctctttgaacaatttcgaactcatccttcatttcaggatataatgcaaaatattgatctggtgatctccttctttagctcaaggttgctgcaagctggagctgagctgtcagtggaacgggtcctggaaatcattaagcaaggcgtcgttgcgctgcccaaagacagactgaagaaatttccagaattgaaattcaaatatgtggaagaggagcagcccgaggagttttttatcccctatgtctggtctcttgtctacaactcagcagtcggcctgtactggaatccacaggacatccagctgttcaccatggattccgactgagggcaggatgctctcccacccggacccctccagccaagcagcccttcaagttcttttatttctgggtaacagaagtagacagacaggttacttggtgtatcttctgttaaagaggattgcacgagtgtgttttcctcacacactttgatttggagaattggtgctagttggcaatagataactcagcgtagatagtattgcaaaaaggggaggaaatacacaacaataataaatgtaaaaacctgctattcaacatgcagttttatttcgaagccaaaaatctagagctttcccaagatcctgttgccttaggcacatcacacttcaacagtgcacactatccaacagtgcacactattcaacagtgcacactattcaaaagcgtagactatttttttgcatgttcaagatatttgttttggtcttatgtgtgtgtgagagagagagattcctttgacattaaggagcatcaatgagaaaagatgatgaggcaggaattaataaagaaatgaagtcgtgtgtgtttggttgcctgtcagagggcacacaatttcataaacaccatgcctggacaatttgatattaatatttaacacctctgcatcttttcttaaaaaagaatatgggccagatacagtggctcacatttgtaatcccagcactttggggagccaagttagcagaatcccttgagcacaggaatctgaaaccagcttgggcaacatagtgagatcccatctctacaaaaaacttaaaaattagccaggcatgatggcacattcctgtagtcctagctactcaggaggctaaggtaggaggattgcctgagcccaggagttcaaggctgcagtgagctaagaacgtgccagtacactccagcctgagccacaaagtgagaccctgtctcgcaaaaaaaaaaaaaagaaagaaaagaaaaagaaaatggctacttctcatgaagcccagattaacttttctgtgaatatggcctgtgaactgttgctggaattaaattggagtctagcacaaattaagttaatctactctgtattaatcattgggaaaaagaaaagcttcatttgaaaacagtctttttccttcacccacactaatagaaaaaggagagtaatttgttcatactgtattccacgtgggatgaaaagcatgttttgctctttgtttctgggccggtgtgatccgtgtgttggtgcctgagctggaggaaggagcttcttgcagggaaacagccactggggccacattgagggccagttgggaccttcctttccagtcacactctgtgtcctcacgggccccttcacagtctagataaggagcctagtttcattctcaaagaaaaagtatttggtcttcaacatagaaagcacaaaagcccagacgagactgagcacactgttcgaatccactgccagctcatctgtgtcagggctggcttctcctgtcctgtgtcccagggctgcaggcccgtgttatttgagtccatcaaatcttccgagggcctcggaggaaccattctcagtcaccccaagctctgtaaaaggtcaaaacactggcagcctctcagtgcaccactgtgtgggctccacacgggaaggcctggccaagctgtgctcttagaggctgtcgaggtagggcaggaagcttccctatcctcgtctggatggaatgaaacagaggttccctaaggccaagggactcgtggagcgcccatcccgggtggggtcccagaggtgagtgcagcttgcctcctgtccccaaggggcttgttctgtcaggcctcctccagtcactgctggagtggggactctgactcctgtgttcacctcagagcccatgtacaggctagaggtgaggcttggcaacaacttctactaatacttagctttgtggcagagccagtctgaaggaggagaagcgctctcagccagcagggggagtgatgattatcatttcaggtagcaaggatatgtatttactatgtggggaaataatttgcaactttaatttgtttccaaagcattttgattggcttccttttcctttaaaccaaaaaattgtttaaatgtttaagggtcatgtggaacagctgagcttctggcaggaccacagaactgtcctctgagtctgagggctgggcagtgccacaggacagtccctgggctgcaggactgtcagtgcttgttgtgtgaggaaatgaggcccttcaaaaacccagtcatcttgacagagggcacactcccaaggaaggcctgactggggaatcatacagcctctcctccaggcctctgggctcactgaggtgcccccagaacccatgaagtggagcccacaacctgaatggagccccaacctgtatagagcccgagggatcctctagatcga

SEQ ID NO: 326936 - DNA, 5073 bp, Homo sapiens
cgcgcgccgcgtgccacgtgaccacctggctggcgcgcgcgcctgggggtctggtccctagccgcgttctcggtcgcttccctcttctctcgccgcctcctggcctccgcaccgacgcggcccgggctggagccgagccggggccgagctgcaggccggaccggagccggatctgtacccgctgagacgtggaaacatggaggcctgagccggtgtgcgccacctgggctgcggcggcgacagcgacttctcctgacccctctgccaccctcccatccgtccgcgggtccgtggagctggagcagatcccccagccggctgagacaggttgtcttttggaaatgcaggtttaaggacaaattatctgcttaagctagaagatgggatcgaatagcagcagaatcggcgatcttcctaaaaatgagtacttgaaaaagttatcaggcacggaatctatctctgagaatgacccgttctggaatcagcttctctcattttctttccctgcaccaactagcagtagtgagttgaaactcttggaggaagcaaccatttcagtctgcaggtcattagttgaaaacaatcctcgaacaggaaatcttggtgcactaattaaggtcttcctttctagaaccaaagaactaaaactttcagcagaatgtcagaaccacatcttcatttggcagacacacaatgctttgtttattatttgctgtttgctgaaagtgttcatctgtcagatgtcagaggaggaattacaacttcattttacttatgaagaaaaatctcctggcaattacagttctgactcagaagatcttttggaagaattgctgtgctgtttgatgcagttgatcactgatattccactcttagatattacatatgaaatatcagtagaagctatatcaacaatggttgttttcctttcctgccaactcttccacaaagaagttttgcgacagagcatcagccacaagtatttgatgcgaggtccatgtcttccatacaccagcaaacttgtgaagaccttattatataactttatcagacaagaaaagccacctcctccaggggcccatgttttccctcagcagtcggatgggggaggactgctttatggacttgcatcaggagtagcaacaggactctggactgtcttcacactaggtggtgtgggcagcaaagcggctgcctctccagagctttcttcccctctggccaaccagagtctcctgcttctgctggtgttggccaatctgacagatgcctcagatgcgccaaacccctacagacaagccattatgtccttcaagaacacacaagatagcagtcctttcccctcatcaattccacatgccttccagatcaactttaatagtttgtacacagctctttgtgaacagcagacatctgatcaagcaactctcctcttgtataccttgctccatcaaaatagtaatattagaacatacatgttggctcgcacagatatggaaaatcttgttttaccaattcttgagattctgtatcatgttgaagaaaggaattcacaccatgtgtatatggcccttataatattgttgatccttacggaagatgatggcttcaacagatccattcatgaagtgatactaaaaaatattacttggtattcagaacgagttttaactgaaatctccttggggagtctcctgatcctggtggtaataagaaccattcaatacaacatgactaggacacgagacaagtaccttcacacaaattgtttggcagctttagcaaatatgtcggcacagtttcgttctctccatcagtatgctgcccagaggatcatcagtttattttctttgctgtctaaaaaacacaacaaagttctggaacaagccacacagtccttgagaggttcgctgagttctaatgatgttcctctaccagattatgcacaagacctaaatgtcattgaagaagtgattcgaatgatgttagagatcatcaactcctgcctgacaaattcccttcaccacaacccaaacttggtatacgccctgctttacaaacgcgatctctttgaacaatttcgaactcatccttcatttcaggatataatgcaaaatattgatctggtgatctccttctttagctcaaggttgctgcaagctggagctgagctgtcagtggaacgggtcctggaaatcattaagcaaggcgtcgttgcgctgcccaaagacagactgaagccgctggccgatcgtcaggtggacagagtccttgcatgccaggcctttgtgtatgcagcttctgggttctcacagtttcatggcttgtctgtcagaaatttccagaattgaaattcaaatatgtggaagaggagcagcccgaggagttttttatcccctatgtctggtctcttgtctacaactcagcagtcggcctgtactggaatccacaggacatccagctgttcaccatggattccgactgagggcaggatgctctcccacccggacccctccagccaagcagcccttcaagttcttttatttctgggtaacagaagtagacagacaggttacttggtgtatcttctgttaaagaggattgcacgagtgtgttttcctcacacactttgatttggagaattggtgctagttggcaatagataactcagcgtagatagtattgcaaaaaggggaggaaatacacaacaataataaatgtaaaaacctgctattcaacatgcagttttatttcgaagccaaaaatctagagctttcccaagatcctgttgccttaggcacatcacacttcaacagtgcacactatccaacagtgcacactattcaacagtgcacactattcaaaagcgtagactatttttttgcatgttcaagatatttgttttggtcttatgtgtgtgtgagagagagagattcctttgacattaaggagcatcaatgagaaaagatgatgaggcaggaattaataaagaaatgaagtcgtgtgtgtttggttgcctgtcagagggcacacaatttcataaacaccatgcctggacaatttgatattaatatttaacacctctgcatcttttcttaaaaaagaatatgggccagatacagtggctcacatttgtaatcccagcactttggggagccaagttagcagaatcccttgagcacaggaatctgaaaccagcttgggcaacatagtgagatcccatctctacaaaaaacttaaaaattagccaggcatgatggcacattcctgtagtcctagctactcaggaggctaaggtaggaggattgcctgagcccaggagttcaaggctgcagtgagctaagaacgtgccagtacactccagcctgagccacaaagtgagaccctgtctcgcaaaaaaaaaaaaaagaaagaaaagaaaaagaaaatggctacttctcatgaagcccagattaacttttctgtgaatatggcctgtgaactgttgctggaattaaattggagtctagcacaaattaagttaatctactctgtattaatcattgggaaaaagaaaagcttcatttgaaaacagtctttttccttcacccacactaatagaaaaaggagagtaatttgttcatactgtattccacgtgggatgaaaagcatgttttgctctttgtttctgggccggtgtgatccgtgtgttggtgcctgagctggaggaaggagcttcttgcagggaaacagccactggggccacattgagggccagttgggaccttcctttccagtcacactctgtgtcctcacgggccccttcacagtctagataaggagcctagtttcattctcaaagaaaaagtatttggtcttcaacatagaaagcacaaaagcccagacgagactgagcacactgttcgaatccactgccagctcatctgtgtcagggctggcttctcctgtcctgtgtcccagggctgcaggcccgtgttatttgagtccatcaaatcttccgagggcctcggaggaaccattctcagtcaccccaagctctgtaaaaggtcaaaacactggcagcctctcagtgcaccactgtgtgggctccacacgggaaggcctggccaagctgtgctcttagaggctgtcgaggtagggcaggaagcttccctatcctcgtctggatggaatgaaacagaggttccctaaggccaagggactcgtggagcgcccatcccgggtggggtcccagaggtgagtgcagcttgcctcctgtccccaaggggcttgttctgtcaggcctcctccagtcactgctggagtggggactctgactcctgtgttcacctcagagcccatgtacaggctagaggtgaggcttggcaacaacttctactaatacttagctttgtggcagagccagtctgaaggaggagaagcgctctcagccagcagggggagtgatgattatcatttcaggtagcaaggatatgtatttactatgtggggaaataatttgcaactttaatttgtttccaaagcattttgattggcttccttttcctttaaaccaaaaaattgtttaaatgtttaagggtcatgtggaacagctgagcttctggcaggaccacagaactgtcctctgagtctgagggctgggcagtgccacaggacagtccctgggctgcaggactgtcagtgcttgttgtgtgaggaaatgaggcccttcaaaaacccagtcatcttgacagagggcacactcccaaggaaggcctgactggggaatcatacagcctctcctccaggcctctgggctcactgaggtgcccccagaaccctgattgccctcccctctttcccttttctcattcatcacacagtagaagcactcactagctaacagctcagctggggcagcagcctccatggaggcctgcaagtgatgctcccagtcctggttcccgctcaggagggaggccccaccacgtgcatcactgcctcagctctgcaaagtcaccagaggcttcttcctgatttttgtgaaagatttattatatggcaataaatctgaatgataaactttcaaaatac

SEQ ID NO: 326937 - DNA, 2859 bp, Homo sapiens
cgcgcgccgcgtgccacgtgaccacctggctggcgcgcgcgcctgggggtctggtccctagccgcgttctcggtcgcttccctcttctctcgccgcctcctggcctccgcaccgacgcggcccgggctggagccgagccggggccgagctgcaggccggaccggagccggatctgtacccgctgagacgtggaaacatggaggcctgagccggtgtgcgccacctgggctgcggcggcgacagcgacttctcctgacccctctgccaccctcccatccgtccgcgggtccgtggagctggagcagatcccccagccggctgagacaggttgtcttttggaaatgcaggtttaaggacaaattatctgcttaagctagaagatgggatcgaatagcagcagaatcggcgatcttcctaaaaatgagtacttgaaaaagttatcaggcacggaatctatctctgagaatgacccgttctggaatcagcttctctcattttctttccctgcaccaactagcagacagagtttcactcttgttgcccaggctggagtgcaatggcatgatctcggctcaccacaacctctgcctcccgggattaagtgattctcctgcctcggcctccccagtggctgggattgcaggctggagtgcaatggtgccatctcagctcaccgcaatctctgcctcctgcattcaagtgattctcctgcctcagcctcccgagtagctgaaattacagtagtgagttgaaactcttggaggaagcaaccatttcagtctgcaggtcattagttgaaaacaatcctcgaacaggaaatcttggtgcactaattaaggtcttcctttctagaaccaaagaactaaaactttcagcagaatgtcagaaccacatcttcatttggcagacacacaatgctttgtttattatttgctgtttgctgaaagtgttcatctgtcagatgtcagaggaggaattacaacttcattttacttatgaagaaaaatctcctggcaattacagttctgactcagaagatcttttggaagaattgctgtgctgtttgatgcagttgatcactgatattccactcttagatattacatatgaaatatcagtagaagctatatcaacaatggttgttttcctttcctgccaactcttccacaaagaagttttgcgacagagcatcagccacaagtatttgatgcgaggtccatgtcttccatacaccagcaaacttgtgaagaccttattatataactttatcagacaagaaaagccacctcctccaggggcccatgttttccctcagcagtcggatgggggaggactgctttatggacttgcatcaggagtagcaacaggactctggactgtcttcacactaggtggtgtgggcagcaaagcggctgcctctccagagctttcttcccctctggccaaccagagtctcctgcttctgctggtgttggccaatctgacagatgcctcagatgcgccaaacccctacagacaagccattatgtccttcaagaacacacaagatagcagtcctttcccctcatcaattccacatgccttccagatcaactttaatagtttgtacacagctctttgtgaacagcagacatctgatcaagcaactctcctcttgtataccttgctccatcaaaatagtaatattagaacatacatgttggctcgcacagatatggaaaatcttgttttaccaattcttgagattctgtatcatgttgaagaaaggaattcacaccatgtgtatatggcccttataatattgttgatccttacggaagatgatggcttcaacagatccattcatgaagtgatactaaaaaatattacttggtattcagaacgagttttaactgaaatctccttggggagtctcctgatcctggtggtaataagaaccattcaatacaacatgactaggacacgagacaagtaccttcacacaaattgtttggcagctttagcaaatatgtcggcacagtttcgttctctccatcagtatgctgcccagaggatcatcagtttattttctttgctgtctaaaaaacacaacaaagttctggaacaagccacacagtccttgagaggttcgctgagttctaatgatgttcctctaccagattatgcacaagacctaaatgtcattgaagaagtgattcgaatgatgttagagatcatcaactcctgcctgacaaattcccttcaccacaacccaaacttggtatacgccctgctttacaaacgcgatctctttgaacaatttcgaactcatccttcatttcaggatataatgcaaaatattgatctggtgatctccttctttagctcaaggttgctgcaagctggagctgagctgtcagtggaacgggtcctggaaatcattaagcaaggcgtcgttgcgctgcccaaagacagactgaagaaatttccagaattgaaattcaaatatgtggaagaggagcagcccgaggagttttttatcccctatgtctggtctcttgtctacaactcagcagtcggcctgtactggaatccacaggacatccagctgttcaccatggattccgactgagggcaggatgctctcccacccggacccctccagccaagcagcccttcaagttcttttatttctgggtaacagaagtagacagacaggttacttggtgtatcttctgttaaagaggattgcacgagtgtgttttcctcacacactttgatttggagaattggtgctagttggcaatagataactcagcgtagatagtattgcaaaaaggggaggaaatacacaacaataataaatgtaaaaacctgcta

SEQ ID NO: 326938 - DNA, 2517 bp, Homo sapiens
atgaatgttgtaccttggtatcccggacaaagctgccattatgaagtggctacactatctggggtgtataccctagggtttgttgttgcctgccgagaaagaattaggacacggacatgtgggtgggttaaggagtggaaagcttaatagacagaagaaaggagagaggagagcagctccttgagaaagagacgtgttcgaaaaaggttgtcttttggaaatgcaggtttaaggacaaattatctgcttaagctagaagatgggatcgaatagcagcagaatcggcgatcttcctaaaaatgagtacttgaaaaagttatcaggcacggaatctatctctgagaatgacccgttctggaatcagcttctctcattttctttccctgcaccaactagcagtagtgagttgaaactcttggaggaagcaaccatttcagtctgcaggtcattagttgaaaacaatcctcgaacaggaaatcttggtgcactaattaaggtcttcctttctagaaccaaagaactaaaactttcagcagaatgtcagaaccacatcttcatttggcagacacacaatgctttgtttattatttgctgtttgctgaaagtgttcatctgtcagatgtcagaggaggaattacaacttcattttacttatgaagaaaaatctcctggcaattacagttctgactcagaagatcttttggaagaattgctgtgctgtttgatgcagttgatcactgatattccactcttagatattacatatgaaatatcagtagaagctatatcaacaatggttgttttcctttcctgccaactcttccacaaagaagttttgcgacagagcatcagccacaagtatttgatgcgaggtccatgtcttccatacaccagcaaacttgtgaagaccttattatataactttatcagacaagaaaagccacctcctccaggggcccatgttttccctcagcagtcggatgggggaggactgctttatggacttgcatcaggagtagcaacaggactctggactgtcttcacactaggtggtgtgggcagcaaagcggctgcctctccagagctttcttcccctctggccaaccagagtctcctgcttctgctggtgttggccaatctgacagatgcctcagatgcgccaaacccctacagacaagccattatgtccttcaagaacacacaagatagcagtcctttcccctcatcaattccacatgccttccagatcaactttaatagtttgtacacagctctttgtgaacagcagacatctgatcaagcaactctcctcttgtataccttgctccatcaaaatagtaatattagaacatacatgttggctcgcacagatatggaaaatcttgttttaccaattcttgagattctgtatcatgttgaagaaaggaattcacaccatgtgtatatggcccttataatattgttgatccttacggaagatgatggcttcaacagatccattcatgaagtgatactaaaaaatattacttggtattcagaacgagttttaactgaaatctccttggggagtctcctgatcctggtggtaataagaaccattcaatacaacatgactaggacacgagacaagtaccttcacacaaattgtttggcagctttagcaaatatgtcggcacagtttcgttctctccatcagtatgctgcccagaggatcatcagtttattttctttgctgtctaaaaaacacaacaaagttctggaacaagccacacagtccttgagaggttcgctgagttctaatgatgttcctctaccagattatgcacaagacctaaatgtcattgaagaagtgattcgaatgatgttagagatcatcaactcctgcctgacaaattcccttcaccacaacccaaacttggtatacgccctgctttacaaacgcgatctctttgaacaatttcgaactcatccttcatttcaggatataatgcaaaatattgatctggtgatctccttctttagctcaaggttgctgcaagctggagctgagctgtcagtggaacgggtcctggaaatcattaagcaaggcgtcgttgcgctgcccaaagacagactgaagaaatttccagaattgaaattcaaatatgtggaagaggagcagcccgaggagttttttatcccctatgtctggtctcttgtctacaactcagcagtcggcctgtactggaatccacaggacatccagctgttcaccatggattccgactgagggcaggatgctctcccacccggacccctccagccaagcagcccttcaagttcttttatttctgggtaacagaagtagacagacaggttacttggtgtatcttctgttaaagaggattgcacgagtgtgttttcctcacacactttgatttggagaattggtgctagttggcaatagataactcagcgtagatagtattgcaaaaaggggaggaaatacacaacaataataaatgtaaaaacctgcta

SEQ ID NO: 326939 - DNA, 2585 bp, Homo sapiens
cgcgcgccgcgtgccacgtgaccacctggctggcgcgcgcgcctgggggtctggtccctagccgcgttctcggtcgcttccctcttctctcgccgcctcctggcctccgcaccgacgcggcccgggctggagccgagccggggccgagctgcaggccggaccggagccggatctgtacccgctgagacgtggaaacatggaggcctgagccggtgtgcgccacctgggctgcggcggcgacagcgacttctcctgacccctctgccaccctcccatccgtccgcgggtccgtggagctggagcagatcccccagccggctgagacaggttgtcttttggaaatgcaggtttaaggacaaattatctgcttaagctagaagatgggatcgaatagcagcagaatcggcgatcttcctaaaaatgagtacttgaaaaagttatcaggcacggaatctatctctgagaatgacccgttctggaatcagcttctctcattttctttccctgcaccaactagcagtagtgagttgaaactcttggaggaagcaaccatttcagtctgcaggtcattagttgaaaacaatcctcgaacaggaaatcttggtgcactaattaaggtcttcctttctagaaccaaagaactaaaactttcagcagaatgtcagaaccacatcttcatttggcagacacacaatgctttgtttattatttgctgtttgctgaaagtgttcatctgtcagatgtcagaggaggaattacaacttcattttacttatgaagaaaaatctcctggcaattacagttctgactcagaagatcttttggaagaattgctgtgctgtttgatgcagttgatcactgatattccactcttagatattacatatgaaatatcagtagaagctatatcaacaatggttgttttcctttcctgccaactcttccacaaagaagttttgcgacagagcatcagccacaagtatttgatgcgaggtccatgtcttccatacaccagcaaacttgtgaagaccttattatataactttatcagacaagaaaagccacctcctccaggggcccatgttttccctcagcagtcggatgggggaggactgctttatggacttgcatcaggagtagcaacaggactctggactgtcttcacactaggtggtgtgggcagcaaagcggctgcctctccagagctttcttcccctctggccaaccagagtctcctgcttctgctggtgttggccaatctgacagatgcctcagatgcgccaaacccctacagacaagccattatgtccttcaagaacacacaagatagcagtcctttcccctcatcaattccacatgccttccagatcaactttaatagtttgtacacagctctttgtgaacagcagacatctgatcaagcaactctcctcttgtataccttgctccatcaaaatagtaatattagaacatacatgttggctcgcacagatatggaaaatcttgttttaccaattcttgagattctgtatcatgttgaagaaaggaattcacaccatgtgtatatggcccttataatattgttgatccttacggaagatgatggcttcaacagatccattcatgaagtgatactaaaaaatattacttggtattcagaacgagttttaactgaaatctccttggggagtctcctgatcctggtggtaataagaaccattcaatacaacatgactaggacacgagacaagtaccttcacacaaattgtttggcagctttagcaaatatgtcggcacagtttcgttctctccatcagtatgctgcccagaggatcatcagtttattttctttgctgtctaaaaaacacaacaaagttctggaacaagccacacagtccttgagaggttcgctgagttctaatgatgttcctctaccagattatgtgatctccttctttagctcaaggttgctgcaagctggagctgagctgtcagtggaacgggtcctggaaatcattaagcaaggcgtcgttgcgctgcccaaagacagactgaagaaatttccagaattgaaattcaaatatgtggaagaggagcagcccgaggagttttttatcccctatgtctggtctcttgtctacaactcagcagtcggcctgtactggaatccacaggacatccagctgttcaccatggattccgactgagggcaggatgctctcccacccggacccctccagccaagcagcccttcaagttcttttatttctgggtaacagaagtagacagacaggttacttggtgtatcttctgttaaagaggattgcacgagtgtgttttcctcacacactttgatttggagaattggtgctagttggcaatagataactcagcgtagatcgttatttggcacacacacgggcgcaggaccaatacaccaaccaagttaattacattgttcaaaaccctggctatttccaccacacacactacgacacccataataccaacactcagaactccatcatccacaactaactttaaccaactctcctacatactagccacaatctgatccccaatac

SEQ ID NO: 326940 - DNA, 3264 bp, Homo sapiens
atttgattggtaagctgagtcattacttggaggactacgaatgaactacaaatacttgatgagaagccatcactttgggcttctccgaatgagagaattcttataactgggcatgtcctttacaaggacgtagaagctgagactgtcacaaggatattggtttctatttgagacatggtttctaaggacacacagaaccatgcaaagaatttaaactacatccatttgaaacacattctcctttggaagaagtgaaaagcagagtggaggtgaggaagtagaaaggacctcactgtgatctccttctttagctcaaggttgctgcaagctggagctgagctgtcagtggaacgggtcctggaaatcattaagcaaggcgtcgttgcgctgcccaaagacagactgaagatcctgtgctccaacgctgtcagccgctggccgatcgtcaggtggacagagtccttgcatgccaggcctttgtgtatgcagcttctgggttctcacagtttcatggcttgtctgtcagaaatttccagaattgaaattcaaatatgtggaagaggagcagcccgaggagttttttatcccctatgtctggtctcttgtctacaactcagcagtcggcctgtactggaatccacaggacatccagctgttcaccatggattccgactgagggcaggatgctctcccacccggacccctccagccaagcagcccttcaagttcttttatttctgggtaacagaagtagacagacaggttacttggtgtatcttctgttaaagaggattgcacgagtgtgttttcctcacacactttgatttggagaattggtgctagttggcaatagataactcagcgtagatagtattgcaaaaaggggaggaaatacacaacaataataaatgtaaaaacctgctattcaacatgcagttttatttcgaagccaaaaatctagagctttcccaagatcctgttgccttaggcacatcacacttcaacagtgcacactatccaacagtgcacactattcaacagtgcacactattcaaaagcgtagactatttttttgcatgttcaagatatttgttttggtcttatgtgtgtgtgagagagagagattcctttgacattaaggagcatcaatgagaaaagatgatgaggcaggaattaataaagaaatgaagtcgtgtgtgtttggttgcctgtcagagggcacacaatttcataaacaccatgcctggacaatttgatattaatatttaacacctctgcatcttttcttaaaaaagaatatgggccagatacagtggctcacatttgtaatcccagcactttggggagccaagttagcagaatcccttgagcacaggaatctgaaaccagcttgggcaacatagtgagatcccatctctacaaaaaacttaaaaattagccaggcatgatggcacattcctgtagtcctagctactcaggaggctaaggtaggaggattgcctgagcccaggagttcaaggctgcagtgagctaagaacgtgccagtacactccagcctgagccacaaagtgagaccctgtctcgcaaaaaaaaaaaaaagaaagaaaagaaaaagaaaatggctacttctcatgaagcccagattaacttttctgtgaatatggcctgtgaactgttgctggaattaaattggagtctagcacaaattaagttaatctactctgtattaatcattgggaaaaagaaaagcttcatttgaaaacagtctttttccttcacccacactaatagaaaaaggagagtaatttgttcatactgtattccacgtgggatgaaaagcatgttttgctctttgtttctgggccggtgtgatccgtgtgttggtgcctgagctggaggaaggagcttcttgcagggaaacagccactggggccacattgagggccagttgggaccttcctttccagtcacactctgtgtcctcacgggccccttcacagtctagataaggagcctagtttcattctcaaagaaaaagtatttggtcttcaacatagaaagcacaaaagcccagacgagactgagcacactgttcgaatccactgccagctcatctgtgtcagggctggcttctcctgtcctgtgtcccagggctgcaggcccgtgttatttgagtccatcaaatcttccgagggcctcggaggaaccattctcagtcaccccaagctctgtaaaaggtcaaaacactggcagcctctcagtgcaccactgtgtgggctccacacgggaaggcctggccaagctgtgctcttagaggctgtcgaggtagggcaggaagcttccctatcctcgtctggatggaatgaaacagaggttccctaaggccaagggactcgtggagcgcccatcccgggtggggtcccagaggtgagtgcagcttgcctcctgtccccaaggggcttgttctgtcaggcctcctccagtcactgctggagtggggactctgactcctgtgttcacctcagagcccatgtacaggctagaggtgaggcttggcaacaacttctactaatacttagctttgtggcagagccagtctgaaggaggagaagcgctctcagccagcagggggagtgatgattatcatttcaggtagcaaggatatgtatttactatgtggggaaataatttgcaactttaatttgtttccaaagcattttgattggcttccttttcctttaaaccaaaaaattgtttaaatgtttaagggtcatgtggaacagctgagcttctggcaggaccacagaactgtcctctgagtctgagggctgggcagtgccacaggacagtccctgggctgcaggactgtcagtgcttgttgtgtgaggaaatgaggcccttcaaaaacccagtcatcttgacagagggcacactcccaaggaaggcctgactggggaatcatacagcctctcctccaggcctctgggctcactgaggtgcccccagaaccctgattgccctcccctctttcccttttctcattcatcacacagtagaagcactcactagctaacagctcagctggggcagcagcctccatggaggcctgcaagtgatgctcccagtcctggttcccgctcaggagggaggccccaccacgtgcatcactgcctcagctctgcaaagtcaccagaggcttcttcctgatttttgtgaaagatttattatatggcaataaatctgaatgataaactttcaaaatac

SEQ ID NO: 326941 - DNA, 2792 bp, Homo sapiens
aatgattattaaacacgactccaacgaaattttgaccgccacggcaacattgacaaatttccagaattgaaattcaaatatgtggaagaggagcagcccgaggagttttttatcccctatgtctggtctcttgtctacaactcagcagtcggcctgtactggaatccacaggacatccagctgttcaccatggattccgactgagggcaggatgctctcccacccggacccctccagccaagcagcccttcaagttcttttatttctgggtaacagaagtagacagacaggttacttggtgtatcttctgttaaagaggattgcacgagtgtgttttcctcacacactttgatttggagaattggtgctagttggcaatagataactcagcgtagatagtattgcaaaaaggggaggaaatacacaacaataataaatgtaaaaacctgctattcaacatgcagttttatttcgaagccaaaaatctagagctttcccaagatcctgttgccttaggcacatcacacttcaacagtgcacactatccaacagtgcacactattcaacagtgcacactattcaaaagcgtagactatttttttgcatgttcaagatatttgttttggtcttatgtgtgtgtgagagagagagattcctttgacattaaggagcatcaatgagaaaagatgatgaggcaggaattaataaagaaatgaagtcgtgtgtgtttggttgcctgtcagagggcacacaatttcataaacaccatgcctggacaatttgatattaatatttaacacctctgcatcttttcttaaaaaagaatatgggccagatacagtggctcacatttgtaatcccagcactttggggagccaagttagcagaatcccttgagcacaggaatctgaaaccagcttgggcaacatagtgagatcccatctctacaaaaaacttaaaaattagccaggcatgatggcacattcctgtagtcctagctactcaggaggctaaggtaggaggattgcctgagcccaggagttcaaggctgcagtgagctaagaacgtgccagtacactccagcctgagccacaaagtgagaccctgtctcgcaaaaaaaaaaaaaagaaagaaaagaaaaagaaaatggctacttctcatgaagcccagattaacttttctgtgaatatggcctgtgaactgttgctggaattaaattggagtctagcacaaattaagttaatctactctgtattaatcattgggaaaaagaaaagcttcatttgaaaacagtctttttccttcacccacactaatagaaaaaggagagtaatttgttcatactgtattccacgtgggatgaaaagcatgttttgctctttgtttctgggccggtgtgatccgtgtgttggtgcctgagctggaggaaggagcttcttgcagggaaacagccactggggccacattgagggccagttgggaccttcctttccagtcacactctgtgtcctcacgggccccttcacagtctagataaggagcctagtttcattctcaaagaaaaagtatttggtcttcaacatagaaagcacaaaagcccagacgagactgagcacactgttcgaatccactgccagctcatctgtgtcagggctggcttctcctgtcctgtgtcccagggctgcaggcccgtgttatttgagtccatcaaatcttccgagggcctcggaggaaccattctcagtcaccccaagctctgtaaaaggtcaaaacactggcagcctctcagtgcaccactgtgtgggctccacacgggaaggcctggccaagctgtgctcttagaggctgtcgaggtagggcaggaagcttccctatcctcgtctggatggaatgaaacagaggttccctaaggccaagggactcgtggagcgcccatcccgggtggggtcccagaggtgagtgcagcttgcctcctgtccccaaggggcttgttctgtcaggcctcctccagtcactgctggagtggggactctgactcctgtgttcacctcagagcccatgtacaggctagaggtgaggcttggcaacaacttctactaatacttagctttgtggcagagccagtctgaaggaggagaagcgctctcagccagcagggggagtgatgattatcatttcaggtagcaaggatatgtatttactatgtggggaaataatttgcaactttaatttgtttccaaagcattttgattggcttccttttcctttaaaccaaaaaattgtttaaatgtttaagggtcatgtggaacagctgagcttctggcaggaccacagaactgtcctctgagtctgagggctgggcagtgccacaggacagtccctgggctgcaggactgtcagtgcttgttgtgtgaggaaatgaggcccttcaaaaacccagtcatcttgacagagggcacactcccaaggaaggcctgactggggaatcatacagcctctcctccaggcctctgggctcactgaggtgcccccagaaccctgattgccctcccctctttcccttttctcattcatcacacagtagaagcactcactagctaacagctcagctggggcagcagcctccatggaggcctgcaagtgatgctcccagtcctggttcccgctcaggagggaggccccaccacgtgcatcactgcctcagctctgcaaagtcaccagaggcttcttcctgatttttgtgaaagatttattatatggcaataaatctgaatgataaactttcaaaatac

SEQ ID NO: 326942 - DNA, 848 bp, Homo sapiens
ttttgtattttgagtagatcgcctcaggtgatctgcccgccttggcctcccaaagtgctgggattacaggcgtgagccacagcgcccggccttcaggatatttcttttatagcattttctaattgggcttaacaagccctactttaagaaattaaaccttatgattagctgtcttaatatagaggcttaattgaagctgaattatgattcagttgaagttgaattgagttattggggcccctgtccccttgcaggaaggatgaaagtagtggctagcctcagctttaggggcaggcgatgaggagccagatcagtatttctatctcagattcagaagacccagctgtccatgtgcatcatcggggaagcatcttgctctcagaataagcagctcaatccagctcccaaattctgaccgtggcttcagtgcctttgtggaatgagaagggacatgaggaagaaagtgagtcactaatacacattctcacctgacctgagccgcctttggtccctgaggccatgtagtttcctttcattgtgatggtaattttaaaatagtataatgtattatttatcttatcaccattttattattcaatgggagaacttttctgaacaaatcaagataaaacatgatctaaatctatgttaagtgtgatttaagggagacagtgattcatatttgtaactagttttcttcccttagtgactgagaacaaccaatactgacttttgaagagcctcgtggatactaattatttattcactcccttgttccttcaacatactgtttagggaattttttacatgctagtctagacagtgggcatagacagatgaatgagata

SEQ ID NO: 326943 - DNA, 432 bp, Homo sapiens
attttctcaggagccatttgatagctgaaatattttaaagccccagagctttcatgccctgtgaccagttggcaggggtgggtgggctccccgcacaccacagcaccacctgcaaactctcaccacttttgcttgtgcatggaactgtgggattataaaatcatcttattttcattgcagaaaaaatttccagaattgaaattcaaatatgtggaagaggagcagcccgaggagttttttatcccctatgtctggtctcttgtctacaactcagcagtcggcctgtactggaatccacaggacatccagctgttcaccatggattccgactgagggcaggatgctctcccacccggacccctccagccaagcagcccttcaagttcttttatttctgggtaacagaagtagacagacaggttacttggtgta

SEQ ID NO: 326944 - DNA, 399 bp, Homo sapiens
aaatgaagtcgtgtgtgtttggttgcctgtcagagggcacacaatttcataaacaccatgcctggacaatttgatattaatatttaacacctctgcatcttttcttaaaaaagaatatgggccagatacagtggctcacatttgtaatcccagcactttggggagccaagttagcagaatcccttgagcacaggaatctgaaaccagcttgggcaacatagtgagatcccatctctacaaaaaacttaaaaattagccaggcatgatggcacattcctgtagtcctagctactcaggaggctaaggtaggaggattgcctgagcccaggagttcaaggctgcagtgagctaagaacgtgccagtacactccagcctgagccacaaagtgagaccctgtc

SEQ ID NO: 326945 - DNA, 453 bp, Homo sapiens
  misc_feature (47)..(47): n is a, c, g, or t
cgtgtgagtgtgttagtgctatttttgttttcgcgacggcaccttangagaaccaaaatttccagaattgaaattcaaatatgtggaagaggagcagcccgaggagttttttatcccctatgtctggtctcttgtctacaactcagcagtcggcctgtactggaatccacaggacatccagctgttcaccatggattccgactgagggcaggatgctctcccacccggacccctccagccaagcagcccttcaagttcttttatttctgggtaacagaagtagacagacaggttacttggtgtatcttctgttaaagaggattgcacgagtgtgttttcctcacacactttgatttggagaattggtgctagttggcaatagataactcagcgtagatagtattgcaaaaaggggaggaaatacacaacaataataaatgtaaaaacctgcta

SEQ ID NO: 326946 - DNA, 4978 bp, Homo sapiens
cgcgcgccgcgtgccacgtgaccacctggctggcgcgcgcgcctgggggtctggtccctagccgcgttctcggtcgcttccctcttctctcgccgcctcctggcctccgcaccgacgcggcccgggctggagccgagccggggccgagctgcaggccggaccggagccggatctgtacccgctgagacgtggaaacatggaggcctgagccggtgtgcgccacctgggctgcggcggcgacagcgacttctcctgacccctctgccaccctcccatccgtccgcgggtccgtggagctggagcagatcccccagccggctgagacaggttgtcttttggaaatgcaggtttaaggacaaattatctgcttaagctagaagatgggatcgaatagcagcagaatcggcgatcttcctaaaaatgagtacttgaaaaagttatcaggcacggaatctatctctgagaatgacccgttctggaatcagcttctctcattttctttccctgcaccaactagcagtagtgagttgaaactcttggaggaagcaaccatttcagtctgcaggtcattagttgaaaacaatcctcgaacaggaaatcttggtgcactaattaaggtcttcctttctagaaccaaagaactaaaactttcagcagaatgtcagaaccacatcttcatttggcagacacacaatgctttgtttattatttgctgtttgctgaaagtgttcatctgtcagatgtcagaggaggaattacaacttcattttacttatgaagaaaaatctcctggcaattacagttctgactcagaagatcttttggaagaattgctgtgctgtttgatgcagttgatcactgatattccactcttagatattacatatgaaatatcagtagaagctatatcaacaatggttgttttcctttcctgccaactcttccacaaagaagttttgcgacagagcatcagccacaagtatttgatgcgaggtccatgtcttccatacaccagcaaacttgtgaagaccttattatataactttatcagacaagaaaagccacctcctccaggggcccatgttttccctcagcagtcggatgggggaggactgctttatggacttgcatcaggagtagcaacaggactctggactgtcttcacactaggtggtgtgggcagcaaagcggctgcctctccagagctttcttcccctctggccaaccagagtctcctgcttctgctggtgttggccaatctgacagatgcctcagatgcgccaaacccctacagacaagccattatgtccttcaagaacacacaagatagcagtcctttcccctcatcaattccacatgccttccagatcaactttaatagtttgtacacagctctttgtgaacagcagacatctgatcaagcaactctcctcttgtataccttgctccatcaaaatagtaatattagaacatacatgttggctcgcacagatatggaaaatcttgttttaccaattcttgagattctgtatcatgttgaagaaaggaattcacaccatgtgtatatggcccttataatattgttgatccttacggaagatgatggcttcaacagatccattcatgaagtgatactaaaaaatattacttggtattcagaacgagttttaactgaaatctccttggggagtctcctgatcctggtggtaataagaaccattcaatacaacatgactaggacacgagacaagtaccttcacacaaattgtttggcagctttagcaaatatgtcggcacagtttcgttctctccatcagtatgctgcccagaggatcatcagtttattttctttgctgtctaaaaaacacaacaaagttctggaacaagccacacagtccttgagaggttcgctgagttctaatgatgttcctctaccagattatgcacaagacctaaatgtcattgaagaagtgattcgaatgatgttagagatcatcaactcctgcctgacaaattcccttcaccacaacccaaacttggtatacgccctgctttacaaacgcgatctctttgaacaatttcgaactcatccttcatttcaggatataatgcaaaatattgatctggtgatctccttctttagctcaaggttgctgcaagctggagctgagctgtcagtggaacgggtcctggaaatcattaagcaaggcgtcgttgcgctgcccaaagacagactgaagaaatttccagaattgaaattcaaatatgtggaagaggagcagcccgaggagttttttatcccctatgtctggtctcttgtctacaactcagcagtcggcctgtactggaatccacaggacatccagctgttcaccatggattccgactgagggcaggatgctctcccacccggacccctccagccaagcagcccttcaagttcttttatttctgggtaacagaagtagacagacaggttacttggtgtatcttctgttaaagaggattgcacgagtgtgttttcctcacacactttgatttggagaattggtgctagttggcaatagataactcagcgtagatagtattgcaaaaaggggaggaaatacacaacaataataaatgtaaaaacctgctattcaacatgcagttttatttcgaagccaaaaatctagagctttcccaagatcctgttgccttaggcacatcacacttcaacagtgcacactatccaacagtgcacactattcaacagtgcacactattcaaaagcgtagactatttttttgcatgttcaagatatttgttttggtcttatgtgtgtgtgagagagagagattcctttgacattaaggagcatcaatgagaaaagatgatgaggcaggaattaataaagaaatgaagtcgtgtgtgtttggttgcctgtcagagggcacacaatttcataaacaccatgcctggacaatttgatattaatatttaacacctctgcatcttttcttaaaaaagaatatgggccagatacagtggctcacatttgtaatcccagcactttggggagccaagttagcagaatcccttgagcacaggaatctgaaaccagcttgggcaacatagtgagatcccatctctacaaaaaacttaaaaattagccaggcatgatggcacattcctgtagtcctagctactcaggaggctaaggtaggaggattgcctgagcccaggagttcaaggctgcagtgagctaagaacgtgccagtacactccagcctgagccacaaagtgagaccctgtctcgcaaaaaaaaaaaaaagaaagaaaagaaaaagaaaatggctacttctcatgaagcccagattaacttttctgtgaatatggcctgtgaactgttgctggaattaaattggagtctagcacaaattaagttaatctactctgtattaatcattgggaaaaagaaaagcttcatttgaaaacagtctttttccttcacccacactaatagaaaaaggagagtaatttgttcatactgtattccacgtgggatgaaaagcatgttttgctctttgtttctgggccggtgtgatccgtgtgttggtgcctgagctggaggaaggagcttcttgcagggaaacagccactggggccacattgagggccagttgggaccttcctttccagtcacactctgtgtcctcacgggccccttcacagtctagataaggagcctagtttcattctcaaagaaaaagtatttggtcttcaacatagaaagcacaaaagcccagacgagactgagcacactgttcgaatccactgccagctcatctgtgtcagggctggcttctcctgtcctgtgtcccagggctgcaggcccgtgttatttgagtccatcaaatcttccgagggcctcggaggaaccattctcagtcaccccaagctctgtaaaaggtcaaaacactggcagcctctcagtgcaccactgtgtgggctccacacgggaaggcctggccaagctgtgctcttagaggctgtcgaggtagggcaggaagcttccctatcctcgtctggatggaatgaaacagaggttccctaaggccaagggactcgtggagcgcccatcccgggtggggtcccagaggtgagtgcagcttgcctcctgtccccaaggggcttgttctgtcaggcctcctccagtcactgctggagtggggactctgactcctgtgttcacctcagagcccatgtacaggctagaggtgaggcttggcaacaacttctactaatacttagctttgtggcagagccagtctgaaggaggagaagcgctctcagccagcagggggagtgatgattatcatttcaggtagcaaggatatgtatttactatgtggggaaataatttgcaactttaatttgtttccaaagcattttgattggcttccttttcctttaaaccaaaaaattgtttaaatgtttaagggtcatgtggaacagctgagcttctggcaggaccacagaactgtcctctgagtctgagggctgggcagtgccacaggacagtccctgggctgcaggactgtcagtgcttgttgtgtgaggaaatgaggcccttcaaaaacccagtcatcttgacagagggcacactcccaaggaaggcctgactggggaatcatacagcctctcctccaggcctctgggctcactgaggtgcccccagaaccctgattgccctcccctctttcccttttctcattcatcacacagtagaagcactcactagctaacagctcagctggggcagcagcctccatggaggcctgcaagtgatgctcccagtcctggttcccgctcaggagggaggccccaccacgtgcatcactgcctcagctctgcaaagtcaccagaggcttcttcctgatttttgtgaaagatttattatatggcaataaatctgaatgataaactttcaaaatac

SEQ ID NO: 326947 - DNA, 2849 bp, Homo sapiens
cgcgcgccgcgtgccacgtgaccacctggctggcgcgcgcgcctgggggtctggtccctagccgcgttctcggtcgcttccctcttctctcgccgcctcctggcctccgcaccgacgcggcccgggctggagccgagccggggccgagctgcaggccggaccggagccggatctgtacccgctgagacgtggaaacatggaggcctgagccggtgtgcgccacctgggctgcggcggcgacagcgacttctcctgacccctctgccaccctcccatccgtccgcgggtccgtggagctggagcagatcccccagccggctgagacaggttgtcttttggaaatgcaggtttaaggacaaattatctgcttaagctagaagatgggatcgaatagcagcagaatcggcgatcttcctaaaaatgagtacttgaaaaagttatcaggcacggaatctatctctgagaatgacccgttctggaatcagcttctctcattttctttccctgcaccaactagcagtagtgagttgaaactcttggaggaagcaaccatttcagtctgcaggtcattagttgaaaacaatcctcgaacaggaaatcttggtgcactaattaaggtcttcctttctagaaccaaagaactaaaactttcagcagaatgtcagaaccacatcttcatttggcagacacacaatgctttgtttattatttgctgtttgctgaaagtgttcatctgtcagatgtcagaggaggaattacaacttcattttacttatgaagaaaaatctcctggcaattacagttctgactcagaagatcttttggaagaattgctgtgctgtttgatgcagttgatcactgatattccactcttagatattacatatgaaatatcagtagaagctatatcaacaatggttgttttcctttcctgccaactcttccacaaagaagttttgcgacagagcatcagccacaagtatttgatgcgaggtccatgtcttccatacaccagcaaacttgtgaagaccttattatataactttatcagacaagaaaagccacctcctccaggggcccatgttttccctcagcagtcggatgggggaggactgctttatggacttgcatcaggagtagcaacaggactctggactgtcttcacactaggtggtgtgggcagcaaagcggctgcctctccagagctttcttcccctctggccaaccagagtctcctgcttctgctggtgttggccaatctgacagatgcctcagatgcgccaaacccctacagacaagccattatgtccttcaagaacacacaagatagcagtcctttcccctcatcaattccacatgccttccagatcaactttaatagtttgtacacagctctttgtgaacagcagacatctgatcaagcaactctcctcttgtataccttgctccatcaaaatagtaatattagaacatacatgttggctcgcacagatatggaaaatcttgttttaccaattcttgagattctgtatcatgttgaagaaaggaattcacaccatgtgtatatggcccttataatattgttgatccttacggaagatgatggcttcaacagatccattcatgaagtgatactaaaaaatattacttggtattcagaacgagttttaactgaaatctccttggggagtctcctgatcctggtggtaataagaaccattcaatacaacatgactaggacacgagacaagtaccttcacacaaattgtttggcagctttagcaaatatgtcggcacagtttcgttctctccatcagtatgctgcccagaggatcatcagtttattttctttgctgtctaaaaaacacaacaaagttctggaacaagccacacagtccttgagaggttcgctgagttctaatgatgttcctctaccagattatgcacaagacctaaatgtcattgaagaagtgattcgaatgatgttagagatcatcaactcctgcctgacaaattcccttcaccacaacccaaacttggtatacgccctgctttacaaacgcgatctctttgaacaatttcgaactcatccttcatttcaggatataatgcaaaatattgatctggtgagtgtaaatgaagacatttattatgattcttttttaagtattaaagcagagaatgtttaataagccttggtaagaactataatagtaagagtttcttctttcaacattaactgtatttgcagtctattttactataatagttgtggtaatctgtgtgtgtgttgtatatacacacacatacatatttaatacaattgaagtcatacttcatacagttttttattctgacttttttactttacacttagaccatgagcatttttctgtggtattatcaattctttgaaagtctcacattttaatttctatctagcccatgtttgtgtcctaaaatatatataactattatcccatttttgctcatttatttccagtattttatatcaattcataatgaatgaaaagtttataaataagtcttatctcaaattttaaaattatatttttgatatggttttaaagctggaattttactagtttttactgtcaaaagatatctttattttcaagattcaacacaggttgccaaattgctttccagaaaaactgtagaatttatgcctgtgggccgggtgtggtggctgatgcctataatcccagctacttgagaggctgaggcaggagaatcgcttgaacccaggaaatagaggttgcagtgagccgagatcacaccattgtactctggcctgagcaacgagagtaaaactccgtctcacacac

SEQ ID NO: 326948 - DNA, 2415 bp, Homo sapiens
cgcgcgccgcgtgccacgtgaccacctggctggcgcgcgcgcctgggggtctggtccctagccgcgttctcggtcgcttccctcttctctcgccgcctcctggcgttgtcttttggaaatgcaggtttaaggacaaattatctgcttaagctagaagatgggatcgaatagcagcagaatcggcgatcttcctaaaaatgagtacttgaaaaagttatcaggcacggaatctatctctgagaatgacccgttctggaatcagcttctctcattttctttccctgcaccaactagcagtagtgagttgaaactcttggaggaagcaaccatttcagtctgcaggtcattagttgaaaacaatcctcgaacaggaaatcttggtgcactaattaaggtcttcctttctagaaccaaagaactaaaactttcagcagaatgtcagaaccacatcttcatttggcagacacacaatgctttgtttattatttgctgtttgctgaaagtgttcatctgtcagatgtcagaggaggaattacaacttcattttacttatgaagaaaaatctcctggcaattacagttctgactcagaagatcttttggaagaattgctgtgctgtttgatgcagttgatcactgatattccactcttagatattacatatgaaatatcagtagaagctatatcaacaatggttgttttcctttcctgccaactcttccacaaagaagttttgcgacagagcatcagccacaagtatttgatgcgaggtccatgtcttccatacaccagcaaacttgtgaagaccttattatataactttatcagacaagaaaagccacctcctccaggggcccatgttttccctcagcagtcggatgggggaggactgctttatggacttgcatcaggagtagcaacaggactctggactgtcttcacactaggtggtgtgggcagcaaagcggctgcctctccagagctttcttcccctctggccaaccagagtctcctgcttctgctggtgttggccaatctgacagatgcctcagatgcgccaaacccctacagacaagccattatgtccttcaagaacacacaagatagcagtcctttcccctcatcaattccacatgccttccagatcaactttaatagtttgtacacagctctttgtgaacagcagacatctgatcaagcaactctcctcttgtataccttgctccatcaaaatagtaatattagaacatacatgttggctcgcacagatatggaaaatcttgttttaccaattcttgagattctgtatcatgttgaagaaaggaattcacaccatgtgtatatggcccttataatattgttgatccttacggaagatgatggcttcaacagatccattcatgaagtgatactaaaaaatattacttggtattcagaacgagttttaactgaaatctccttggggagtctcctgatcctggtggtaataagaaccattcaatacaacatgactaggacacgagacaagtaccttcacacaaattgtttggcagctttagcaaatatgtcggcacagtttcgttctctccatcagtatgctgcccagaggatcatcagtttattttctttgctgtctaaaaaacacaacaaagttctggaacaagccacacagtccttgagaggttcgctgagttctaatgatgttcctctaccagattatgcacaagacctaaatgtcattgaagaagtgattcgaatgatgttagagatcatcaactcctgcctgacaaattcccttcaccacaacccaaacttggtatacgccctgctttacaaacgcgatctctttgaacaatttcgaactcatccttcatttcaggatataatgcaaaatattgatctggtgatctccttctttagctcaaggttgctgcaagctggagctgagctgtcagtggaacgggtcctggaaatcattaagcaaggcgtcgttgcgctgcccaaagacagactgaagaaatttccagaattgaaattcaaatatgtggaagaggagcagcccgaggagttttttatcccctatgtctggtctcttgtctacaactcagcagtcggcctgtactggaatccacaggacatccagctgttcaccatggattccgactgagggcaggatgctctcccacccggacccctccagccaagcagcccttcaagttcttttatttctgggtaacagaagtagacagacaggttacttggtgtatcttctgttaaagaggattgcacgagtgtgttttcctcacacactttgatttggagaattggtgctagttggcaatagataactcagcgtagatagtattgcaaaaaggggaggaaatacacaacaataataaatgtaaaaacctgcta

SEQ ID NO: 326949 - DNA, 2667 bp, Homo sapiens
cgcgcgccgcgtgccacgtgaccacctggctggcgcgcgcgcctgggggtctggtccctagccgcgttctcggtcgcttccctcttctctcgccgcctcctggcctccgcaccgacgcggcccgggctggagccgagccggggccgagctgcaggccggaccggagccggatctgtacccgctgagacgtggaaacatggaggcctgagccggtgtgcgccacctgggctgcggcggcgacagcgacttctcctgacccctctgccaccctcccatccgtccgcgggtccgtggagctggagcagatcccccagccggctgagacaggttgtcttttggaaatgcaggtttaaggacaaattatctgcttaagctagaagatgggatcgaatagcagcagaatcggcgatcttcctaaaaatgagtacttgaaaaagttatcaggcacggaatctatctctgagaatgacccgttctggaatcagcttctctcattttctttccctgcaccaactagcagtagtgagttgaaactcttggaggaagcaaccatttcagtctgcaggtcattagttgaaaacaatcctcgaacaggaaatcttggtgcactaattaaggtcttcctttctagaaccaaagaactaaaactttcagcagaatgtcagaaccacatcttcatttggcagacacacaatgctttgtttattatttgctgtttgctgaaagtgttcatctgtcagatgtcagaggaggaattacaacttcattttacttatgaagaaaaatctcctggcaattacagttctgactcagaagatcttttggaagaattgctgtgctgtttgatgcagttgatcactgatattccactcttagatattacatatgaaatatcagtagaagctatatcaacaatggttgttttcctttcctgccaactcttccacaaagaagttttgcgacagagcatcagccacaagtatttgatgcgaggtccatgtcttccatacaccagcaaacttgtgaagaccttattatataactttatcagacaagaaaagccacctcctccaggggcccatgttttccctcagcagtcggatgggggaggactgctttatggacttgcatcaggagtagcaacaggactctggactgtcttcacactaggtggtgtgggcagcaaagcggctgcctctccagagctttcttcccctctggccaaccagagtctcctgcttctgctggtgttggccaatctgacagatgcctcagatgcgccaaacccctacagacaagccattatgtccttcaagaacacacaagatagcagtcctttcccctcatcaattccacatgccttccagatcaactttaatagtttgtacacagctctttgtgaacagcagacatctgatcaagcaactctcctcttgtataccttgctccatcaaaatagtaatattagaacatacatgttggctcgcacagatatggaaaatcttgttttaccaattcttgagattctgtatcatgttgaagaaaggaattcacaccatgtgtatatggcccttataatattgttgatccttacggaagatgatggcttcaacagatccattcatgaagtgatactaaaaaatattacttggtattcagaacgagttttaactgaaatctccttggggagtctcctgatcctggtggtaataagaaccattcaatacaacatgactaggacacgagacaagtaccttcacacaaattgtttggcagctttagcaaatatgtcggcacagtttcgttctctccatcagtatgctgcccagaggatcatcagtttattttctttgctgtctaaaaaacacaacaaagttctggaacaagccacacagtccttgagaggttcgctgagttctaatgatgttcctctaccagattatgcacaagacctaaatgtcattgaagaagtgattcgaatgatgttagagatcatcaactcctgcctgacaaattcccttcaccacaacccaaacttggtatacgccctgctttacaaacgcgatctctttgaacaatttcgaactcatccttcatttcaggatataatgcaaaatattgatctggtgatctccttctttagctcaaggttgctgcaagctggagctgagctgtcagtggaacgggtcctggaaatcattaagcaaggcgtcgttgcgctgcccaaagacagactgaagaaatttccagaattgaaattcaaatatgtggaagaggagcagcccgaggagttttttatcccctatgtctggtctcttgtctacaactcagcagtcggcctgtactggaatccacaggacatccagctgttcaccatggattccgactgagggcaggatgctctcccacccggacccctccagccaagcagcccttcaagttcttttatttctgggtaacagaagtagacagacaggttacttggtgtatcttctgttaaagaggattgcacgagtgtgttttcctcacacactttgatttggagaattggtgctagttggcaatagataactcagcgtagatagtattgcaaaaaggggaggaaatacacaacaataataaatgtaaaaacctgctaaaaaaaaaaaatcggtctcgatggcctta

SEQ ID NO: 326950 - DNA, 2811 bp, Homo sapiens
ctttttattatatttttatattattacaggccccaccgaaaatgttgccgtgcacgttcaggagtattccagcaaatttccagaattgaaattcaaatatgtggaagaggagcagcccgaggagttttttatcccctatgtctggtctcttgtctacaactcagcagtcggcctgtactggaatccacaggacatccagctgttcaccatggattccgactgagggcaggatgctctcccacccggacccctccagccaagcagcccttcaagttcttttatttctgggtaacagaagtagacagacaggttacttggtgtatcttctgttaaagaggattgcacgagtgtgttttcctcacacactttgatttggagaattggtgctagttggcaatagataactcagcgtagatagtattgcaaaaaggggaggaaatacacaacaataataaatgtaaaaacctgctattcaacatgcagttttatttcgaagccaaaaatctagagctttcccaagatcctgttgccttaggcacatcacacttcaacagtgcacactatccaacagtgcacactattcaacagtgcacactattcaaaagcgtagactatttttttgcatgttcaagatatttgttttggtcttatgtgtgtgtgagagagagagattcctttgacattaaggagcatcaatgagaaaagatgatgaggcaggaattaataaagaaatgaagtcgtgtgtgtttggttgcctgtcagagggcacacaatttcataaacaccatgcctggacaatttgatattaatatttaacacctctgcatcttttcttaaaaaagaatatgggccagatacagtggctcacatttgtaatcccagcactttggggagccaagttagcagaatcccttgagcacaggaatctgaaaccagcttgggcaacatagtgagatcccatctctacaaaaaacttaaaaattagccaggcatgatggcacattcctgtagtcctagctactcaggaggctaaggtaggaggattgcctgagcccaggagttcaaggctgcagtgagctaagaacgtgccagtacactccagcctgagccacaaagtgagaccctgtctcgcaaaaaaaaaaaaaagaaagaaaagaaaaagaaaatggctacttctcatgaagcccagattaacttttctgtgaatatggcctgtgaactgttgctggaattaaattggagtctagcacaaattaagttaatctactctgtattaatcattgggaaaaagaaaagcttcatttgaaaacagtctttttccttcacccacactaatagaaaaaggagagtaatttgttcatactgtattccacgtgggatgaaaagcatgttttgctctttgtttctgggccggtgtgatccgtgtgttggtgcctgagctggaggaaggagcttcttgcagggaaacagccactggggccacattgagggccagttgggaccttcctttccagtcacactctgtgtcctcacgggccccttcacagtctagataaggagcctagtttcattctcaaagaaaaagtatttggtcttcaacatagaaagcacaaaagcccagacgagactgagcacactgttcgaatccactgccagctcatctgtgtcagggctggcttctcctgtcctgtgtcccagggctgcaggcccgtgttatttgagtccatcaaatcttccgagggcctcggaggaaccattctcagtcaccccaagctctgtaaaaggtcaaaacactggcagcctctcagtgcaccactgtgtgggctccacacgggaaggcctggccaagctgtgctcttagaggctgtcgaggtagggcaggaagcttccctatcctcgtctggatggaatgaaacagaggttccctaaggccaagggactcgtggagcgcccatcccgggtggggtcccagaggtgagtgcagcttgcctcctgtccccaaggggcttgttctgtcaggcctcctccagtcactgctggagtggggactctgactcctgtgttcacctcagagcccatgtacaggctagaggtgaggcttggcaacaacttctactaatacttagctttgtggcagagccagtctgaaggaggagaagcgctctcagccagcagggggagtgatgattatcatttcaggtagcaaggatatgtatttactatgtggggaaataatttgcaactttaatttgtttccaaagcattttgattggcttccttttcctttaaaccaaaaaattgtttaaatgtttaagggtcatgtggaacagctgagcttctggcaggaccacagaactgtcctctgagtctgagggctgggcagtgccacaggacagtccctgggctgcaggactgtcagtgcttgttgtgtgaggaaatgaggcccttcaaaaacccagtcatcttgacagagggcacactcccaaggaaggcctgactggggaatcatacagcctctcctccaggcctctgggctcactgaggtgcccccagaaccctgattgccctcccctctttcccttttctcattcatcacacagtagaagcactcactagctaacagctcagctggggcagcagcctccatggaggcctgcaagtgatgctcccagtcctggttcccgctcaggagggaggccccaccacgtgcatcactgcctcagctctgcaaagtcaccagaggcttcttcctgatttttgtgaaagatttattatatggcaataaatctgaatgataaactttcaaaatac

SEQ ID NO: 326951 - DNA, 3950 bp, Homo sapiens
ggaagttctgccttgtctccgccgcgggtcaggggtgagagctggaatctctgcacgggccttggaaaacgactgtcttcttctgccaaaatgtcaggaattggaaataaaagagcagctggagaacctggcacctccatgcctcctgagaagaaggcagctgttgaagattcagggaccacagtggaaacaattaagctaggaggtgtctcttcaacggaggaactagacattagaacactgcaaaccaaaaatcgcaagctggcagaaatgttggatcagcggcaggccattgaagatgaacttcgtgagcacattgaaaaactggaacgacgacaggccactgatgatgcctcactattgattgtcaaccgatactggagtcagtttgatgaaaacatccgtatcatccttaaacgttatgatctggagcagggcttgggagacctactcacagaacgaaaagcccttgttgtgcctgaaccagaaccagactctgatagcaatcaggagcgtaaagatgaccgagagagaggggaagggcaagagccagctttctctttccttgctactttggccagcagttccagtgaagagatggagtctcagctgcaggaacgtgtggagtcttcccgccgagccgtgtcccagattgtgactgtttatgataaattgcaagaaaaagtggagctcttatcccggaagctaaacagtggagataatctgatagtggaggaagcagtgcaggagctgaactctttcctcgcacaggagaatatgaggctacaggaattgacagatcttcttcaggaaaagcatcgcaccatgtctcaggagttctccaagttgcagagtaaagtggagacagccgaatcacgagtgtctgtcctggagtccatgattgatgacctgcagtgggatattgacaaaattcgaaagagggaacagcgactcaaccgacacttagcagaagtcctagaacgggtgaattccaaaggttataaggtgtatggagcggggagcagtctgtatggcggcacaatcactatcaatgctcggaagtttgaggaaatgaatgcagagcttgaggagaacaaagagttggctcagaaccgtctctgtgagctggagaaacttcggcaagactttgaggaggtcactacacaaaatgaaaagctgaaggtggaattgcggagtgcagtggagcaagtcgttaaggaaactccagaatatcgctgcatgcagtcacagttctccgtcttgtataatgagagcctacagttgaaagcacacttggatgaggctcggaccctgcttcatggcaccagaggaacccaccagcaccaggttgagcttattgagcgagatgaggttagtcttcataagaagctgaggactgaagtaattcagctagaagatacattggcccaggtccgcaaggagtatgaaatgctgaggatagaatttgagcagacccttgctgccaatgaacaagcaggccctataaacagggagatgcgccacctcatcagtagcctccagaatcacaatcaccagctgaaaggggaggtcctgagatataagcggaaattgagagaagcccagtctgacctgaacaagacacgcctgcgtagtggtagtgccctcctgcagtcccagtctagtactgaggacccgaaggatgagcctgcggagctaaaaccagattctgaggacttatcctcccagtcctcagcttcaaaggcatctcaggaggatgccaatgaaatcaagtctaaacgggatgaagaagaacgagaacgagaaaggagggagaaggagagggaacgagaaagagaacgggagaaggagaaggagagagaacgagagaagcagaagctaaaagagtcagaaaaagagagagattctgctaaggataaagagaaaggcaaacatgatgatggacggaaaaaggaagcagaaattatcaaacaattgaagattgaactcaagaaggcacaggagagccaaaaggagatgaaactattgctggatatgtaccgttctgccccaaaggaacagagagacaaagttcagctgatggcagctgagaagaagtctaaggcagagttggaagatctaaggcaaagactcaaggatctggaagataaagagaagaaagagaacaagaaaatggctgatgaggatgccttgaggaagatccgggcagtggaggagcagatagaatacctacagaagaagctagccatggccaagcaggaagaagaagcactcctctctgaaatggatgtcacaggccaggcctttgaagacatgcaggagcaaaatatccgtttgatgcagcaattgcgggagaaggatgatgcaaatttcaagctcatgtcagagcgtatcaagtccaatcagatccataagttgcttaaagaagagaaggaggagctggcagaccaggtgttgactctgaagactcaggttgatgcccagctacaggtagtaaggaaactggaagagaaggagcatctgttacagagcaacattggcacaggggagaaagagctgggtcttaggacccaagccttagagatgaataaacgcaaggcaatggaggcagcccagcttgcagatgacctcaaagcacaactggagttggctcagaagaagctacatgattttcaggatgagatcgtggagaacagtgttaccaaagaaaaggacatgttcaatttcaaacgagcccaggaggacatctctagacttcgcaggaagctggagaccacaaagaaaccagacaatgtacccaagtgtgatgagattctgatggaagagattaaggattacaaggcacgcttgacctgtccgtgctgtaacatgcgtaaaaaggatgctgttcttactaagtgttttcatgtcttctgctttgagtgtgtgaagacacgctatgacacccgccagcgcaaatgtcccaagtgtaatgctgcttttggtgccaatgattttcatcgcatctacattggttgatctaagtcaagagaagaagaggagctggctagtcaggaacttattcattaaccaccaaacctctacctcttctctccttgactgtcacctgtaggacagtttatcagtcaactacctttcctccagactttacttccaggctctcctcttcagtagctggatgactttagcagaaaggactggtaaatacaagccttgggtttcagaatgaattagaaacaaataactcttactgtcttccctcccagctttgtttattttgtgcttttagacttttcagtgttttctttttccagcccactgtataaacttggattgtccattcctcctgaagaaatcaagttggtatttttgatgtggaaaagggaacaaaagtggaaacatggctacttttggggagtgatattttaaaaaataagttgtctatgggcacaaagttttcttcatttgtgtagcaaacttcttgtgaatgtggattacaaaatggtataattgtgctactctcccctgggtggtttgcagccctaatgaaattatgtctaggatgattcagtctatttcccatttactagcagagtaacttgttaagatcagctggctttcttgttaaagttatttaagttttgaatgctctactacttcaagtctttaaatttcttgagactagaataattttaaataatatgaccctttgtcttctaatgaaataaagattgaagaggttgagtcaggactgagctggtgaagaaatcttgtgggtattctggaaatttgatacggagagaacttggtgagctatgaattactctcagtctcctttttacagggttgttgtgatccctcttttccagaaaattctgtggaatgtttctgtaggactttgttctccacaagcttgaattaaagcaggattcagtttgcaaaaaaaaaaa

SEQ ID NO: 326952 - DNA, 2275 bp, Homo sapiens
tctatttctgaatcccacagaacacatctgccatcactatttccacctctggccaccccaccaatagcagcaataatacttttgccaatgaaatcaagtctaaacgggatgaagaagaacgagaacgagaaaggagggagaaggagagggaacgagaaagagaacgggagaaggagaaggagagagaacgagagaagcagaagctaaaagagtcagaaaaagagagagattctgctaaggataaagagaaaggcaaacatgatgatggacggaaaaaggaagcagaaattatcaaacaattgaagattgaactcaagaaggcacaggagagccaaaaggagatgaaactattgctggatatgtaccgttctgccccaaaggaacagagagacaaagttcagctgatggcagctgagaagaagtctaaggcagagttggaagatctaaggcaaagactcaaggatctggaagataaagagaagaaagagaacaagaaaatggctgatgaggatgccttgaggaagatccgggcagtggaggagcagatagaatacctacagaagaagctagccatggccaagcaggaagaagaagcactcctctctgaaatggatgtcacaggccaggcctttgaagacatgcaggagcaaaatatccgtttgatgcagcaattgcgggagaaggatgatgcaaatttcaagctcatgtcagagcgtatcaagtccaatcagatccataagttgcttaaagaagagaaggaggagctggcagaccaggtgttgactctgaagactcaggttgatgcccagctacaggtagtaaggaaactggaagagaaggagcatctgttacagagcaacattggcacaggggagaaagagctgggtcttaggacccaagccttagagatgaataaacgcaaggcaatggaggcagcccagcttgcagatgacctcaaagcacaactggagttggctcagaagaagctacatgattttcaggatgagatcgtggagaacagtgttaccaaagaaaaggacatgttcaatttcaaacgagcccaggaggacatctctagacttcgcaggaagctggagaccacaaagaaaccagacaatgtacccaagtgtgatgagattctgatggaagagattaaggattacaaggcacgcttgacctgtccgtgctgtaacatgcgtaaaaaggatgctgttcttactaagtgttttcatgtcttctgctttgagtgtgtgaagacacgctatgacacccgccagcgcaaatgtcccaagtgtaatgctgcttttggtgccaatgattttcatcgcatctacattggttgatctaagtcaagagaagaagaggagctggctagtcaggaacttattcattaaccaccaaacctctacctcttctctccttgactgtcacctgtaggacagtttatcagtcaactacctttcctccagactttacttccaggctctcctcttcagtagctggatgactttagcagaaaggactggtaaatacaagccttgggtttcagaatgaattagaaacaaataactcttactgtcttccctcccagctttgtttattttgtgcttttagacttttcagtgttttctttttccagcccactgtataaacttggattgtccattcctcctgaagaaatcaagttggtatttttgatgtggaaaagggaacaaaagtggaaacatggctacttttggggagtgatattttaaaaaataagttgtctatgggcacaaagttttcttcatttgtgtagcaaacttcttgtgaatgtggattacaaaatggtataattgtgctactctcccctgggtggtttgcagccctaatgaaattatgtctaggatgattcagtctatttcccatttactagcagagtaacttgttaagatcagctggctttcttgttaaagttatttaagttttgaatgctctactacttcaagtctttaaatttcttgagactagaataattttaaataatatgaccctttgtcttctaatgaaataaagattgaagaggttgagtcaggactgagctggtgaagaaatcttgtgggtattctggaaatttgatacggagagaacttggtgagctatgaattactctcagtctcctttttacagggttgttgtgatccctcttttccagaaaattctgtggaatgtttctgtaggactttgttctccacaagcttgaattaaagcaggattcagtttgcaaaaaaaaaaa

SEQ ID NO: 326953 - DNA, 2607 bp, Homo sapiens
ggaagttctgccttgtctccgccgcgggtcaggggtgagagctggaatctctgcacgggccttggaaaacgactgtcttcttctgccaaaatgtcaggaattggaaataaaagagcagctggagaacctggcacctccatgcctcctgagaagaaggcagctgttgaagattcagggaccacagtggaaacaattaagctaggaggtgtctcttcaacggaggaactagacattagaacactgcaaaccaaaaatcgcaagctggcagaaatgttggatcagcggcaggccattgaagatgaacttcgtgagcacattgaaaaactggaacgacgacaggccactgatgatgcctcactattgattgtcaaccgatactggagtcagtttgatgaaaacatccgtatcatccttaaacgttatgatctggagcagggcttgggagacctactcacagaacgaaaagcccttgttgtgcctgaaccagaaccagactctgatagcaatcaggagcgtaaagatgaccgagagagaggggaagggcaagagccagctttctctttccttgctactttggccagcagttccagtgaagagatggagtctcagctgcaggaacgtgtggagtcttcccgccgagccgtgtcccagattgtgactgtttatgataaattgcaagaaaaagtggagctcttatcccggaagctaaacagtggagataatctgatagtggaggaagcagtgcaggagctgaactctttcctcgcacaggagaatatgaggctacaggaattgacagatcttcttcaggaaaagcatcgcaccatgtctcaggagttctccaagttgcagagtaaagtggagacagccgaatcacgagtgtctgtcctggagtccatgattgatgacctgcagtgggatattgacaaaattcgaaagagggaacagcgactcaaccgacacttagcagaagtcctagaacgggtgaattccaaaggttataaggtgtatggagcggggagcagtctgtatggcggcacaatcactatcaatgctcggaagtttgaggaaatgaatgcagagcttgaggagaacaaagagttggctcagaaccgtctctgtgagctggagaaacttcggcaagactttgaggaggtcactacacaaaatgaaaagctgaaggtggaattgcggagtgcagtggagcaagtcgttaaggaaactccagaatatcgctgcatgcagtcacagttctccgtcttgtataatgagagcctacagttgaaagcacacttggatgaggctcggaccctgcttcatggcaccagaggaacccaccagcaccaggttgagcttattgagcgagatgaggttagtcttcataagaagctgaggactgaagtaattcagctagaagatacattggcccaggtccgcaaggagtatgaaatgctgaggatagaatttgagcagacccttgctgccaatgaacaagcaggccctataaacagggagatgcgccacctcatcagtagcctccagaatcacaatcaccagctgaaaggggaggtcctgagatataagcggaaattgagagaagcccagtctgacctgaacaagacacgcctgcgtagtggtagtgccctcctgcagtcccagtctagtactgaggacccgaaggatgagcctgcggagctaaaaccagattctgaggacttatcctcccagtcctcagcttcaaaggcatctcaggaggatgccaatgaaatcaagtctaaacgggatgaagaagaacgagaacgagaaaggagggagaaggagagggaacgagaaagagaacgggagaaggagaaggagagagaacgagagaagcagaagctaaaagagtcagaaaaagagagagattctgctaaggataaagagaaaggcaaacatgatgatggacggaaaaaggaagcagaaattatcaaacaattgaagattgaactcaagaaggcacaggagagccaaaaggagatgaaactattgctggatatgtaccgttctgccccaaaggaacagagagacaaagttcagctgatggcagctgagaagaagtctaaggcagagttggaagatctaaggcaaagactcaaggatctggaagataaagagaagaaagagaacaagaaaatggctgatgaggatgccttgaggaagatccgggcagtggaggagcagatagaatacctacagaagaagctagccatggccaagcaggaagaagaagcactcctctctgaaatggatgtcacaggccaggcctttgaagacatgcaggagcaaaatatccgtttgatgcagcaattgcgggagaaggatgatgcaaatttcaagctcatgtcagagcgtatcaagtccaatcagatccataagttgcttaaagaagagaaggaggagctggcagcgttacggtagtggtgttatcggtgcccggtgtatcagtaacggtggtgttaaccggggtagtacctggaaccagattttcaaagtgctccccgccggtcacgcctttgatggcggtagtgacggtctggtcgcctttgtacacgtcatccggcgccatgg

SEQ ID NO: 326954 - DNA, 3916 bp, Homo sapiens
ggaagttctgccttgtctccgccgcgggtcaggggtgagagctggaatctctgcacgggccttggaaaacgactgtcttcttctgccaaaatgtcaggaattggaaataaaagagcagctggagaactgttgaagattcagggaccacagtggaaacaattaagctaggaggtgtctcttcaacggaggaactagacattagaacactgcaaaccaaaaatcgcaagctggcagaaatgttggatcagcggcaggccattgaagatgaacttcgtgagcacattgaaaaactggaacgacgacaggccactgatgatgcctcactattgattgtcaaccgatactggagtcagtttgatgaaaacatccgtatcatccttaaacgttatgatctggagcagggcttgggagacctactcacagaacgaaaagcccttgttgtgcctgaaccagaaccagactctgatagcaatcaggagcgtaaagatgaccgagagagaggggaagggcaagagccagctttctctttccttgctactttggccagcagttccagtgaagagatggagtctcagctgcaggaacgtgtggagtcttcccgccgagccgtgtcccagattgtgactgtttatgataaattgcaagaaaaagtggagctcttatcccggaagctaaacagtggagataatctgatagtggaggaagcagtgcaggagctgaactctttcctcgcacaggagaatatgaggctacaggaattgacagatcttcttcaggaaaagcatcgcaccatgtctcaggagttctccaagttgcagagtaaagtggagacagccgaatcacgagtgtctgtcctggagtccatgattgatgacctgcagtgggatattgacaaaattcgaaagagggaacagcgactcaaccgacacttagcagaagtcctagaacgggtgaattccaaaggttataaggtgtatggagcggggagcagtctgtatggcggcacaatcactatcaatgctcggaagtttgaggaaatgaatgcagagcttgaggagaacaaagagttggctcagaaccgtctctgtgagctggagaaacttcggcaagactttgaggaggtcactacacaaaatgaaaagctgaaggtggaattgcggagtgcagtggagcaagtcgttaaggaaactccagaatatcgctgcatgcagtcacagttctccgtcttgtataatgagagcctacagttgaaagcacacttggatgaggctcggaccctgcttcatggcaccagaggaacccaccagcaccaggttgagcttattgagcgagatgaggttagtcttcataagaagctgaggactgaagtaattcagctagaagatacattggcccaggtccgcaaggagtatgaaatgctgaggatagaatttgagcagacccttgctgccaatgaacaagcaggccctataaacagggagatgcgccacctcatcagtagcctccagaatcacaatcaccagctgaaaggggaggtcctgagatataagcggaaattgagagaagcccagtctgacctgaacaagacacgcctgcgtagtggtagtgccctcctgcagtcccagtctagtactgaggacccgaaggatgagcctgcggagctaaaaccagattctgaggacttatcctcccagtcctcagcttcaaaggcatctcaggaggatgccaatgaaatcaagtctaaacgggatgaagaagaacgagaacgagaaaggagggagaaggagagggaacgagaaagagaacgggagaaggagaaggagagagaacgagagaagcagaagctaaaagagtcagaaaaagagagagattctgctaaggataaagagaaaggcaaacatgatgatggacggaaaaaggaagcagaaattatcaaacaattgaagattgaactcaagaaggcacaggagagccaaaaggagatgaaactattgctggatatgtaccgttctgccccaaaggaacagagagacaaagttcagctgatggcagctgagaagaagtctaaggcagagttggaagatctaaggcaaagactcaaggatctggaagataaagagaagaaagagaacaagaaaatggctgatgaggatgccttgaggaagatccgggcagtggaggagcagatagaatacctacagaagaagctagccatggccaagcaggaagaagaagcactcctctctgaaatggatgtcacaggccaggcctttgaagacatgcaggagcaaaatatccgtttgatgcagcaattgcgggagaaggatgatgcaaatttcaagctcatgtcagagcgtatcaagtccaatcagatccataagttgcttaaagaagagaaggaggagctggcagaccaggtgttgactctgaagactcaggttgatgcccagctacaggtagtaaggaaactggaagagaaggagcatctgttacagagcaacattggcacaggggagaaagagctgggtcttaggacccaagccttagagatgaataaacgcaaggcaatggaggcagcccagcttgcagatgacctcaaagcacaactggagttggctcagaagaagctacatgattttcaggatgagatcgtggagaacagtgttaccaaagaaaaggacatgttcaatttcaaacgagcccaggaggacatctctagacttcgcaggaagctggagaccacaaagaaaccagacaatgtacccaagtgtgatgagattctgatggaagagattaaggattacaaggcacgcttgacctgtccgtgctgtaacatgcgtaaaaaggatgctgttcttactaagtgttttcatgtcttctgctttgagtgtgtgaagacacgctatgacacccgccagcgcaaatgtcccaagtgtaatgctgcttttggtgccaatgattttcatcgcatctacattggttgatctaagtcaagagaagaagaggagctggctagtcaggaacttattcattaaccaccaaacctctacctcttctctccttgactgtcacctgtaggacagtttatcagtcaactacctttcctccagactttacttccaggctctcctcttcagtagctggatgactttagcagaaaggactggtaaatacaagccttgggtttcagaatgaattagaaacaaataactcttactgtcttccctcccagctttgtttattttgtgcttttagacttttcagtgttttctttttccagcccactgtataaacttggattgtccattcctcctgaagaaatcaagttggtatttttgatgtggaaaagggaacaaaagtggaaacatggctacttttggggagtgatattttaaaaaataagttgtctatgggcacaaagttttcttcatttgtgtagcaaacttcttgtgaatgtggattacaaaatggtataattgtgctactctcccctgggtggtttgcagccctaatgaaattatgtctaggatgattcagtctatttcccatttactagcagagtaacttgttaagatcagctggctttcttgttaaagttatttaagttttgaatgctctactacttcaagtctttaaatttcttgagactagaataattttaaataatatgaccctttgtcttctaatgaaataaagattgaagaggttgagtcaggactgagctggtgaagaaatcttgtgggtattctggaaatttgatacggagagaacttggtgagctatgaattactctcagtctcctttttacagggttgttgtgatccctcttttccagaaaattctgtggaatgtttctgtaggactttgttctccacaagcttgaattaaagcaggattcagtttgcaaaaaaaaaaa

SEQ ID NO: 326955 - DNA, 2503 bp, Homo sapiens
cgaccagcctgtggcgtggttggggctccggaagggcgcgcgcgagcgcttttttgggaggacaccacaggtggacgcctcagctgatcgtcctccctcccggggaccctgccccgagtcgccgagtagccgcagagtcgcctccgtcgccccgccgcccctgtgtttcggacatggccgcacgccttctccgagggtccctacgcgtcctgggcggccaccgtgcgccgcgccagctgcccgccgcgcgatgttctcattccggaggggaagaacgtctagaaactccttctgctaaaaaattaacagatataggaattcgaagaatcttttctccagagcatgacattttccggaaaagtgtaaggaagtttttccaagaagaagtgattcctcatcactcagaatgggagaaagctggagaagtaagtagggaggtttgggaaaaagctggaaaacaaggactgcttggtgtcaatattgcagagcatcttggtggaattggaggggatctgtactccgcagctattgtctgggaggagcaagcttattcaaattgttcaggcccaggttttagtattcattcaggtattgtcatgtcctatattacaaaccatggctcagaagaacagattaagcactttattccccagatgactgcaggcaaatgtattggtgcaatagcaatgacagagcctggagctggaagtgacttacagggaataaaaacaaatgctaaaaaggatggaagtgactggattctcaatggaagcaaggtgttcatcagtaatgggtcattaagtgatgttgtgattgtagttgcggtcacaaatcatgaagctccctcccctgcccatggtattagcctttttctggtggaaaatggaatgaaaggatttatcaagggacgaaagctacataaaatgggattaaaagcccaggataccgcagaactattctttgaagatatacggttgccagctagtgccctacttggagaagagaataaaggcttctattacatcatgaaagagcttccacaggaaaggctgttaattgctgatgtggcaatttcagctagtgaattcatgtttgaagaaaccaggaactatgttaaacaaagaaaagcttttggcaaaacagttgctcacctacagacagtgcaacataaattagcagaattaaaaacacatatatgtgtaacccgagcatttgtggacaactgtctccagctgcatgaagcgaaacgtttggactccgccactgcttgcatggcgaaatattgggcatctgagttacaaaatagtgtagcttacgactgtgtacagctccatggaggttggggatacatgtgggagtacccaattgcaaaagcttatgtggatgccagagttcagccaatctatggtggtacaaatgaaataatgaaggagctgattgcaagagagattgtctttgacaagtagacatctgcccacatcctggagtcctattacagctaatctcgttttaaatctgctcaagataaaatgtaacttggaaagcgaggaaacactaaacatgtttttacctgctctctctatagagaaggaaataaaatataaatataagattaacacagtggaaggacaaatctttgaagccaaaattctagttttccaatataaggtttaacttacagttttttatgtagccaaaggtaaacggttttctgaatcttgcctaggtgtttcatttatctctaaaattctaaaaagcataaatcattcaaatcttcaaaccaaggcagaaataattttatgtcgctatagtataaaaacattaataagatagcacattgacttttaaagggaaaagtaaatataacttagcatgtaaactcatttcggctaccatttgctccaaattccctagaacagtggtttttaccactgtactccaaccccgtttttaagcaatggaactctttcttcaaacaaaagcttatgcagaacatctctgtgaaacgctgctgagtgagaactgctttcattgaagctggaagccatcataccttactgccttgaaacccctaggactcagctaagtatttgcctaaccctgaccagggaatgccttggttctgtcaattgctgacatctgagaacacagaataatccatcatttttaatttcaagatattggtacattttataggtatcaaagcaatggcttttcttttgcaacagttaatgtatttattaacttaataattactttatgtcttctataaaccaggctgttaatacaatgatgacaaacaaaactggcaagatcactaaaaaataagtgaataaacaaataagtagtaaaataaggtaagaagtaaatatgtaaaagagataatttcaagcataagtgcaatgtaaataataaagtaagcatttaaaattcaaaagtgaggaaatgacatttgatttaagacttaaaagtaattacaaaaaataaaccattaatttaaagt

SEQ ID NO: 326956 - DNA, 813 bp, Homo sapiens
gaactctggtagaccactgttattgtgttggaaccagaaattttaaaattagtaaaaacaaaaagagaaaacactcaggaatgtcataggtttgtgatgagataggccactaccaaacaatttgataggaccttaatacattgttgttataatagtcgttttttattgctattttatgctctaatttttcttcttttttcattctaagagcttattcaaattgttcaggcccaggttttagtattcattcaggtattgtcatgtcctatattacaaaccatggctcagaagaacagattaagcactttattccccagatgactgcaggcaaatgtattggtgcaatagcaatgacagagcctggagctggaagtgacttacagggaataaaaacaaatgctaaaaaggatggaagtgactggattctcaatggaagcaaggtgtgtaaaagaggacttctatagcccttcttttcagagtcatgccatgggtaacaatgtctcaaagacaactcattaattctattaaatctagggactcaggcaggaattgaatttatctaagttgttttggagacagtaaatttacaacatatattacttaagatctgtggtagcttcttctatatttcattttgcatgccccctcactaatatggcaaaggttgttttagcttccaaacagcccttattaaaccagaaaaagacaaggtgaggctcacattgcccaaatgtgggacaaatattaataatacttaaactttatgttgataaaaggttggggggaaagcttctcatatagatcaagaagaat

SEQ ID NO: 326957 - DNA, 2788 bp, Homo sapiens
gcgttttgggaggaggtggtcaccccctgggcccggctgcaggagcgcgggctgcgatctgtgtcccagttcgagctgtgaacccggcgttccccacggcttagactcgccgcgcggtagtgaacttgggacccggactcagtgcccgggctgcggcgcggaccagaattgtccaggacaaactgggctagaaatgacctggcgagggttccatcaaacaaggaaattagctttagatatatcaacaaatctaactaaatacagaggattaatgaagacagagtctaagtagttcagtgactactaaggtggtgtttataatatgatcaaaagtttcagatactgtctgatgcataaaatctattcactgggtaaacaaattggaagcatggagaattcattatttaataagggtgaaggaactggcaaatttgcgaatgacagcattggtgtaagctactctaattttatttgagagctatgaaacaaaatgcctacttttcctggggagatttgggaagacgtcactgagaagatgttctcattccggaggggaagaacgtctagaaactccttctgctaaaaaattaacagatataggaattcgaagaatcttttctccagagcatgacattttccggaaaagtgtaaggaagtttttccaagaagaagtgattcctcatcactcagaatgggagaaagctggagaagtaagtagggaggtttgggaaaaagctggaaaacaaggactgcttggtgtcaatattgcagagcatcttggtggaattggaggggatctgtactccgcagctattgtctgggaggagcaagcttattcaaattgttcaggcccaggttttagtattcattcaggtattgtcatgtcctatattacaaaccatggctcagaagaacagattaagcactttattccccagatgactgcaggcaaatgtattggtgcaatagcaatgacagagcctggagctggaagtgacttacagggaataaaaacaaatgctaaaaaggatggaagtgactggattctcaatggaagcaaggtgttcatcagtaatgggtcattaagtgatgttgtgattgtagttgcggtcacaaatcatgaagctccctcccctgcccatggtattagcctttttctggtggaaaatggaatgaaaggatttatcaagggacgaaagctacataaaatgggattaaaagcccaggataccgcagaactattctttgaagatatacggttgccagctagtgccctacttggagaagagaataaaggcttctattacatcatgaaagagcttccacaggaaaggctgttaattgctgatgtggcaatttcagctagtgaattcatgtttgaagaaaccaggaactatgttaaacaaagaaaagcttttggcaaaacagttgctcacctacagacagtgcaacataaattagcagaattaaaaacacatatatgtgtaacccgagcatttgtggacaactgtctccagctgcatgaagcgaaacgtttggactccgccactgcttgcatggcgaaatattgggcatctgagttacaaaatagtgtagcttacgactgtgtacagctccatggaggttggggatacatgtgggagtacccaattgcaaaagcttatgtggatgccagagttcagccaatctatggtggtacaaatgaaataatgaaggagctgattgcaagagagattgtctttgacaagtagacatctgcccacatcctggagtcctattacagctaatctcgttttaaatctgctcaagataaaatgtaacttggaaagcgaggaaacactaaacatgtttttacctgctctctctatagagaaggaaataaaatataaatataagattaacacagtggaaggacaaatctttgaagccaaaattctagttttccaatataaggtttaacttacagttttttatgtagccaaaggtaaacggttttctgaatcttgcctaggtgtttcatttatctctaaaattctaaaaagcataaatcattcaaatcttcaaaccaaggcagaaataattttatgtcgctatagtataaaaacattaataagatagcacattgacttttaaagggaaaagtaaatataacttagcatgtaaactcatttcggctaccatttgctccaaattccctagaacagtggtttttaccactgtactccaaccccgtttttaagcaatggaactctttcttcaaacaaaagcttatgcagaacatctctgtgaaacgctgctgagtgagaactgctttcattgaagctggaagccatcataccttactgccttgaaacccctaggactcagctaagtatttgcctaaccctgaccagggaatgccttggttctgtcaattgctgacatctgagaacacagaataatccatcatttttaatttcaagatattggtacattttataggtatcaaagcaatggcttttcttttgcaacagttaatgtatttattaacttaataattactttatgtcttctataaaccaggctgttaatacaatgatgacaaacaaaactggcaagatcactaaaaaataagtgaataaacaaataagtagtaaaataaggtaagaagtaaatatgtaaaagagataatttcaagcataagtgcaatgtaaataataaagtaagcatttaaaattcaaaagtgaggaaatgacatttgatttaagacttaaaagtaattacaaaaaataaaccattaatttaaagt

SEQ ID NO: 326958 - DNA, 1653 bp, Homo sapiens
cgaccagcctgtggcgtggttggggctccggaagggcgcgcgcgagcgcttttttgggaggacaccacaggtggacgcctcagctgatcgtcctccctcccggggaccctgccccgagtcgccgagtagccgcagagtcgcctccgtcgccccgccgcccctgtgtttcggacatggccgcacgccttctccgagggtccctacgcgtcctgggcggccaccgtgcgccgcgccagctgcccgccgcgcgatgttctcattccggaggggaagaacgtctagaaactccttctgctaaaaaattaacagatataggaattcgaagaatcttttctccagagcatgacattttccggaaaagtgtaaggaagtttttccaagaagaagtgattcctcatcactcagaatgggagaaagctggagaagtaagtagggaggtttgggaaaaagctggaaaacaaggactgcttggtgtcaatattgcagagcatcttggtggaattggaggggatctgtactccgcagctattgtctgggaggagcaagcttattcaaattgttcaggcccaggttttagtattcattcaggtattgtcatgtcctatattacaaaccatggctcagaagaacagattaagcactttattccccagatgactgcaggcaaatgtattggtgcaatagcaatgacagagcctggagctggaagtgacttacagggaataaaaacaaatgctaaaaaggatggaagtgactggattctcaatggaagcaaggtgttcatcagtaatgggtcattaagtgatgttgtgattgtagttgcggtcacaaatcatgaagctccctcccctgcccatggtattagcctttttctggtggaaaatggaatgaaaggatttatcaagggacgaaagctacataaaatgggattaaaagcccaggataccgcagaactattctttgaagatatacggttgccagctagtgccctacttggagaagagaataaaggcttctattacatcatgaaagagcttccacaggaaaggctgttaattgctgatgtggcaatttcagctagtgaattcatgtttgaagaaaccaggaactatgttaaacaaagaaaagcttttggcaaaacagttgctcacctacagacagtgcaacataaattagcagaattaaaaacacatatatgtgtaacccgagcatttgtggacaactgtctccagctgcatgaagcgaaacgtttggactccgccactgcttgcatggcgaaatattgggcatctgagttacaaaatagtgtagcttacgactgtgtacagctccatggaggttggggatacatgtgggagtacccaattgcaaaagcttatgtggatgccagagttcagccaatctatggtggtacaaatgaaataatgaaggagctgattgcaagagagattgtctttgacaagtagacatctgcccacatcctggagtcctattacagctaatctcgttttaaatctgctcaagataaaatgtaacttggaaagcgaggaaacactaaacatgtttttacctgctctctctatagagaaggacacactctctcgatatacgattaaaacacaaaccacttccgcctatttggcctatagcgcc

SEQ ID NO: 326959 - DNA, 341 bp, Homo sapiens
tgtgttttgtttttttggaaaaaataatattcacttcaatattcactgggttattggaagatttaaatgagaccattctctacattttttgtatggtctcttaggataccgcagaactattctttgaagatatacggttgccagctagtgccctacttggagaagagaataaaggcttctattacatcatgaaagagcttccacaggtcagaagtgtttaaagattccatcttttgactgaataatgaattggaatagaataatatagaaacatgttatttctatattatgcattcaaatttatacatgcaaaacttgtgaaatagctaatcatttgagta

SEQ ID NO: 326960 - DNA, 596 bp, Homo sapiens
cgaccagcctgtggcgtggttggggctccggaagggcgcgcgcgagcgcttttttgggaggacaccacaggtggacgcctcagctgatcgtcctccctcccggggaccctgccccgagtcgccgagtagccgcagagtcgcctccgtcgccccgccgcccctgtgtttcggacatggccgcacgccttctccgagggtccctacgcgtcctgggcggccaccgtgcgccgcgccagctgcccgccgcgcgatgttctcattccggaggggaagaacgtctagaaactccttctgctaaaaaattaacagatataggaattcgaagaatcttttctccagagcatgacattttccggaaaagtgtaaggaagtttttccaagaagaagtgattcctcatcactcagaatgggagaaagctggagaagtaagtagggaggtttgggaaaaagctggaaaacaaggactgcttggtgtcaatattgcagagcatcttggtggaattggaggggatctgtactccgcagctattgtctgggaggagcagtaagtatggagacttttaaggttgagtcttgttttgtaaacacaccactca

SEQ ID NO: 326961 - DNA, 2542 bp, Homo sapiens
cgaccagcctgtggcgtggttggggctccggaagggcgcgcgcgagcgcttttttgggaggacaccacaggtggacgcctcagctgatcgtcctccctcccggggaccctgccccgagtcgccgagtagccgcagagtcgcctccgtcgccccgccgcccctgtgtttcggacatggccgcacgccttctccgagggtccctacgcgtcctgggcggccaccgtgcgccgcgccagctgcccgccgcgcgatgttctcattccggaggggaagaacgtctagaaactccttctgctaaaaaattaacagatataggaattcgaagaatcttttctccagagcatgacattttccggaaaagtgtaaggaagtttttccaagaagaagtgattcctcatcactcagaatgggagaaagctggagaagtaagtagggaggtttgggaaaaagctggaaaacaaggactgcttggtgtcaatattgcagagcatcttggtggaattggaggggatctgtactccgcagctattgtctgggaggagcaagcttattcaaattgttcaggcccaggttttagtattcattcaggtattgtcatgtcctatattacaaaccatggctcagaagaacagattaagcactttattccccagatgactgcaggcaaatgtattggtgcaatagcaatgacagagcctggagctggaagtgacttacagggaataaaaacaaatgctaaaaaggatggaagtgactggattctcaatggaagcaaggtgttcatcagtaatgggtcattaagtgatgttgtgattgtagttgcggtcacaaatcatgaagctccctcccctgcccatggtattagcctttttctggtggaaaatggaatgaaaggatttatcaagggacgaaagctacataaaatgggattaaaagcccaggataccgcagaactattctttgaagatatacggttgccagctagtgccctacttggagaagagaataaaggcttctattacatcatgaaagagcttccacaggaaaggctgttaattgctgatgtggcaatttcagctagtgaattcatgtttgaagaaaccaggaactatgttaaacaaagaaaagcttttggcaaaacagttgctcacctacagacagtgcaacataaattagcagaattaaaaacacatatatgtgtaacccgagcatttgtggacaactgtctccagctgcatgaagcgaaacgtttggactccgccactgcttgcatggcgaaatattgggcatctgagttacaaaatagtgtagcttacgactgtgtacagctccatggaggttggggatacatgtgggagtacccaattgcaaagaaccctgatgaatatggagaagaataagtccaaaagtgagcttatgtggatgccagagttcagccaatctatggtggtacaaatgaaataatgaaggagctgattgcaagagagattgtctttgacaagtagacatctgcccacatcctggagtcctattacagctaatctcgttttaaatctgctcaagataaaatgtaacttggaaagcgaggaaacactaaacatgtttttacctgctctctctatagagaaggaaataaaatataaatataagattaacacagtggaaggacaaatctttgaagccaaaattctagttttccaatataaggtttaacttacagttttttatgtagccaaaggtaaacggttttctgaatcttgcctaggtgtttcatttatctctaaaattctaaaaagcataaatcattcaaatcttcaaaccaaggcagaaataattttatgtcgctatagtataaaaacattaataagatagcacattgacttttaaagggaaaagtaaatataacttagcatgtaaactcatttcggctaccatttgctccaaattccctagaacagtggtttttaccactgtactccaaccccgtttttaagcaatggaactctttcttcaaacaaaagcttatgcagaacatctctgtgaaacgctgctgagtgagaactgctttcattgaagctggaagccatcataccttactgccttgaaacccctaggactcagctaagtatttgcctaaccctgaccagggaatgccttggttctgtcaattgctgacatctgagaacacagaataatccatcatttttaatttcaagatattggtacattttataggtatcaaagcaatggcttttcttttgcaacagttaatgtatttattaacttaataattactttatgtcttctataaaccaggctgttaatacaatgatgacaaacaaaactggcaagatcactaaaaaataagtgaataaacaaataagtagtaaaataaggtaagaagtaaatatgtaaaagagataatttcaagcataagtgcaatgtaaataataaagtaagcatttaaaattcaaaagtgaggaaatgacatttgatttaagacttaaaagtaattacaaaaaataaaccattaatttaaagt

SEQ ID NO: 326962 - DNA, 1434 bp, Homo sapiens
gcgttttgggaggaggtggtcaccccctgggcccggctgcaggagcgcgggctgcgatctgtgtcccagttcgagctgtgaacccggcgttccccacggcttagactcgccgcgcggtagtgaacttgggacccggactcagtgcccgggctgcggcgcggaccagaattgtccaggacaaactgggctagaaatgacctggcgagggttccatcaaacaaggaaattagctttagatatatcaacaaatctaactaaatacagaggattaatgaagacagagtctaagtagttcagtgactactaaggtggtgtttataatatgatcaaaagtttcagatactgtctgatgcataaaatctattcactgggtaaacaaattggaagcatggagaattcattatttaataagggtgaaggaactggcaaatttgcgaatgacagcattggtgtaagctactctaattttatttgagagctatgaaacaaaatgcctacttttcctggggagatttgggaagacgtcactgagaagatgttctcattccggaggggaagaacgtctagaaactccttctgctaaaaaattaacagatataggaattcgaagaatcttttctccagagcatgacattttccggaaaagtgtaaggaagtttttccaagaagaagtgattcctcatcactcagaatgggagaaagctggagaagtaagtagggaggtttgggaaaaagctggaaaacaaggactgcttggtgtcaatattgcagagcatcttggtggaattggaggggatctgtactccgcagctattgtctgggaggagcaagcttattcaaattgttcaggcccaggttttagtattcattcaggtattgtcatgtcctatattacaaaccatggctcagaagaacagattaagcactttattccccagatgactgcaggcaaatgtattggtgcaatagcaatgacagagcctggagctggaagtgacttacagggaataaaaacaaatgctaaaaaggatggaagtgactggattctcaatggaagcaaggtgtgtaaaagaggacttctatagcccttcttttcagagtcatgccatgggtaacaatgtctcaaagacaactcattaattctattaaatctagggactcaggcaggaattgaatttatctaagttgttttggagacagtaaatttacaacatatattacttaagatctgtggtagcttcttctatatttcattttgcatgccccctcactaatatggcaaaggttgttttagcttccaaacagcccttattaaaccagaaaaagacaaggtgaggctcacattgcccaaatgtgggacaaatattaataatacttaaactttatgttgataaaaggttggggggaaagcttctcatatagatcaagaagaat

SEQ ID NO: 326963 - DNA, 666 bp, Homo sapiens
gctaatttttaaatttttttagtgacaagatctccctatgttgctcaggctgttctggaactcctgagctcaaatcatcctcctgtctgggcctcccaaagtgctgagattacaggcatgacccaccacgcctggttgctgtgtggtactcttgactttgctttctgccaatcggccttaattaccttatctttttagccccagacactacagctggatttcttgatgaaaatcttgccaaattaccaccacctaaagaagactatgaaaggaagctcaactccagtaaagaactaagaacagtgtataacatgaagataacattttgtctttgaccactgtcttttgaatgggcccacagtgtttatgtactcttaacaactcacagaataatacatgttcactttattttgtaaaattgggttgagaggaaactaatggagtttcattgtaactgtcctttgtaatttatataaatgtattattttcctatatccttggttcttttctgataatttacagatttagcttttcttttgttatataaactgctagccacaaattttagttatgtaaaaggctacccttgacaagaaaagacatactgtcatgtatttatattctagcatagactaaactgaataaaaatgctgataacaggacctt

SEQ ID NO: 326964 - DNA, 946 bp, Homo sapiens
gctaatttttaaatttttttagtgacaagatctccctatgttgctcaggctgttctggaactcctgagctcaaatcatcctcctgtctgggcctcccaaagtgctgagattacaggcatgacccaccacgcctggttgctgtgtggtactcttgactttgctttctgccaatcggccttaattaccttatctttttagccccagacactacagctggatttcttgatgaaaatcttgccaaattaccaccacctaaagaagactatgaaaggaagctcaactccagtaaagaactaagaacagtgtataacatgaagataacattttgtctttgaccactgtcttttgaatgggcccacagtgtttatgtactcttaacaactcacagaataatacatgttcactttattttgtaaaattgggttgagaggaaactaatggagtttcattgtaactgtcctttgtaatttatataaatgtattattttcctatatccttggttcttttctgataatttacagatttagcttttcttttgttatataaactgctagccacaaattttagttatgtaaaaggctacccttgacaagaaaagacatactgtcatgtatttatattctagcatagactaaactgaataaaaatgctgataacaggacctttagtaagcatactttaatcagtttttctccttgaattaatcttttctcttaatttttattatgtactagttgtattaaagctaatgtgtttacttttaaaaacaacgaacgaccaattaacacccgaatcgaatgaagaaaagaactagtacgcacaaaaaaaggggggggggcgaaaaaaattcccggggggacaaatatgcacaccggttttttgcaaagggggccccataggaggatataaaaaaaaaggggcggatttaaaacggtgaggagaaca

SEQ ID NO: 326965 - DNA, 494 bp, Homo sapiens
gctaatttttaaatttttttagtgacaagatctccctatgttgctcaggctgttctggaactcctgagctcaaatcatcctcctgtctgggcctcccaaagtgctgagattacaggcatgacccaccacgcctggttgctgtgtggtactcttgactttgctttctgccaatcggccttaattaccttatctttttagccccagacactacagctggatttcttgatgaaaatcttgccaaattaccaccacctaaagaagactatgaaaggaagctcaactccagtaaagaactaagaacagtgtataacatgaagataacattttgtctttgaccactgtcttttgaatgggcccacagtgtttatgtactcttaacaactcacagaataatacatgttcactttattttgtaaaattgggttgagaggaaactaatggagtttcattgtaactgtcctttgtaatttatataaatgtattattttcctata

SEQ ID NO: 326966 - DNA, 618 bp, Homo sapiens
cggactggattgcaataaacagcttttattcttttatcagagacacgatctagctttttagcccaggccggagtgcggtggcatcctcacagctcgctgcagcttcactgggctcaggcgatcctctcgagtagctggggtacaggcgcaggcctgtgcccagtcaatggctgttccaaattagggtctacccatctctatgcagggctaaagtccgcgggcggccccgcaccgctaccaaaagtacagtcctgtgcgcccagacgcgacgcacacaagagtcgcaagcttccgggtccccgccccaccccggctccgcccctcccccaaccctgccaggctctccaatcgcatgtggaattatcgctctacccaggcggtggtgtcgatctacgttccaattggggccgtaccatggcggagaagactcaaaagaggtgggtttgctgcttgagaaaagccttttctcagctttccgtaggggtggaacctgttcctggtcgccaatggtggcgactcagaaggtgtctcatcctgggcattcgggccgaaggtacctgaagcccagacctggcgtccactgagggagggggcgacggagtgggggcggggagggtt

SEQ ID NO: 326967 - DNA, 431 bp, Homo sapiens
ttacaggcatgtgccaccacacttggctaatttttttgtatttttagtagagacagggtttcaccatgttggtcaggctgatctcaaactcctaacctcaaatgatccaccctcctcggcctcccaaatagctgggactacaggcgcacataccatcatgcctggctaattttagtattttttggtacagatggggtttcgccatgttggtcaggctggtctcgatctcctgaccttaagcgatctccccgccttggcctccacatttcttctcaattatgtaataaaaagactaattcggaggtacactcgcataagaaagcagaacagcttaagcaaagagagtgttaccttgctgagggaaaagaaggaattaatttttattgccacctttgtgtcacatgctgtgtctccagcattatcgcccctag

SEQ ID NO: 326968 - DNA, 1779 bp, Homo sapiens
cggactggattgcaataaacagcttttattcttttatcagagacacgatctagctttttagcccaggccggagtgcggtggcatcctcacagctcgctgcagcttcactgggctcaggcgatcctctcgagtagctggggtacaggcgcaggccaccgtgacaggcttttttttttttttttttttttttttgaagagagggtctcactatgttacccaggctagtctcgcagtctggcactcctggcctcaagcgatcctcctgcctcggcctctcggcctcccaaagtgctggcctgtgcccagtcaatggctgttccaaattagggtctacccatctctatgcagggctaaagtccgcgggcggccccgcaccgctaccaaaagtacagtcctgtgcgcccagacgcgacgcacacaagagtcgcaagcttccgggtccccgccccaccccggctccgcccctcccccaaccctgccaggctctccaatcgcatgtggaattatcgctctacccaggcggtggtgtcgatctacgttccaattggggccgtaccatggcggagaagactcaaaagagtgtgaagattgctcctggagcagttgtatgtgtagaaagtgaaatcagaggagatgtaactatcggacctcggacagtgatccaccctaaagcaagaattattgcggaagccgggccaatagtgattggcgaagggaacctaatagaagaacaggcccttatcataaatgcttacccagataatatcactcctgacactgaagatccagaaccaaaacctatgatcattggcaccaataatgtgtttgaagttggctgttattcccaagccatgaagatgggagataataatgtcattgaatcaaaagcatatgtaggcagaaatgtaatattgacaagtggctgcatcattggggcttgttgcaacctaaatacatttgaagtcatccctgagaatacggtgatctatggtgcagactgccttcgtcgggtgcagactgagcgaccgcagccccagacactacagctggatttcttgatgaaaatcttgccaaattaccaccacctaaagaagactatgaaaggaagctcaactccagtaaagaactaagaacagtgtataacatgaagataacattttgtctttgaccactgtcttttgaatgggcccacagtgtttatgtactcttaacaactcacagaataatacatgttcactttattttgtaaaattgggttgagaggaaactaatggagtttcattgtaactgtcctttgtaatttatataaatgtattattttcctatatccttggttcttttctgataatttacagatttagcttttcttttgttatataaactgctagccacaaattttagttatgtaaaaggctacccttgacaagaaaagacatactgtcatgtatttatattctagcatagactaaactgaataaaaatgctgataacaggacctttagtaagcatactttaatcagtttttctccttgaattaatcttttctcttaatttttattatgtactagttgtattaaagctaatgtgtttacttttaaaaacaacgaacgaccaattaacacccgaatcgaatgaagaaaagaactagtacgcacaaaaaaaggggggggggcgaaaaaaattcccggggggacaaatatgcacaccggttttttgcaaagggggccccataggaggatataaaaaaaaaggggcggatttaaaacggtgaggagaaca

SEQ ID NO: 326969 - DNA, 1088 bp, Homo sapiens
tccccccacctcggcctcccaaagtgctaggattacaggcgtgagccactgcgcctggcctttttttccatcattttttaaaccttgttttcattacaatgtcacggtagctcctccaacagtatgtttaatcttacccctggtaaatgttacctttttcttgctacagtgtgaagattgctcctggagcagttgtatgtgtagaaagtgaaatcagaggagatgtaactatcggacctcggacagtgatccaccctaaagcaagaattattgcggaagccgggccaatagtgattggcgaagggaacctaatagaagaacaggcccttatcataaatgcttacccagataatatcactcctgacactgaagatccagaaccaaaacctatgatcattggcaccaataatgtgtttgaagttggctgttattcccaagccatgaagatgggagataataatgtcattgaatcaaaagcatatgtaggcagaaatgtaatattgacaagtggctgcatcattggggcttgttgcaacctaaatacatttgaagtcatccctgagaatacggtgatctatggtgcagactgccttcgtcgggtgcagactgagcgaccgcagccccagacactacagctggatttcttgatgaaaatcttgccaaattaccaccacctaaagaagactatgaaaggaagctcaactccagtaaagaactaagaacagtgtataacatgaagataacattttgtctttgaccactgtcttttgaatgggcccacagtgtttatgtactcttaacaactcacagaataatacatgttcactttattttgtaaaattgggttgagaggaaactaatggagtttcattgtaactgtcctttgtaatttatataaatgtattattttcctatatccttggttcttttctgataatttacagatttagcttttcttttgttatataaactgctagccacaaattttagttatgtaaaaggctacccttgacaagaaaagacatactgtcatgtatttatattctagcatagactaaactgaataaaaatgctgataacaggacctt

SEQ ID NO: 326970 - DNA, 1327 bp, Homo sapiens
cggactggattgcaataaacagcttttattcttttatcagagacacgatctagctttttagcccaggccggagtgcggtggcatcctcacagctcgctgcagcttcactgggctcaggcgatcctctcgagtagctggggtacaggcgcaggccaccgtgacaggcttttttttttttttttttttttttttgaagagagggtctcactatgttacccaggctagtctcgcagtctggcactcctggcctcaagcgatcctcctgcctcggcctctcggcctcccaaagtgctggcctgtgcccagtcaatggctgttccaaattagggtctacccatctctatgcagggctaaagtccgcgggcggccccgcaccgctaccaaaagtacagtcctgtgcgcccagacgcgacgcacacaagagtcgcaagcttccgggtccccgccccaccccggctccgcccctcccccaaccctgccaggctctccaatcgcatgtggaattatcgctctacccaggcggtggtgtcgatctacgttccaattggggccgtaccatggcggagaagactcaaaagagtgtgaagattgctcctggagcagttgtatgtgtagaaagtgaaatcagaggagatgtaactatcggacctcggacagtgatccaccctaaagcaagaattattgcggaagccgggccaatagtgattggcgaagggaacctaatagaagaacaggcccttatcataaatgcttacccagataatatcactcctgacactgaagatccagaaccaaaacctatgatcattggcaccaataatgtgtttgaagttggctgttattcccaagccatgaagatgggagataataatgtcattgaatcaaaagcatatgtaggcagaaatgtaatattgacaagtggctgcatcattggggcttgttgcaacctaaatacatttgaagtcatccctgagaatacggtgatctatggtgcagactgccttcgtcgggtgcagactgagcgaccgcagccccagacactacagctggatttcttgatgaaaatcttgccaaattaccaccacctaaagaagactatgaaaggaagctcaactccagtaaagaactaagaacagtgtataacatgaagataacattttgtctttgaccactgtcttttgaatgggcccacagtgtttatgtactcttaacaactcacagaataatacatgttcactttattttgtaaaattgggttgagaggaaactaatggagtttcattgtaactgtcctttgtaatttatataaatgtattattttcctata

SEQ ID NO: 326971 - DNA, 1393 bp, Homo sapiens
cggactggattgcaataaacagcttttattcttttatcagagacacgatctagctttttagcccaggccggagtgcggtggcatcctcacagctcgctgcagcttcactgggctcaggcgatcctctcgagtagctggggtacaggcgcaggccaccgtgacaggcttttttttttttttttttttttttttgaagagagggtctcactatgttacccaggctagtctcgcagtctggcactcctggcctcaagcgatcctcctgcctcggcctctcggcctcccaaagtgctggcctgtgcccagtcaatggctgttccaaattagggtctacccatctctatgcagggctaaagtccgcgggcggccccgcaccgctaccaaaagtacagtcctgtgcgcccagacgcgacgcacacaagagtcgcaagcttccgggtccccgccccaccccggctccgcccctcccccaaccctgccaggctctccaatcgcatgtggaattatcgctctacccaggcggtggtgtcgatctacgttccaattggggccgtaccatggcggagaagactcaaaagagtgtgaagattgctcctggagcagttgtatgtgtagaaagtgaaatcagaggagatgtaactatcgttacccagataatatcactcctgacactgaagatccagaaccaaaacctatgatcattggcaccaataatgtgtttgaagttggctgttattcccaagccatgaagatgggagataataatgtcattgaatcaaaagcatatgtaggcagaaatgtaatattgacaagtggctgcatcattggggcttgttgcaacctaaatacatttgaagtcatccctgagaatacggtgatctatggtgcagactgccttcgtcgggtgcagactgagcgaccgcagccccagacactacagctggatttcttgatgaaaatcttgccaaattaccaccacctaaagaagactatgaaaggaagctcaactccagtaaagaactaagaacagtgtataacatgaagataacattttgtctttgaccactgtcttttgaatgggcccacagtgtttatgtactcttaacaactcacagaataatacatgttcactttattttgtaaaattgggttgagaggaaactaatggagtttcattgtaactgtcctttgtaatttatataaatgtattattttcctatatccttggttcttttctgataatttacagatttagcttttcttttgttatataaactgctagccacaaattttagttatgtaaaaggctacccttgacaagaaaagacatactgtcatgtatttatattctagcatagactaaactgaataaaaatgctgataacaggacctt

SEQ ID NO: 326972 - DNA, 1404 bp, Homo sapiens
cggactggattgcaataaacagcttttattcttttatcagagacacgatctagctttttagcccaggccggagtgcggtggcatcctcacagctcgctgcagcttcactgggctcaggcgatcctctcgagtagctggggtacaggcgcaggccaccgtgacaggcttttttttttttttttttttttttttgaagagagggtctcactatgttacccaggctagtctcgcagtctggcactcctggcctcaagcgatcctcctgcctcggcctctcggcctcccaaagtgctggcctgtgcccagtcaatggctgttccaaattagggtctacccatctctatgcagggctaaagtccgcgggcggccccgcaccgctaccaaaagtacagtcctgtgcgcccagacgcgacgcacacaagagtcgcaagcttccgggtccccgccccaccccggctccgcccctcccccaaccctgccaggctctccaatcgcatgtggaattatcgctctacccaggcggtggtgtcgatctacgttccaattggggccgtaccatggcggagaagactcaaaagagtgtgaagattgctcctggagcagttgtatgtgtagaaagtgaaatcagaggagatgtaactatcggacctcggacagtgatccaccctaaagcaagaattattgcggaagccgggccaatagtgattggcgaagggaacctaatagaagaacaggcccttatcataaatgcttacccagataatatcactcctgacactgaagatccagaaccaaaacctatgatcattggcaccaataatgtgtttgaagttggctgttattcccaagccatgaagatgggagataataatgtcattgaatcaaaagcatatgtaggcagaaatgtaatattgacaagtggctgcatcattggggcttgttgcaacctaaatacatttcttgatgaaaatcttgccaaattaccaccacctaaagaagactatgaaaggaagctcaactccagtaaagaactaagaacagtgtataacatgaagataacattttgtctttgaccactgtcttttgaatgggcccacagtgtttatgtactcttaacaactcacagaataatacatgttcactttattttgtaaaattgggttgagaggaaactaatggagtttcattgtaactgtcctttgtaatttatataaatgtattattttcctatatccttggttcttttctgataatttacagatttagcttttcttttgttatataaactgctagccacaaattttagttatgtaaaaggctacccttgacaagaaaagacatactgtcatgtatttatattctagcatagactaaactgaataaaaatgctgataacaggacctt

SEQ ID NO: 326973 - DNA, 939 bp, Homo sapiens
cggactggattgcaataaacagcttttattcttttatcagagacacgatctagctttttagcccaggccggagtgcggtggcatcctcacagctcgctgcagcttcactgggctcaggcgatcctctcgagtagctggggtacaggcgcaggccaccgtgacaggcttttttttttttttttttttttttttgaagagagggtctcactatgttacccaggctagtctcgcagtctggcactcctggcctcaagcgatcctcctgcctcggcctctcggcctcccaaagtgctggcctgtgcccagtcaatggctgttccaaattagggtctacccatctctatgcagggctaaagtccgcgggcggccccgcaccgctaccaaaagtacagtcctgtgcgcccagacgcgacgcacacaagagtcgcaagcttccgggtccccgccccaccccggctccgcccctcccccaaccctgccaggctctccaatcgcatgtggaattatcgctctacccaggcggtggtgtcgatctacgttccaattggggccgtaccatggcggagaagactcaaaagagtgtgaagattgctcctggagcagttgtatgtgtagaaagtgaaatcagaggagatgtaactatcggacctcggacagtgatccaccctaaagcaagaattattgcggaagccgggccaatagtgattggcgaagggaacctaatagaagaacaggcccttatcataaatgcttacccagataatatcactcctgacactgaagatccagaaccaaaacctatgatcattggcaccaataatgtgtttgaagttggctgttattccctagccatgccgctgcggagataataatgtcattgaatcaaaagcatctgtagggtatccagaaggagcattcatgaagatgttacaagcccgg

SEQ ID NO: 326974 - DNA, 527 bp, Homo sapiens
attatcgcccctagcccttacagcaaccctgtgggactggtgttgtcatcacctctgtttcaccgctgagatcacaggaagcttccgagtggaggctgagccagagctgtctggctctagtgcctgtgccattccactcacattggcttgcaacttggccctgactactgatgataaagcctgggagatagtatctgtgaagtacctagcttggtgcctggcacatacttagaaaatgttcctcccaacagcctcacccatcctcagtcaccttccacccttctgttggaagcatagcctccaccaataatttcttctcaaactatttttaacaggacctcggacagtgatccaccctaaagcaagaattattgcggaagccgggccaatagtgattggcgaagggaacctaatagaagaacaggcccttatcataaatgcgtaagactcttatacatactgtgaaccaagtaccatgggtaacggtttttcttaatttcagctgtctgtaagaaccttttcagctg

SEQ ID NO: 326975 - DNA, 1499 bp, Homo sapiens
cggactggattgcaataaacagcttttattcttttatcagagacacgatctagctttttagcccaggccggagtgcggtggcatcctcacagctcgctgcagcttcactgggctcaggcgatcctctcgagtagctggggtacaggcgcaggccaccgtgacaggcttttttttttttttttttttttttttgaagagagggtctcactatgttacccaggctagtctcgcagtctggcactcctggcctcaagcgatcctcctgcctcggcctctcggcctcccaaagtgctggcctgtgcccagtcaatggctgttccaaattagggtctacccatctctatgcagggctaaagtccgcgggcggccccgcaccgctaccaaaagtacagtcctgtgcgcccagacgcgacgcacacaagagtcgcaagcttccgggtccccgccccaccccggctccgcccctcccccaaccctgccaggctctccaatcgcatgtggaattatcgctctacccaggcggtggtgtcgatctacgttccaattggggccgtaccatggcggagaagactcaaaagagtgtgaagattgctcctggagcagttgtatgtgtagaaagtgaaatcagaggagatgtaactatcggacctcggacagtgatccaccctaaagcaagaattattgcggaagccgggccaatagtgattggcgaagggaacctaatagaagaacaggcccttatcataaatgcttacccagataatatcactcctgacactgaagatccagaaccaaaacctatgatcattggcaccaataatgtgtttgaagttggctgttattcccaagccatgaagatgggagataataatgtcattgaatcaaaagcatatgtaggcagaaatgtaatattgacaagtggctgcatcattggggcttgttgcaacctaaatacatttgaagtcatccctgagaatacggtgatctatggtgcagactgccttcgtcgggtgcagactgagcgaccgcagccccagacactacagctggatttcttgatgaaaatcttgccaaattaccaccacctaaagaagactatgaaaggaagctcaactccagtaaagaactaagaacagtgtataacatgaagataacattttgtctttgaccactgtcttttgaatgggcccacagtgtttatgtactcttaacaactcacagaataatacatgttcactttattttgtaaaattgggttgagaggaaactaatggagtttcattgtaactgtcctttgtaatttatataaatgtattattttcctatatccttggttcttttctgataatttacagatttagcttttcttttgttatataaactgctagccacaaattttagttatgtaaaaggctacccttgacaagaaaagacatactgtcatgtatttatattctagcatagactaaactgaataaaaatgctgataacaggacctt

SEQ ID NO: 326976 - DNA, 2165 bp, Homo sapiens
cggactggattgcaataaacagcttttattcttttatcagagacacgatctagctttttagcccaggccggagtgcggtggcatcctcacagctcgctgcagcttcactgggctcaggcgatcctctcgagtagctggggtacaggcgcaggccaccgtgacaggcttttttttttttttttttttttttttgaagagagggtctcactatgttacccaggctagtctcgcagtctggcactcctggcctcaagcgatcctcctgcctcggcctctcggcctcccaaagtgctggcctgtgcccagtcaatggctgttccaaattagggtctacccatctctatgcagggctaaagtccgcgggcggccccgcaccgctaccaaaagtacagtcctgtgcgcccagacgcgacgcacacaagagtcgcaagcttccgggtccccgccccaccccggctccgcccctcccccaaccctgccaggctctccaatcgcatgtggaattatcgctctacccaggcggtggtgtcgatctacgttccaattggggccgtaccatggcggagaagactcaaaagagtgtgaagattgctcctggagcagttgtatgtgtagaaagtgaaatcagaggagatgtaactatcggacctcggacagtgatccaccctaaagcaagaattattgcggaagccgggccaatagtgattggcgaagggaacctaatagaagaacaggcccttatcataaatgcttacccagataatatcactcctgacactgaagatccagaaccaaaacctatgatcattggcaccaataatgtgtttgaagttggctgttattcccaagccatgaagatgggagataataatgtcattgaatcaaaagcatatgtaggcagaaatgtaatattgacaagtggctgcatcattggggcttgttgcaacctaaatacatttgaagtcatccctgagaatacggtgatctatggtgcagactgccttcgtcgggtgcagactgagcgaccgcagccccagacactacagctggatttcttgatgaaaatcttgccaaattaccaccacctaaagaagactatgaaaggaagctcaactccagtaaagaactaagaacagtgtataacatgaagataacattttgtctttgaccactgtcttttgaatgggcccacagtgtttatgtactcttaacaactcacagaataatacatgttcactttattttgtaaaattgggttgagaggaaactaatggagtttcattgtaactgtcctttgtaatttatataaatgtattattttcctatatccttggttcttttctgataatttacagatttagcttttcttttgttatataaactgctagccacaaattttagttatgtaaaaggctacccttgacaagaaaagacatactgtcatgtatttatattctagcatagactaaactgaataaaaatgctgataacaggacctttagtaagcatactttaatcagtttttctccttgaattaatcttttctcttaatttttattatgtactagttgtattaaagctaatgtgtttactttttcctcttgtggatttgtagctgtttaaaatttcaggtgaatttcagtagctattgaattaatttagacttcacttgtttttaagaaaagtacaattttttcttttggtaaaacaaaagtaatcagggaaagatgttttcagtagaatacaaattagtggcattcttgggtttctgaggacaatgaaactaaaagaaattttgaaattatacaaatttatgaaattattaatattttagcatagtgctaatcactaatcattgagctttattattctgttgtctatgtagtgagcaaaatgttgagaattttataattccaaatttttaaaataattcaagtgcataaatttactggaacatacttctcaacttttgaattagtagatattgactaatactaagatactaaaatactaagatattctctcaaaatttaatttttatttatttattttagagacaaggatctcactctattacctaggctggagtgcagtggcacagtctgctcacatggatcacttgacctcctcaaactcaagtgatcctcccgcctcagcctcttgag

SEQ ID NO: 326977 - DNA, 950 bp, Homo sapiens
ccggaattcccgggatggaaactcaaaagagtgtgaagattgctcctggagcagttgtatgtgtagaaagtgaaatcagaggagatgtaactatcggacctcggacagtgatccaccctaaagcaagaattattgcggaagccgggccaatagtgattggcgaagggaacctaatagaagaacaggcccttatcataaatgcttacccagataatatcactcctgacactgaagatccagaaccaaaacctatgatcattggcaccaataatgtgtttgaagttggctgttattcccaagccatgaagatgggagataataatgtcattgaatcaaaagcatatgtaggcagaaatgtaatattgacaagtggctgcatcattggggcttgttgcaacctaaatacatttgaagtcatccctgagaatacggtgatctatggtgcagactgccttcgtcgggtgcagactgagcgaccgcagccccagacactacagctggatttcttgatgaaaatcttgccaaattaccaccacctaaagaagactatgaaaggaagctcaactccagtaaagaactaagaacagtgtataacatgaagataacattttgtctttgaccactgtcttttgaatgggcccacagtgtttatgtactcttaacaactcacagaataatacatgttcactttattttgtaaaattgggttgagaggaaactaatggagtttcattgtaactgtcctttgtaatttatataaatgtattattttcctatatccttggttcttttctgataatttacagatttagcttttcttttgttatataaactgctagccacaaattttagttatgtaaaaggctacccttgacaagaaaagacatactgtcatgtatttatattctagcatagactaaactgaataaaaatgctgataacaggacctt

SEQ ID NO: 326978 - DNA, 1230 bp, Homo sapiens
ccggaattcccgggatggaaactcaaaagagtgtgaagattgctcctggagcagttgtatgtgtagaaagtgaaatcagaggagatgtaactatcggacctcggacagtgatccaccctaaagcaagaattattgcggaagccgggccaatagtgattggcgaagggaacctaatagaagaacaggcccttatcataaatgcttacccagataatatcactcctgacactgaagatccagaaccaaaacctatgatcattggcaccaataatgtgtttgaagttggctgttattcccaagccatgaagatgggagataataatgtcattgaatcaaaagcatatgtaggcagaaatgtaatattgacaagtggctgcatcattggggcttgttgcaacctaaatacatttgaagtcatccctgagaatacggtgatctatggtgcagactgccttcgtcgggtgcagactgagcgaccgcagccccagacactacagctggatttcttgatgaaaatcttgccaaattaccaccacctaaagaagactatgaaaggaagctcaactccagtaaagaactaagaacagtgtataacatgaagataacattttgtctttgaccactgtcttttgaatgggcccacagtgtttatgtactcttaacaactcacagaataatacatgttcactttattttgtaaaattgggttgagaggaaactaatggagtttcattgtaactgtcctttgtaatttatataaatgtattattttcctatatccttggttcttttctgataatttacagatttagcttttcttttgttatataaactgctagccacaaattttagttatgtaaaaggctacccttgacaagaaaagacatactgtcatgtatttatattctagcatagactaaactgaataaaaatgctgataacaggacctttagtaagcatactttaatcagtttttctccttgaattaatcttttctcttaatttttattatgtactagttgtattaaagctaatgtgtttacttttaaaaacaacgaacgaccaattaacacccgaatcgaatgaagaaaagaactagtacgcacaaaaaaaggggggggggcgaaaaaaattcccggggggacaaatatgcacaccggttttttgcaaagggggccccataggaggatataaaaaaaaaggggcggatttaaaacggtgaggagaaca

SEQ ID NO: 326979 - DNA, 704 bp, Homo sapiens
gaaattcggccattatggccggaaatgtgtttgaagttggctgttattcccaagccatgaagatgggagataataatgtcattgaatcaaaagcatatgtaggcagaaatgtaatattgacaagtggctgcatcattggggcttgttgcaacctaaatacatttgaagtcatccctgagaatacggtgatctatggtgcagactgccttcgtcgggtgcagactgagcgaccgcagccccagacactacagctggatttcttgatgaaaatcttgccaaattaccaccacctaaagaagactatgaaaggaagctcaactccagtaaagaactaagaacagtgtataacatgaagataacattttgtctttgaccactgtcttttgaatgggcccacagtgtttatgtactcttaacaactcacagaataatacatgttcactttattttgtaaaattgggttgagaggaaactaatggagtttcattgtaactgtcctttgtaatttatataaatgtattattttcctatatccttggttcttttctgataatttacagatttagcttttcttttgttatataaactgctagccacaaattttagttatgtaaaaggctacccttgacaagaaaagacatactgtcatgtatttatattctagcatagactaaactgaataaaaatgctgataacaggacctt

SEQ ID NO: 326980 - DNA, 761 bp, Homo sapiens
cggactggattgcaataaacagcttttattcttttatcagagacacgatctagctttttagcccaggccggagtgcggtggcatcctcacagctcgctgcagcttcactgggctcaggcgatcctctcgagtagctggggtacaggcgcaggccaccgtgacaggcttttttttttttttttttttttttttgaagagagggtctcactatgttacccaggctagtctcgcagtctggcactcctggcctcaagcgatcctcctgcctcggcctctcggcctcccaaagtgctggcctgtgcccagtcaatggctgttccaaattagggtctacccatctctatgcagggctaaagtccgcgggcggccccgcaccgctaccaaaagtacagtcctgtgcgcccagacgcgacgcacacaagagtcgcaagcttccgggtccccgccccaccccggctccgcccctcccccaaccctgccaggctctccaatcgcatgtggaattatcgctctacccaggcggtggtgtcgatctacgttccaattggggccgtaccatggcggagaagactcaaaagaggtgggtttgctgcttgagaaaagccttttctcagctttccgtaggggtggaacctgttcctggtcgccaatggtggcgactcagaaggtgtctcatcctgggcattcgggccgaaggtacctgaagcccagacctggcgtccactgagggagggggcgacggagtgggggcggggagggtt

SEQ ID NO: 326981 - DNA, 1103 bp, Homo sapiens
cggactggattgcaataaacagcttttattcttttatcagagacacgatctagctttttagcccaggccggagtgcggtggcatcctcacagctcgctgcagcttcactgggctcaggcgatcctctcgagtagctggggtacaggcgcaggccaccgtgacaggcttttttttttttttttttttttttttgaagagagggtctcactatgttacccaggctagtctcgcagtctggcactcctggcctcaagcgatcctcctgcctcggcctctcggcctcccaaagtgctggcctgtgcccagtcaatggctgttccaaattagggtctacccatctctatgcagggctaaagtccgcgggcggccccgcaccgctaccaaaagtacagtcctgtgcgcccagacgcgacgcacacaagagtcgcaagcttccgggtccccgccccaccccggctccgcccctcccccaaccctgccaggctctccaatcgcatgtggaattatcgctctacccaggcggtggtgtcgatctacgttccaattggggccgtaccatggcggagaagactcaaaagagtgtgaagattgctcctggagcagttgtatgtgtagaaagtgaaatcagaggagatgtaactatcggtaagaaatagtttatttactgtttttcaagaattgatgtgatttaatctattttagtgctttacaattagataccgtcttccatgtttatttcactgatgtcctagttttattgacaaaataatgcattttctcctatgtgtttaaatttctgaaagaatgtagtgtgatggaggctgtgtttaaactcctatctgaaatactaatgaggctgtataacaaagtcattcatgtatttaagagagatctgttgtgtacctgcgatgtgccaggcactgtgctagtgctagagacacgtcagtaagcacagcagacaaaggtgctgcctttgtggagcttcgtggagagcgtgggccatggagtcaacagacctgggctactctgctccttgctcctttcttgctgggttactttgaacatattacttaacctctctaaccttgatgtttttcccatct

SEQ ID NO: 326982 - DNA, 708 bp, Homo sapiens
gattcctgcggaacgactctcttaattatcaccgctacaggtaaatatttccaactacagtctggtgatggagtctgacgcaggaaccttcttacccactgggctgcaattcactggcagtgaaaaggccagggccatcatggaggaggttatgagcctgctgcagcccctcaatatcactcaggtcctgagccatggagaagggacagacatcaacttttggatccaagctggagtgcctggagccagtctacttgatgacttatacaagtatttcttcttccatcactcccacggagacaccatgactgtcatggatccaaagcagatgaatgttgctgctgctgtttgggctgttgtttcttatgttgttgcagacatggaagaaatgctgcctaggtcctagaaacagtaagaaagaaacgttttcatgcttctggccaggaatcctgggtctgcaactttggaaaactcctcttcacataacaatttcatccaattcatcttcaaagcacaactctatttcatgctttctgttattatctttcttgatactttccaaattctctgattctagaaaaaggaatcattctcccctccctcccaccacatagaatcaacatatggtagggattacagtgggggcatttctttatatcacctcttaaaaacattgtttccactttaaaagtaaacacttaataaatt

SEQ ID NO: 326983 - DNA, 571 bp, Homo sapiens
gggacctgagtgatattgaggggctgcagcaggctcataacctcctccatgatggccatggagaagggacagacatcaacttttggatccaagctggagtgcctggagccagtctacttgatgacttatacaagtatttcttcttccatcactcccacggagacaccatgactgtcatggatccaaagcagatgaatgttgctgctgctgtttgggctgttgtttcttatgttgttgcagacatggaagaaatgctgcctaggtcctagaaacagtaagaaagaaacgttttcatgcttctggccaggaatcctgggtctgcaactttggaaaactcctcttcacataacaatttcatccaattcatcttcaaagcacaactctatttcatgctttctgttattatctttcttgatactttccaaattctctgattctagaaaaaggaatcattctcccctccctcccaccacatagaatcaacatatggtagggattacagtgggggcatttctttatatcacctcttaaaaacattgtttccactttaaaagtaaacacttaataaatt

SEQ ID NO: 326984 - DNA, 531 bp, Homo sapiens
aaggaagtcaccggggaggggatggtgagatgacgcactaaagtaaaactccttgtttgtaaaaggagccagtctacttgatgacttatacaagtatttcttcttccatcactcccacggagacaccatgactgtcatggatccaaagcagatgaatgttgctgctgctgtttgggctgttgtttcttatgttgttgcagacatggaagaaatgctgcctaggtcctagaaacagtaagaaagaaacgttttcatgcttctggccaggaatcctgggtctgcaactttggaaaactcctcttcacataacaatttcatccaattcatcttcaaagcacaactctatttcatgctttctgttattatctttcttgatactttccaaattctctgattctagaaaaaggaatcattctcccctccctcccaccacatagaatcaacatatggtagggattacagtgggggcatttctttatatcacctcttaaaaacattgtttccactttaaaagtaaacacttaataaatt

SEQ ID NO: 326985 - DNA, 1079 bp, Homo sapiens
gattcctgcggaacgactctcttaattatcaccgctacaggctgaaggaaggcaagggctgaaacggagacaggatgctactgcagtactccacgtgaaggctggtggtcgcttggactgagtcagaacagggaaactgatgggaagttgtcggagagtaaatatttccaactacagtctggtgatggagtctgacgcaggaaccttcttacccactgggctgcaattcactggcagtgaaaaggccagggccatcatggaggaggttatgagcctgctgcagcccctcaatatcactcaggtcctgagccatggagaagggacagacatcaacttttggatccaagctggagtgcctggtacttctgcataactacccagtagagaaggatcctttcacaaaaggtgtgggaaaactatactacaagcctgcagtaaccaaaatggcatgttacgggtacaaaaacagacacataggccaatggaacaggttagagaagccagaaataaagccacacacctacaaccatctgatctttggcaaagccaacagtaaaaaacaatggggaaaggactcccaattcaataaatgctgctgggataactgactagccatatgcagaagattgaaactggactccttcctctcaccatacataaaaatcaacccaagattgattaaagacttaagtgtaaaacctaaaattataaaaatcctacaagaaaaccttggaaataacattctggacattggccctggcaaagacttcatgatgaagactccaaaagtaattgtaacaaaaacaaaaatcgacaagtgggacctaattaaagagttttgcacagtaaaagaaactatcaacagagtaaatagacaacctacagaatggaagaaaatatttgcaaactacgtatctgacaaaggtgtaatatctagaatctataaggaacttaagcaattcaacaaactaaaaacaaacaatcccattaaaaagtgggcaaaagacatgaacagacacttctcaaacgaagacagacaagcagccaacaaacatatgaaaaaatgctcaacatcatta

SEQ ID NO: 326986 - DNA, 1959 bp, Homo sapiens
cgcctctcggccccgcggcctggccggcaagcagggctgcagtcacggggcggcgcggagggccccagcccagtcaggggtgtggccgccgccaccgtaaggctaggccgcgagcttagtcctgggagccgcctccgtcgccgccgtcagagccgccctatcagagttcctaccattttgtggttccagcagcttctgttccagattatcttaacaagaaaaccaactggaaaaaaaaatgaaattccttatcttcgcatttttcggtggtgttcaccttttatccctgtgctctgggaaagctatatgcaagaatggcatctctaagaggacttttgaagaaataaaagaagaaatagccagctgtggagatgttgctaaagcaatcatcaacctagctgtttatggtaaagcccagaacagatcctatgagcgattggcacttctggttgatactgttggacccagactgagtggctccaagaacctagaaaaagccatccaaattatgtaccaaaacctgcagcaagatgggctggagaaagttcacctggagccagtgagaataccccactgggagaggggagaagaatcagctgtgatgctggagccaagaattcataagatagccatcctgggtcttggcagcagcattgggactcctccagaaggcattacagcagaagttctggtggtgacctctttcgatgaactgcagagaagggcctcagaagcaagagggaagattgttgtttataaccaaccttacatcaactactcaaggacggtgcaataccgaacgcagggggcggtggaagctgccaaggttggggctttggcatctctcattcgatccgtggcctccttctccatctacagtcctcacacaggtattcaggaataccaggatggcgtgcccaagattccaacagcctgtattacggtggaagatgcagaaatgatgtcaagaatggcttctcatgggatcaaaattgtcattcagctaaagatgggggcaaagacctacccagatactgattccttcaacactgtagcagagatcactgggagcaaatatccagaacaggttgtactggtcagtggacatctggacagctgggatgttgggcagggtgccatggatgatggcggtggagcctttatatcatgggaagcactctcacttattaaagatcttgggctgcgtccaaagaggactctgcggctggtgctctggactgcagaagaacaaggtggagttggtgccttccagtattatcagttacacaaggtaaatatttccaactacagtctggtgatggagtctgacgcaggaaccttcttacccactgggctgcaattcactggcagtgaaaaggccagggccatcatggaggaggttatgagcctgctgcagcccctcaatatcactcaggtcctgagccatggagaagggacagacatcaacttttggatccaagctggagtgcctggagccagtctacttgatgacttatacaagtatttcttcttccatcactcccacggagacaccatgactgtcatggatccaaagcagatgaatgttgctgctgctgtttgggctgttgtttcttatgttgttgcagacatggaagaaatgctgcctaggtcctagaaacagtaagaaagaaacgttttcatgcttctggccaggaatcctgggtctgcaactttggaaaactcctcttcacataacaatttcatccaattcatcttcaaagcacaactctatttcatgctttctgttattatctttcttgatactttccaaattctctgattctagaaaaaggaatcattctcccctccctcccaccacatagaatcaacatatggtagggattacagtgggggcatttctttatatcacctcttaaaaacattgtttccactttaaaagtaaacacttaataaatt

SEQ ID NO: 326987 - DNA, 1950 bp, Homo sapiens
cgcctctcggccccgcggcctggccggcaagcagggctgcagtcacggggcggcgcggagggccccagcccagtcaggggtgtggccgccgccaccgtaaggctaggccgcgagcttagtcctgggagccgcctccgtcgccgccgtcagagccgccctatcagattatcttaacaagaaaaccaactggaaaaaaaaatgaaattccttatcttcgcatttttcggtggtgttcaccttttatccctgtgctctgggaaagctatatgcaagaatggcatctctaagaggacttttgaagaaataaaagaagaaatagccagctgtggagatgttgctaaagcaatcatcaacctagctgtttatggtaaagcccagaacagatcctatgagcgattggcacttctggttgatactgttggacccagactgagtggctccaagaacctagaaaaagccatccaaattatgtaccaaaacctgcagcaagatgggctggagaaagttcacctggagccagtgagaataccccactgggagaggggagaagaatcagctgtgatgctggagccaagaattcataagatagccatcctgggtcttggcagcagcattgggactcctccagaaggcattacagcagaagttctggtggtgacctctttcgatgaactgcagagaagggcctcagaagcaagagggaagattgttgtttataaccaaccttacatcaactactcaaggacggtgcaataccgaacgcagggggcggtggaagctgccaaggttggggctttggcatctctcattcgatccgtggcctccttctccatctacagtcctcacacaggtattcaggaataccaggatggcgtgcccaagattccaacagcctgtattacggtggaagatgcagaaatgatgtcaagaatggcttctcatgggatcaaaattgtcattcagctaaagatgggggcaaagacctacccagatactgattccttcaacactgtagcagagatcactgggagcaaatatccagaacaggttgtactggtcagtggacatctggacagctgggatgttgggcagggtgccatggatgatggcggtggagcctttatatcatgggaagcactctcacttattaaagatcttgggctgcgtccaaagaggactctgcggctggtgctctggactgcagaagaacaaggtggagttggtgccttccagtattatcagttacacaaggtaaatatttccaactacagtctggtgatggagtctgacgcaggaaccttcttacccactgggctgcaattcactggcagtgaaaaggccagggccatcatggaggaggttatgagcctgctgcagcccctcaatatcactcaggtcctgagccatggagaagggacagacatcaacttttggatccaagctggagtgcctggagccagtctacttgatgacttatacaagtatttcttcttccatcactcccacggagacaccatgactgtcatggatccaaagcagatgaatgttgctgctgctgtttgggctgttgtttcttatgttgttgcagacatggaagaaatgctgcctaggtcctagaaacagtaagaaagaaacgttttcatgcttctggccaggaatcctgggtctgcaactttggaaaactcctcttcacataacaatttcatccaattcatcttcaaagcacaactctatttcatgctttctgttattatctttcttgatactttccaaattctctgattctagaaaaaggaatcattctcccctccctcccaccacatagaatcaacatatggtagggattacagtgggggcatttctttatatcacctcttaaaaacattgtttccactttaaaagtaaacacttaataaatttttggaagatctctgatttttagtgtgttca

SEQ ID NO: 326988 - DNA, 1981 bp, Homo sapiens
cgcctctcggccccgcggcctggccggcaagcagggctgcagtcacggggcggcgcggagggccccagcccagtcaggggtgtggccgccgccaccgtaaggctaggccgcgagcttagtcctgggagccgcctccgtcgccgccgtcagagccgccctatcagattatcttaacaagaaaaccaactggaaaaaaaaatgaaattccttatcttcgcatttttcggtggtgttcaccttttatccctgtgctctgggaaagctatatgcaagaatggcatctctaagaggacttttgaagaaataaaagaagaaatagccagctgtggagatgttgctaaagcaatcatcaacctagctgtttatggtaaagcccagaacagatcctatgagcgattggcacttctggttgatactgttggacccagactgagtggctccaagaacctagaaaaagccatccaaattatgtaccaaaacctgcagcaagatgggctggagaaagttcacctggagccagtgagaataccccactgggagaggggagaagaatcagctgtgatgctggagccaagaattcataagatagccatcctgggtcttggcagcagcattgggactcctccagaaggcattacagcagaagttctggtggtgacctctttcgatgaactgcagagaagggcctcagaagcaagagggaagattgttgtttataaccaaccttacatcaactactcaaggacggtgcaataccgaacgcagggggcggtggaagctgccaaggttggggctttggcatctctcattcgatccgtggcctccttctccatctacagtcctcacacaggtattcaggaataccaggatggcgtgcccaagattccaacagcctgtattacggtggaagatgcagaaatgatgtcaagaatggcttctcatgggatcaaaattgtcattcagctaaagatgggggcaaagacctacccagatactgattccttcaacactgtagcagagatcactgggagcaaatatccagaacaggttgtactggtcagtggacatctggacagctgggatgttgggcagggtgccatggatgatggcggtggagcctttatatcatgggaagcactctcacttattaaagatcttgggctgcgtccaaagaggactctgcggctggtgctctggactgcagaagaacaaggtggagttggtgccttccagtattatcagttacacaaggtaaatatttccaactacagtctggtgatggagtctgacgcaggaaccttcttacccactgggctgcaattcactggcagtgaaaaggccagggccatcatggaggaggttatgagcctgctgcagcccctcaatatcactcaggtcctgagccatggagaagggacagacatcaacttttggatccaagctggagtgcctggagccagtctacttgatgacttatacaagtatttcttcttccatcactcccacggagacaccatgactgtcatggatccaaagcagatgaatgttgctgctgctgtttgggctgttgtttcttatgttgttgcagacatggaagaaatgctgcctaggtcctagaaacagtaagaaagaaacgttttcatgcttctggccaggaatcctgggtctgcaactttggaaaactcctcttcacataacaatttcatccaattcatcttcaaagcacaactctatttcatgctttctgttattatctttcttgatactttccaaattctctgattctagaaaaaggaatcattctcccctccctcccaccacatagaatcaacatatggtagggattacagtgggggcatttctttatatcacctcttaaaaacattgtttccactttaaaagtaaacacttaataaattggtgatgcgagcaagtttctcctggttctctgcgacaaagaagtgaaactatgtgaaatgaa

SEQ ID NO: 326989 - DNA, 1971 bp, Homo sapiens
cgcctctcggccccgcggcctggccggcaagcagggctgcagtcacggggcggcgcggagggccccagcccagtcaggggtgtggccgccgccaccgtaaggctaggccgcgagcttagtcctgggagccgcctccgtcgccgccgtcagagccgccctatcagattatcttaacaagaaaaccaactggaaaaaaaaatgaaattccttatcttcgcatttttcggtggtgttcaccttttatccctgtgctctgggaaagctatatgcaagaatggcatctctaagaggacttttgaagaaataaaagaagaaatagccagctgtggagatgttgctaaagcaatcatcaacctagctgtttatggtaaagcccagaacagatcctatgagcgattggcacttctggttgatactgttggacccagactgagtggctccaagaacctagaaaaagccatccaaattatgtaccaaaacctgcagcaagatgggctggagaaagttcacctggagccagtgagaataccccactgggagaggggagaagaatcagctgtgatgctggagccaagaattcataagatagccatcctgggtcttggcagcagcattgggactcctccagaaggcattacagcagaagttctggtggtgacctctttcgatgaactgcagagaagggcctcagaagcaagagggaagattgttgtttataaccaaccttacatcaactactcaaggacggtgcaataccgaacgcagggggcggtggaagctgccaaggttggggctttggcatctctcattcgatccgtggcctccttctccatctacagtcctcacacaggtattcaggaataccaggatggcgtgcccaagattccaacagcctgtattacggtggaagatgcagaaatgatgtcaagaatggcttctcatgggatcaaaattgtcattcagctaaagatgggggcaaagacctacccagatactgattccttcaacactgtagcagagatcactgggagcaaatatccagaacaggttgtactggtcagtggacatctggacagctgggatgttgggcagggtgccatggatgatggcggtggagcctttatatcatgggaagcactctcacttattaaagatcttgggctgcgtccaaagaggactctgcggctggtgctctggactgcagaagaacaaggtggagttggtgccttccagtattatcagttacacaaggtaaatatttccaactacagtctggtgatggagtctgacgcaggaaccttcttacccactgggctgcaattcactggcagtgaaaaggccagggccatcatggaggaggttatgagcctgctgcagcccctcaatatcactcaggtcctgagccatggagaagggacagacatcaacttttggatccaagctggagtgcctggagccagtctacttgatgacttatacaagtatttcttcttccatcactcccacggagacaccatgactgtcatggatccaaagcagatgaatgttgctgctgctgtttgggctgttgtttcttatgttgttgcagacatggaagaaatgctgcctaggtcctagaaacagtaagaaagaaacgttttcatgcttctggccaggaatcctgggtctgcaactttggaaaactcctcttcacataacaatttcatccaattcatcttcaaagcacaactctatttcatgctttctgttattatctttcttgatactttccaaattctctgattctagaaaaaggaatcattctcccctccctcccaccacatagaatcaacatatggtagggattacagtgggggcatttctttatatcacctcttaaaaacattgtttccactttaaaagtaaacacttaataaattctgtgcgatgcggccgcccctttccccttgttcagctgcccccggtttgttg

SEQ ID NO: 326990 - DNA, 965 bp, Homo sapiens
gattcctgcggaacgactctcttaattatcaccgctacaggctgaaggaaggcaagggctgaaacggagacaggatgctactgcagtactccacgtgaaggctggtggtcgcttggactgagtcagaacagggaaactgatgggaagttgtcggagagaggatgagaaaaccagccaagaaaaatgagaaggatcatccagtaaagcataaaaagagccaagagtctgaggttccagaagccaaggcaagaatgcatttccaggagtaaacaaatgtcaagtgcagctccatcacaggtaaatatttccaactacagtctggtgatggagtctgacgcaggaaccttcttacccactgggctgcaattcactggcagtgaaaaggccagggccatcatggaggaggttatgagcctgctgcagcccctcaatatcactcaggtcctgagccatggagaagggacagacatcaacttttggatccaagctggagtgcctggagccagtctacttgatgacttatacaagtatttcttcttccatcactcccacggagacaccatgactgtcatggatccaaagcagatgaatgttgctgctgctgtttgggctgttgtttcttatgttgttgcagacatggaagaaatgctgcctaggtcctagaaacagtaagaaagaaacgttttcatgcttctggccaggaatcctgggtctgcaactttggaaaactcctcttcacataacaatttcatccaattcatcttcaaagcacaactctatttcatgctttctgttattatctttcttgatactttccaaattctctgattctagaaaaaggaatcattctcccctccctcccaccacatagaatcaacatatggtagggattacagtgggggcatttctttatatcacctcttaaaaacattgtttccactttaaaagtaaacacttaataaatt

SEQ ID NO: 326991 - DNA, 825 bp, Homo sapiens
gattcctgcggaacgactctcttaattatcaccgctacaggctgaaggaaggcaagggctgaaacggagacaggatgctactgcagtactccacgtgaaggctggtggtcgcttggactgagtcagaacagggaaactgatgggaagttgtcggagagtaaatatttccaactacagtctggtgatggagtctgacgcaggaaccttcttacccactgggctgcaattcactggcagtgaaaaggccagggccatcatggaggaggttatgagcctgctgcagcccctcaatatcactcaggtcctgagccatggagaagggacagacatcaacttttggatccaagctggagtgcctggagccagtctacttgatgacttatacaagtatttcttcttccatcactcccacggagacaccatgactgtcatggatccaaagcagatgaatgttgctgctgctgtttgggctgttgtttcttatgttgttgcagacatggaagaaatgctgcctaggtcctagaaacagtaagaaagaaacgttttcatgcttctggccaggaatcctgggtctgcaactttggaaaactcctcttcacataacaatttcatccaattcatcttcaaagcacaactctatttcatgctttctgttattatctttcttgatactttccaaattctctgattctagaaaaaggaatcattctcccctccctcccaccacatagaatcaacatatggtagggattacagtgggggcatttctttatatcacctcttaaaaacattgtttccactttaaaagtaaacacttaataaatt

SEQ ID NO: 326992 - DNA, 1078 bp, Homo sapiens
cgcctctcggccccgcggcctggccggcaagcagggctgcagtcacggggcggcgcggagggccccagcccagtcaggggtgtggccgccgccaccgtaaggctaggccgcgagcttagtcctgggagccgcctccgtcgccgccgtcagagccgccctatcagattatcttaacaagaaaaccaactggaaaaaaaaatgaaattccttatcttcgcatttttcggtggtgttcaccttttatccctgtgctctgggaaagctatatgcaagaatggcatctctaagaggacttttgaagaaataaaagaagaaatagccagctgtggagatgttgctaaagcaatcatcaacctagctgtttatggtaaagcccagaacagatcctatgagcgattggcacttctggttgatactgttggacccagactgagtggctccaagaacctagaaaaagccatccaaattatgtaccaaaacctgcagcaagatgggctggagaaagttcacctggagccagtgagaataccccactgggagaggggagaagaatcagctgtgatgctggagccaagaattcataagatagccatcctgggtcttggcagcagcattgggactcctccagaaggcattacagcagaagttctggtggtgacctctttcgatgaactgcagagaagggcctcagaagcaagagggaagattgttgtttataaccaaccttacatcaactactcaaggacggtgcaataccgaacgcagggggcggtggaagctgccaaggttggggctttggcatctctcattcgatccgtggcctccttctccatctacagtcctcacacaggtattcaggaataccaggatggcgtgcccaagattccaacagcctgtattacggtggaagatgcagaaatgatgtcaagaatggcttctcatgggatcaaaattgtcattcagctaaagatgggggcaaagacctacccagatactgattccttcaacactgtagcagagatcactgggagcaaatatccagaacaggttgtcggtgaactatgggtgcgagttcatc

SEQ ID NO: 326993 - DNA, 858 bp, Homo sapiens
gaaaaatgcattttagtttcctcagcattcacaatgtagaaccttccagagaagctttcttttctttctggcatctggataaatggaggaatagcacgaagcgattatcttaacaagaaaaccaactggaaaaaaaaatgaaattccttatcttcgcatttttcggtggtgttcaccttttatccctgtgctctgggaaagctatatgcaagaatggcatctctaagaggacttttgaagaaataaaagaagaaatagccagctgtggagatgttgctaaagcaatcatcaacctagctgtttatggtaaagcccagaacagatcctatgagcgattggcacttctggttgatactgttggacccagactgagtggctccaagaacctagaaaaagccatccaaattatgtaccaaaacctgcagcaagatgggctggagaaagttcacctggagccagtgagaataccccactgggagaggggagaagaatcagtgtttgggctgttgtttcttatgttgttgcagacatggaagaaatgctgcctaggtcctagaaacagtaagaaagaaacgttttcatgcttctggccaggaatcctgggtctgcaactttggaaaactcctcttcacataacaatttcatccaattcatcttcaaagcacaactctatttcatgctttctgttattatctttcttgatactttccaaattctctgattctagaaaaaggaatcattctcccctccctcccaccacatagaatcaacatatggtagggattacagtgggggcatttctttatatcacctcttaaaaacattgtttccactttaaaagtaaacacttaataaatt

SEQ ID NO: 326994 - DNA, 693 bp, Homo sapiens
gattcctgcggaacgactctcttaattatcaccgctacaggctgaaggaaggcaagggctgaaacggagacaggatgctactgcagtactccacgtgaaggctggtggtcgcttggactgagtcagaacagggaaactgatgggaagttgtcggagagaggatgagaaaaccagccaagaaaaatgagaaggatcatccagtaaagcataaaaagagccaagagtctgaggttccagaagccaaggcaagaatgcatttccaggagtaaacaaatgtcaagtgcagctccatcacaggtaaatatttccaactacagtctggtgatggagtctgacgcaggaaccttcttacccactgggctgcaattcactggcaaagacttcatgatgaagactccaaaagtaattgtaacaaaaacaaaaatcgacaagtgggacctaattaaagagttttgcacagtaaaagaaactatcaacagagtaaatagacaacctacagaatggaagaaaatatttgcaaactacgtatctgacaaaggtgtaatatctagaatctataaggaacttaagcaattcaacaaactaaaaacaaacaatcccattaaaaagtgggcaaaagacatgaacagacacttctcaaacgaagacagacaagcagccaacaaacatatgaaaaaatgctcaacatcatta

SEQ ID NO: 326995 - DNA, 1919 bp, Homo sapiens
cgcctctcggccccgcggcctggccggcaagcagggctgcagtcacggggcggcgcggagggccccagcccagtcaggggtgtggccgccgccaccgtaaggctaggccgcgagcttagtcctgggagccgcctccgtcgccgccgtcagagccgccctatcagattatcttaacaagaaaaccaactggaaaaaaaaatgaaattccttatcttcgcatttttcggtggtgttcaccttttatccctgtgctctgggaaagctatatgcaagaatggcatctctaagaggacttttgaagaaataaaagaagaaatagccagctgtggagatgttgctaaagcaatcatcaacctagctgtttatggtaaagcccagaacagatcctatgagcgattggcacttctggttgatactgttggacccagactgagtggctccaagaacctagaaaaagccatccaaattatgtaccaaaacctgcagcaagatgggctggagaaagttcacctggagccagtgagaataccccactgggagaggggagaagaatcagctgtgatgctggagccaagaattcataagatagccatcctgggtcttggcagcagcattgggactcctccagaaggcattacagcagaagttctggtggtgacctctttcgatgaactgcagagaagggcctcagaagcaagagggaagattgttgtttataaccaaccttacatcaactactcaaggacggtgcaataccgaacgcagggggcggtggaagctgccaaggttggggctttggcatctctcattcgatccgtggcctccttctccatctacagtcctcacacaggtattcaggaataccaggatggcgtgcccaagattccaacagcctgtattacggtggaagatgcagaaatgatgtcaagaatggcttctcatgggatcaaaattgtcattcagctaaagatgggggcaaagacctacccagatactgattccttcaacactgtagcagagatcactgggagcaaatatccagaacaggttgtactggtcagtggacatctggacagctgggatgttgggcagggtgccatggatgatggcggtggagcctttatatcatgggaagcactctcacttattaaagatcttgggctgcgtccaaagaggactctgcggctggtgctctggactgcagaagaacaaggtggagttggtgccttccagtattatcagttacacaaggtaaatatttccaactacagtctggtgatggagtctgacgcaggaaccttcttacccactgggctgcaattcactggcagtgaaaaggccagggccatcatggaggaggttatgagcctgctgcagcccctcaatatcactcaggtcctgagccatggagaagggacagacatcaacttttggatccaagctggagtgcctggagccagtctacttgatgacttatacaagtatttcttcttccatcactcccacggagacaccatgactgtcatggatccaaagcagatgaatgttgctgctgctgtttgggctgttgtttcttatgttgttgcagacatggaagaaatgctgcctaggtcctagaaacagtaagaaagaaacgttttcatgcttctggccaggaatcctgggtctgcaactttggaaaactcctcttcacataacaatttcatccaattcatcttcaaagcacaactctatttcatgctttctgttattatctttcttgatactttccaaattctctgattctagaaaaaggaatcattctcccctccctcccaccacatagaatcaacatatggtagggattacagtgggggcatttctttatatcacctcttaaaaacattgtttccactttaaaagtaaacacttaataaatt

SEQ ID NO: 326996 - DNA, 1858 bp, Homo sapiens
gaaaaatgcattttagtttcctcagcattcacaatgtagaaccttccagagaagctttcttttctttctggcatctggataaatggaggaatagcacgaagcgattatcttaacaagaaaaccaactggaaaaaaaaatgaaattccttatcttcgcatttttcggtggtgttcaccttttatccctgtgctctgggaaagctatatgcaagaatggcatctctaagaggacttttgaagaaataaaagaagaaatagccagctgtggagatgttgctaaagcaatcatcaacctagctgtttatggtaaagcccagaacagatcctatgagcgattggcacttctggttgatactgttggacccagactgagtggctccaagaacctagaaaaagccatccaaattatgtaccaaaacctgcagcaagatgggctggagaaagttcacctggagccagtgagaataccccactgggagaggggagaagaatcagctgtgatgctggagccaagaattcataagatagccatcctgggtcttggcagcagcattgggactcctccagaaggcattacagcagaagttctggtggtgacctctttcgatgaactgcagagaagggcctcagaagcaagagggaagattgttgtttataaccaaccttacatcaactactcaaggacggtgcaataccgaacgcagggggcggtggaagctgccaaggttggggctttggcatctctcattcgatccgtggcctccttctccatctacagtcctcacacaggtattcaggaataccaggatggcgtgcccaagattccaacagcctgtattacggtggaagatgcagaaatgatgtcaagaatggcttctcatgggatcaaaattgtcattcagctaaagatgggggcaaagacctacccagatactgattccttcaacactgtagcagagatcactgggagcaaatatccagaacaggttgtactggtcagtggacatctggacagctgggatgttgggcagggtgccatggatgatggcggtggagcctttatatcatgggaagcactctcacttattaaagatcttgggctgcgtccaaagaggactctgcggctggtgctctggactgcagaagaacaaggtggagttggtgccttccagtattatcagttacacaaggtaaatatttccaactacagtctggtgatggagtctgacgcaggaaccttcttacccactgggctgcaattcactggcagtgaaaaggccagggccatcatggaggaggttatgagcctgctgcagcccctcaatatcactcaggtcctgagccatggagaagggacagacatcaacttttggatccaagctggagtgcctggagccagtctacttgatgacttatacaagtatttcttcttccatcactcccacggagacaccatgactgtcatggatccaaagcagatgaatgttgctgctgctgtttgggctgttgtttcttatgttgttgcagacatggaagaaatgctgcctaggtcctagaaacagtaagaaagaaacgttttcatgcttctggccaggaatcctgggtctgcaactttggaaaactcctcttcacataacaatttcatccaattcatcttcaaagcacaactctatttcatgctttctgttattatctttcttgatactttccaaattctctgattctagaaaaaggaatcattctcccctccctcccaccacatagaatcaacatatggtagggattacagtgggggcatttctttatatcacctcttaaaaacattgtttccactttaaaagtaaacacttaataaatt

SEQ ID NO: 326997 - DNA, 1980 bp, Homo sapiens
  misc_feature (1943)..(1943): n is a, c, g, or t
cgcctctcggccccgcggcctggccggcaagcagggctgcagtcacggggcggcgcggagggccccagcccagtcaggggtgtggccgccgccaccgtaaggctaggccgcgagcttagtcctgggagccgcctccgtcgccgccgtcagagccgccctatcagattatcttaacaagaaaaccaactggaaaaaaaaatgaaattccttatcttcgcatttttcggtggtgttcaccttttatccctgtgctctgggaaagctatatgcaagaatggcatctctaagaggacttttgaagaaataaaagaagaaatagccagctgtggagatgttgctaaagcaatcatcaacctagctgtttatggtaaagcccagaacagatcctatgagcgattggcacttctggttgatactgttggacccagactgagtggctccaagaacctagaaaaagccatccaaattatgtaccaaaacctgcagcaagatgggctggagaaagttcacctggagccagtgagaataccccactgggagaggggagaagaatcagctgtgatgctggagccaagaattcataagatagccatcctgggtcttggcagcagcattgggactcctccagaaggcattacagcagaagttctggtggtgacctctttcgatgaactgcagagaagggcctcagaagcaagagggaagattgttgtttataaccaaccttacatcaactactcaaggacggtgcaataccgaacgcagggggcggtggaagctgccaaggttggggctttggcatctctcattcgatccgtggcctccttctccatctacagtcctcacacaggtattcaggaataccaggatggcgtgcccaagattccaacagcctgtattacggtggaagatgcagaaatgatgtcaagaatggcttctcatgggatcaaaattgtcattcagctaaagatgggggcaaagacctacccagatactgattccttcaacactgtagcagagatcactgggagcaaatatccagaacaggttgtactggtcagtggacatctggacagctgggatgttgggcagggtgccatggatgatggcggtggagcctttatatcatgggaagcactctcacttattaaagatcttgggctgcgtccaaagaggactctgcggctggtgctctggactgcagaagaacaaggtggagttggtgccttccagtattatcagttacacaaggtaaatatttccaactacagtctggtgatggagtctgacgcaggaaccttcttacccactgggctgcaattcactggcagtgaaaaggccagggccatcatggaggaggttatgagcctgctgcagcccctcaatatcactcaggtcctgagccatggagaagggacagacatcaacttttggatccaagctggagtgcctggagccagtctacttgatgacttatacaagtatttcttcttccatcactcccacggagacaccatgactgtcatggatccaaagcagatgaatgttgctgctgctgtttgggctgttgtttcttatgttgttgcagacatggaagaaatgctgcctaggtcctagaaacagtaagaaagaaacgttttcatgcttctggccaggaatcctgggtctgcaactttggaaaactcctcttcacataacaatttcatccaattcatcttcaaagcacaactctatttcatgctttctgttattatctttcttgatactttccaaattctctgattctagaaaaaggaatcattctcccctccctcccaccacatagaatcaacatatggtagggattacagtgggggcatttctttatatcacctcttaaaaacattgtttccactttaaaagtaaacacttaataaattagtagttaaacggccagcctctcnctttccctgctccgtcgtagattggagtgggaggtgt

SEQ ID NO: 326998 - DNA, 1861 bp, Homo sapiens
cgcctctcggccccgcggcctggccggcaagcagggctgcagtcacggggcggcgcggagggccccagcccagtcaggggtgtggccgccgccaccgtaaggctaggccgcgagcttagtcctgggagccgcctccgtcgccgccgtcagagccgccctatcagattatcttaacaagaaaaccaactggatgctctgggaaagctatatgcaagaatggcatctctaagaggacttttgaagaaataaaagaagaaatagccagctgtggagatgttgctaaagcaatcatcaacctagctgtttatggtaaagcccagaacagatcctatgagcgattggcacttctggttgatactgttggacccagactgagtggctccaagaacctagaaaaagccatccaaattatgtaccaaaacctgcagcaagatgggctggagaaagttcacctggagccagtgagaataccccactgggagaggggagaagaatcagctgtgatgctggagccaagaattcataagatagccatcctgggtcttggcagcagcattgggactcctccagaaggcattacagcagaagttctggtggtgacctctttcgatgaactgcagagaagggcctcagaagcaagagggaagattgttgtttataaccaaccttacatcaactactcaaggacggtgcaataccgaacgcagggggcggtggaagctgccaaggttggggctttggcatctctcattcgatccgtggcctccttctccatctacagtcctcacacaggtattcaggaataccaggatggcgtgcccaagattccaacagcctgtattacggtggaagatgcagaaatgatgtcaagaatggcttctcatgggatcaaaattgtcattcagctaaagatgggggcaaagacctacccagatactgattccttcaacactgtagcagagatcactgggagcaaatatccagaacaggttgtactggtcagtggacatctggacagctgggatgttgggcagggtgccatggatgatggcggtggagcctttatatcatgggaagcactctcacttattaaagatcttgggctgcgtccaaagaggactctgcggctggtgctctggactgcagaagaacaaggtggagttggtgccttccagtattatcagttacacaaggtaaatatttccaactacagtctggtgatggagtctgacgcaggaaccttcttacccactgggctgcaattcactggcagtgaaaaggccagggccatcatggaggaggttatgagcctgctgcagcccctcaatatcactcaggtcctgagccatggagaagggacagacatcaacttttggatccaagctggagtgcctggagccagtctacttgatgacttatacaagtatttcttcttccatcactcccacggagacaccatgactgtcatggatccaaagcagatgaatgttgctgctgctgtttgggctgttgtttcttatgttgttgcagacatggaagaaatgctgcctaggtcctagaaacagtaagaaagaaacgttttcatgcttctggccaggaatcctgggtctgcaactttggaaaactcctcttcacataacaatttcatccaattcatcttcaaagcacaactctatttcatgctttctgttattatctttcttgatactttccaaattctctgattctagaaaaaggaatcattctcccctccctcccaccacatagaatcaacatatggtagggattacagtgggggcatttctttatatcacctcttaaaaacattgtttccactttaaaagtaaacacttaataaatt

SEQ ID NO: 326999 - DNA, 791 bp, Homo sapiens
agaaaagggaaaagaaatgggcatgtttcagggctgcgtccaaagaggactctgcggctggtgctctggactgcagaagaacaaggtggagttggtgccttccagtattatcagttacacaaggtaaatatttccaactacagtctggtgatggagtctgacgcaggaaccttcttacccactgggctgcaattcactggcagtgaaaaggccagggccatcatggaggaggttatgagcctgctgcagcccctcaatatcactcaggtcctgagccatggagaagggacagacatcaacttttggatccaagctggagtgcctggagccagtctacttgatgacttatacaagtatttcttcttccatcactcccacggagacaccatgactgtcatggatccaaagcagatgaatgttgctgctgctgtttgggctgttgtttcttatgttgttgcagacatggaagaaatgctgcctaggtcctagaaacagtaagaaagaaacgttttcatgcttctggccaggaatcctgggtctgcaactttggaaaactcctcttcacataacaatttcatccaattcatcttcaaagcacaactctatttcatgctttctgttattatctttcttgatactttccaaattctctgattctagaaaaaggaatcattctcccctccctcccaccacatagaatcaacatatggtagggattacagtgggggcatttctttatatcacctcttaaaaacattgtttccactttaaaagtaaacacttaataaatt

SEQ ID NO: 327000 - DNA, 2173 bp, Homo sapiens
cgcctctcggccccgcggcctggccggcaagcagggctgcagtcacggggcggcgcggagggccccagcccagtcaggggtgtggccgccgccaccgtaaggctaggccgcgagcttagtcctgggagccgcctccgtcgccgccgtcagagccgccctatcagattatcttaacaagaaaaccaactggaaaaaaaaatgaaattccttatcttcgcatttttcggtggtgttcaccttttatccctgtgctctgggaaagctatatgcaagaatggcatctctaagaggacttttgaagaaataaaagaagaaatagccagctgtggagatgttgctaaagcaatcatcaacctagctgtttatggtaaagcccagaacagatcctatgagcgattggcacttctggttgatactgttggacccagactgagtggctccaagaacctagaaaaagccatccaaattatgtaccaaaacctgcagcaagatgggctggagaaagttcacctggagccagtgagaataccccactgggagaggggagaagaatcagctgtgatgctggagccaagaattcataagatagccatcctgggtcttggcagcagcattgggactcctccagaaggcattacagcagaagttctggtggtgacctctttcgatgaactgcagagaagggcctcagaagcaagagggaagattgttgtttataaccaaccttacatcaactactcaaggacggtgcaataccgaacgcagggggcggtggaagctgccaaggttggggctttggcatctctcattcgatccgtggcctccttctccatctacagtcctcacacaggtattcaggaataccaggatggcgtgcccaagattccaacagcctgtattacggtggaagatgcagaaatgatgtcaagaatggcttctcatgggatcaaaattgtcattcagctaaagatgggggcaaagacctacccagatactgattccttcaacactgtagcagagatcactgggagcaaatatccagaacaggttgtactggtcagtggacatctggacagctgggatgttgggcagggtgccatggatgatggcggtggagcctttatatcatgggaagcactctcacttattaaagatcttgggctgcgtccaaagaggactctgcggctggtgctctggactgcagaagaacaaggtggagttggtgccttccagtattatcagttacacaaggtaaatatttccaactacagtctggtgatggagtctgacgcaggaaccttcttacccactgggctgcaattcactggcagtgaaaaggccagggccatcatggaggaggttatgagcctgctgcagcccctcaatatcactcaggtcctgagccatggagaagggacagacatcaacttttggatccaagctggagtgcctggtacttctgcataactacccagtagagaaggatcctttcacaaaaggtgtgggaaaactatactacaagcctgcagtaaccaaaatggcatgttacgggtacaaaaacagacacataggccaatggaacaggttagagaagccagaaataaagccacacacctacaaccatctgatctttggcaaagccaacagtaaaaaacaatggggaaaggactcccaattcaataaatgctgctgggataactgactagccatatgcagaagattgaaactggactccttcctctcaccatacataaaaatcaacccaagattgattaaagacttaagtgtaaaacctaaaattataaaaatcctacaagaaaaccttggaaataacattctggacattggccctggcaaagacttcatgatgaagactccaaaagtaattgtaacaaaaacaaaaatcgacaagtgggacctaattaaagagttttgcacagtaaaagaaactatcaacagagtaaatagacaacctacagaatggaagaaaatatttgcaaactacgtatctgacaaaggtgtaatatctagaatctataaggaacttaagcaattcaacaaactaaaaacaaacaatcccattaaaaagtgggcaaaagacatgaacagacacttctcaaacgaagacagacaagcagccaacaaacatatgaaaaaatgctcaacatcatta

SEQ ID NO: 327001 - DNA, 856 bp, Homo sapiens
gattcctgcggaacgactctcttaattatcaccgctacaggctgaaggaaggcaagggctgaaacggagacaggatgctactgcagtactccacgtgaaggctggtggtcgcttggactgagtcagaacagggaaactgatgggaagttgtcggagagtaaatatttccaactacagtctggtgatggagtctgacgcaggaaccttcttacccactgggctgcaattcactggcagtgaaaaggccagggccatcatggaggaggttatgagcctgctgcagcccctcaatatcactcaggtcctgagccatggagaagggacagacatcaacttttggatccaagctggagtgcctggagccagtctacttgatgacttatacaagtatttcttcttccatcactcccacggagacaccatgactgtcatggatccaaagcagatgaatgttgctgctgctgtttgggctgttgtttcttatgttgttgcagacatggaagaaatgctgcctaggtcctagaaacagtaagaaagaaacgttttcatgcttctggccaggaatcctgggtctgcaactttggaaaactcctcttcacataacaatttcatccaattcatcttcaaagcacaactctatttcatgctttctgttattatctttcttgatactttccaaattctctgattctagaaaaaggaatcattctcccctccctcccaccacatagaatcaacatatggtagggattacagtgggggcatttctttatatcacctcttaaaaacattgtttccactttaaaagtaaacacttaataaatttttggaagatctctgatttttagtgtgttca

SEQ ID NO: 327002 - DNA, 146 bp, Homo sapiens
accttccaaacaaaagcagcagaaagcttacagaatacattagaaaacatataaaatcttatggttactgacttctaatatattttaaaataatgcagcatattttcacggtaaaaaaatggcgtaagtgcttgagtgattttctg

SEQ ID NO: 327003 - DNA, 253 bp, Homo sapiens
cggcacgagcaacgaatcaggaggttgcgcatgagaagggctgtgagagacggacagagaaagagtcctggagccgctaggccagctggggtaggggaatagggagtgggctcaagaggcaactgggcaggcctgattccttccctgctgagcaagctgatttcatgtaagtcttagcaccaacttacctctaacttcacttcaaaggtatccatagttcatcctgtcctgaaggaccggtccagcccagccc

SEQ ID NO: 327004 - DNA, 783 bp, Homo sapiens
gggaagttggacccaaagacacatacacacagagggaagacaatgtgaagacaaagagaagactgtcatgaaggcaaaaactgtggtgatgaatttacaagccaaggagtgccgaagattgccagcaaaccaccagcatctaggagagaggcacgaaatagattctccctcacagcgctcagaaggaagcaagtctcctgacaccttgaactcggccttctatccttcagaactgtgaggcaataaatgcctgttgtttaagatacctacttgggggtccttagttatggcagccctagtaaacgcacatactctgttttaattttatctttctgtctactttcttgtttacttacagtcatgtgtcacttaacaacctggatatgtcctgagaaatgcatcactagacaattttgtcattgtaggaacatcatagagcttactttcacaaaccaacatggtacggcctactacacacttaggctatatggtacagcctattgttccctaggccactaacctgtacagcatgttatgatactgaataccgtaggcagttgtaacacaatgatatttgtatatctaaacatctgtaaacatagaaagaatgctgtagaaatatggcataaaggataaaaaatgatacagtatatgggacatttatcacaaatggaacctgcaggactgggagttgctctgcaagaataaattattaagttctgagtgaatatgaaggcctaggacattgctgtacactactgcagactttatacatgctgttca

SEQ ID NO: 327005 - DNA, 483 bp, Homo sapiens
ttatcctttcagagatttattacacagttccttattaaaataaagttggttacaggtacttcacacattctaatgcttttcttttcatttatctcaacatgacctaaagaatgtctggctatactttctcaatgccttacatgcagtctttgattcctgtagcaaggctttaagtgagcagtactgcaggtaaagcaaaaatgtggtgagcaaagctgacaccaaagctagtggttaaatagctacaagctaacagacatataatcaatacctaaccccaccagcaacattaaagcaaatgaactagtattttctaaatacctagcatagtacctattatatgtattttactgtacactgcagttccttttacaaaatagacaacatatttagtctttttttgatttaaaaaaaaagggattctttgtctaccaggctttctaacataatgatacacaatcctgagtcaccctggacttaacc

SEQ ID NO: 327006 - DNA, 1646 bp, Homo sapiens
gcactccccagtggatggccgtgtatcaggagccggcccttttctggaaacaggccagcattcagtctccacagaggcaccataaacacgctggtggggccctgtactgtggtcaaagtcaaggcctccgggcaggactcgcggcccctccggctggcgggtggggttgacccgcacgtcccgccccgcctctccctccgcgctccggacgggcgacggtagctcgagacccgggactccgcccgcctccccgcgagtatttgaggtccggggcggctccggcgcctctgcccgccgttctgctcgctcgctccccgctctggagtacgtgtctggcttgggagccgctcggacacgctggcttgggtctgccatcatggatgttctcgcagaagcaaatggcacctttgccttaaaccttttgaaaacgctgggtaaagacaactcgaagaatgtgtttttctcacccatgagcatgtcctgtgccctggccatggtctacatgggggcaaagggaaacaccgctgcacagatggcccagatactttctttcaataaaagtggcggtggtggagacatccaccagggcttccagtctcttctcaccgaagtgaacaagactggcacgcagtacttgcttaggatggccaacaggctctttggggaaaagtcttgtgatttcctctcatcttttagagattcctgccaaaaattctaccaagcagagatggaggagcttgactttatcagcgccgtagagaagtccagaaaacacataaacacctgggtagctgaaaagacagaaggtaaaattgcggagttgctctctccgggctcagtggatccattgacaaggctggttctggtgaatgctgtctatttcagaggaaactgggatgaacagtttgacaaggagaacaccgaggagagactgtttaaagtcagcaagaatgaggagaaacctgtgcaaatgatgtttaagcaatctacttttaagaagacctatataggagaaatatttacccaaatcttggtgcttccatatgttggcaaggaactgaatatgatcatcatgcttccggacgagaccactgacttgagaacggtggagaaagaactcacttacgagaagttcgtagaatggacgaggctggacatgatggatgaagaggaggtggaagtgtccctcccgcggtttaaactagaggaaagctacgacatggagagtgtcctgcgcaacctgggcatgactgatgccttcgagctgggcaaggcagacttctctggaatgtcccagacagacctgtctctgtccaaggtcgtgcacaagtcttttgtggaggtcaatgaggaaggcacggaggctgcagccgccacagctgccatcatgatgatgcggtgtgccagattcgtcccccgcttctgcgccgaccaccccttccttttcttcatccagcacagcaagaccaacgggattctcttctgcggccgcttttcctctccgtgaggacagggcagtcttggtgtgcagcccctctcctctctgtcccctgacactccacagtgtgcctgcaacccaagtggccttatccgtgcagtggtggcagttcagaaataaagggcccatttgtgggatgccgcattca

SEQ ID NO: 327007 - DNA, 1752 bp, Homo sapiens
gaattcgggtctcgagcaggaagtaccaagggaggatggagatggtaataatcagggttgggtggagaatatctgaggaaactgcacttgatttgggccttgaagagtaattgactggatttagatttatctagaaaggtcgttcccagcagaagcaacaagaacaacaagcttggaggtctgccatcatggatgttctcgcagaagcaaatggcacctttgccttaaaccttttgaaaacgctgggtaaagacaactcgaagaatgtgtttttctcacccatgagcatgtcctgtgccctggccatggtctacatgggggcaaagggaaacaccgctgcacagatggcccagatactttctttcaataaaagtggcggtggtggagacatccaccagggcttccagtctcttctcaccgaagtgaacaagactggcacgcagtacttgcttaggatggccaacaggctctttggggaaaagtcttgtgatttcctctcatcttttagagattcctgccaaaaattctaccaagcagagatggaggagcttgactttatcagcgccgtagagaagtccagaaaacacataaacacctgggtagctgaaaagacagaaggtaaaattgcggagttgctctctccgggctcagtggatccattgacaaggctggttctggtgaatgctgtctatttcagaggaaactgggatgaacagtttgacaaggagaacaccgaggagagactgtttaaagtcagcaagaatgaggagaaacctgtgcaaatgatgtttaagcaatctacttttaagaagacctatataggagaaatatttacccaaatcttggtgcttccatatgttggcaaggaactgaatatgatcatcatgcttccggacgagaccactgacttgagaacggtggagaaagaactcacttacgagaagttcgtagaatggacgaggctggacatgatggatgaagaggaggtggaagtgtccctcccgcggtttaaactagaggaaagctacgacatggagagtgtcctgcgcaacctgggcatgactgatgccttcgagctgggcaaggcagacttctctggaatgtcccagacagacctgtctctgtccaaggtcgtgcacaagtcttttgtggaggtcaatgaggaaggcacggaggctgcagccgccacagctgccatcatgatgatgcggtgtgccagattcgtcccccgcttctgcgccgaccaccccttccttttcttcatccagcacagcaagaccaacgggattctcttctgcggccgcttttcctctccgtgaggacagggcagtcttggtgtgcagcccctctcctctctgtcccctgacactccacagtgtgcctgcaacccaagtggccttatccgtgcagtggtggcagttcagaaataaagggcccatttgtgggatgccgcattcaaaaaacaacacacacaacaacaagcaaaaaaaccgggacatagggggggaaaaaatataagggccagcgtgtaacacggtcgctacacccttttttcacaggggaaacggggcgcccaaagggggaatatacacatggtacatagtttacagagagtacattttgtatatctatactaatgacccaattaccattctggagtaacacatgcttcttcacctagagcacatcatctcatgtgcaatcggatagactctctcatatgtgtctgtacttctggttataccgatcgcg

SEQ ID NO: 327008 - DNA, 1964 bp, Homo sapiens
ccatggattcgtggctaaactgcacatgtttattttctcagagttctgaggttggaggttggaaatgggttccgcagggccaggctcctccagaggatcctccttgcctttccagctactgcagctgtggtccttgcgtttcttggcttgaggcccttcatcttcaaggccagtggagtggcattttgctttattctttgcattgctttttcccgtgagatctccccctccctccctcttagaaggatacctgtgattacatttagggtcaactggaacaatccaggataatctcccatctcaagagcctgaatctaatcgtgctgcacagtcccttttgccatgtaaggggcattcacaggtcccagggattatgacccaggtatctttggagcacttgctcagccaaccccagctccaaatgtaaaggcatgcacagtggagagccgcttaattcagcatctcctcacagggcctccagtaggcacctccttccctctcccatctgctccaggaaatgtctgctccagcttctccccttccttgttccgtgggttcccactcactgctcaagtgagtcactgggactgtcttagaatgctggcattctctgactgggacatattcatttggtaaacatctgagaactgtgtcagagcaggcaggccccgcatccctgcattcctgcatcccctccttcccagcctgactgcctgtggggcccttagctgccccttgtcctctcacctgattctgcagattcttcttcttgagcagcagctcagaaagcgcatccgccctgcgtttcaagcccagctacttcttagcttcacttccgtcaacttcaccttccctgtagtgcagtggggcattgatggtaggtctctctaagggcttggtggactttaacatgtgattctgtgattccgacttgcctgaagataccccagctcccccctcccgactatccagctgcattcctgctctggaccctgctggggctgccacacccactgcacggcagggctagagagatgtgcagcctgaccctacccctgagcctgtctgtgaaggtggagatgggcatgcacccacagcccatgaggcaaggtggtgtcctgagtgtgctgtgagttcaggcgcaggaaggcctggcttgttgcagcaggatgtccccaagcgtggtccaaaattggggctttgccacctgcagggatttcctagaaggagatccaagggtcaggaggcatttgaaaggctttcacgcatctttgtatgtggcttgattgatccttttttaaggctcttgctacccagaaatgggattctctctctcattataaaaacatttggccatcttttcttgtgtaactgtcagtgaatgtatcattttgaatatttttcaaattaaaacagtacatttaagcccgcaaaacacaccaaagaatacaaacatagaagcaaaagccagtgccccttctgtaattccaccccaaggaagagactccaggaaagggtgcctccttcccactttctccacgtgcgggcaggcgtgcagggaggagtcctcacaaaacagggcggcgtttcacatagaactctttcattttccacacttaacattagaaacacacaaaataatgtggagggtcctaaaaagaaacagccagagttctgtgtgtgtttctgcttgcccactgaaccacagcatcggcggtgactgtcggtaaggcgcgtgagatgcagtcgcgtggaagctgtgcttaagtgatactgattttaaatcttgttccaggtctgccatcatggatgttctcgcagaagcaaatggcacctttgccttaaaccttttgaaaacgctgggccatctgtgcagcggtgtttccctttgcccccatgtagaccatggccagggcacaggacatgctcatgggtgagaaaaacacattcttcgagttctgatc

SEQ ID NO: 327009 - DNA, 731 bp, Homo sapiens
cttagctatcttatttactgaagctaaagaagtaggtccttaaaaagccattgacaggtcttgagtttgcaacgtgactgtgaaacaggcatccttgttactcacacgtttgctgaaaggataacagaaagccctcgatagaaaaatctcactagattgtttataatttgttgatatttggagtatcttgagtggtaaactttaaatgtggatttattttttctttccttttaggatttggatctctccaatcttttttatgattaattgttcagtgtttatgcattattgcgaagtgataatgaaaatgctcaaactcagggtcctgcaggcactgtgggggaggcagtggggacgtgaggggattacagatccagtagaagccccccgacccccatctgcttccaccccatctccttccagaacaccaccgatagccacaccgaagagttctcccatttgctggttcccggacaaaaaagctgctgatcccttgagcacactgcagtgaagctcccagctgacatgtcctgtccatgtaaacagaacttcctccattctgcttctcagactctattccgacaccctccaacatggaggaaacgcaacagaaatccaatctagagctgctccgaatctccctgctgctcatcgagtcgtggctggagcccgtggggtcctcaggagtatttcgcaacaactgtggttgaactcggcaggatgatatactc

SEQ ID NO: 327010 - DNA, 1604 bp, Homo sapiens
gcactccccagtggatggccgtgtatcaggagccggcccttttctggaaacaggccagcattcagtctccacagaggcaccataaacacgctggtggggccctgtactgtggtcaaagtcaaggcctccgggcaggactcgcggcccctccggctggcgggtggggttgacccgcacgtcccgccccgcctctccctccgcgctccggacgggcgacggtagctcgagacccgggactccgcccgcctccccgcgagtatttgaggtccggggcggctccggcgcctctgcccgccgttctgctcgctcgctccccgctctggagtctgccatcatggatgttctcgcagaagcaaatggcacctttgccttaaaccttttgaaaacgctgggtaaagacaactcgaagaatgtgtttttctcacccatgagcatgtcctgtgccctggccatggtctacatgggggcaaagggaaacaccgctgcacagatggcccagatactttctttcaataaaagtggcggtggtggagacatccaccagggcttccagtctcttctcaccgaagtgaacaagactggcacgcagtacttgcttaggatggccaacaggctctttggggaaaagtcttgtgatttcctctcatcttttagagattcctgccaaaaattctaccaagcagagatggaggagcttgactttatcagcgccgtagagaagtccagaaaacacataaacacctgggtagctgaaaagacagaaggtaaaattgcggagttgctctctccgggctcagtggatccattgacaaggctggttctggtgaatgctgtctatttcagaggaaactgggatgaacagtttgacaaggagaacaccgaggagagactgtttaaagtcagcaagaatgaggagaaacctgtgcaaatgatgtttaagcaatctacttttaagaagacctatataggagaaatatttacccaaatcttggtgcttccatatgttggcaaggaactgaatatgatcatcatgcttccggacgagaccactgacttgagaacggtggagaaagaactcacttacgagaagttcgtagaatggacgaggctggacatgatggatgaagaggaggtggaagtgtccctcccgcggtttaaactagaggaaagctacgacatggagagtgtcctgcgcaacctgggcatgactgatgccttcgagctgggcaaggcagacttctctggaatgtcccagacagacctgtctctgtccaaggtcgtgcacaagtcttttgtggaggtcaatgaggaaggcacggaggctgcagccgccacagctgccatcatgatgatgcggtgtgccagattcgtcccccgcttctgcgccgaccaccccttccttttcttcatccagcacagcaagaccaacgggattctcttctgcggccgcttttcctctccgtgaggacagggcagtcttggtgtgcagcccctctcctctctgtcccctgacactccacagtgtgcctgcaacccaagtggccttatccgtgcagtggtggcagttcagaaataaagggcccatttgtgggatgccgcattca

SEQ ID NO: 327011 - DNA, 1889 bp, Homo sapiens
gcactccccagtggatggccgtgtatcaggagccggcccttttctggaaacaggccagcattcagtctccacagaggcaccataaacacgctggtggggccctgtactgtggtcaaagtcaaggcctccgggcaggactcgcggcccctccggctggcgggtggggttgacccgcacgtcccgccccgcctctccctccgcgctccggacgggcgacggtagctcgagacccgggactccgcccgcctccccgcgagtatttgaggtccggggcggctccggcgcctctgcccgccgttctgctcgctcgctccccgctctggagtacgtgtctggcttgggagccgctcggacacgctggcttgggtttgtcgctccaaagtcgggaaagccgggggcgcgagcggggaggggggcagggtgggggtcgcgcggggccgggaacgcgcgtgggtcgacggcgcgcggggacgctggagccccgagaatggggcgtggccgcgcggggctgtgaccccagcagtcccagcggggcgggggcccgggcgagcgtccggcttgggttcccttccggagcctcgcagcggcagagaacggcgacgcggccgggtctgccatcatggatgttctcgcagaagcaaatggcacctttgccttaaaccttttgaaaacgctgggtaaagacaactcgaagaatgtgtttttctcacccatgagcatgtcctgtgccctggccatggtctacatgggggcaaagggaaacaccgctgcacagatggcccagatactttctttcaataaaagtggcggtggtggagacatccaccagggcttccagtctcttctcaccgaagtgaacaagactggcacgcagtacttgcttaggatggccaacaggctctttggggaaaagtcttgtgatttcctctcatcttttagagattcctgccaaaaattctaccaagcagagatggaggagcttgactttatcagcgccgtagagaagtccagaaaacacataaacacctgggtagctgaaaagacagaaggtaaaattgcggagttgctctctccgggctcagtggatccattgacaaggctggttctggtgaatgctgtctatttcagaggaaactgggatgaacagtttgacaaggagaacaccgaggagagactgtttaaagtcagcaagaatgaggagaaacctgtgcaaatgatgtttaagcaatctacttttaagaagacctatataggagaaatatttacccaaatcttggtgcttccatatgttggcaaggaactgaatatgatcatcatgcttccggacgagaccactgacttgagaacggtggagaaagaactcacttacgagaagttcgtagaatggacgaggctggacatgatggatgaagaggaggtggaagtgtccctcccgcggtttaaactagaggaaagctacgacatggagagtgtcctgcgcaacctgggcatgactgatgccttcgagctgggcaaggcagacttctctggaatgtcccagacagacctgtctctgtccaaggtcgtgcacaagtcttttgtggaggtcaatgaggaaggcacggaggctgcagccgccacagctgccatcatgatgatgcggtgtgccagattcgtcccccgcttctgcgccgaccaccccttccttttcttcatccagcacagcaagaccaacgggattctcttctgcggccgcttttcctctccgtgaggacagggcagtcttggtgtgcagcccctctcctctctgtcccctgacactccacagtgtgcctgcaacccaagtggccttatccgtgcagtggtggcagttcagaaataaagggcccatttgtgggatgccgcattca

SEQ ID NO: 327012 - DNA, 1318 bp, Homo sapiens
  misc_feature (1)..(1): n is a, c, g, or t
  misc_feature (23)..(23): n is a, c, g, or t
  misc_feature (25)..(25): n is a, c, g, or t
  misc_feature (30)..(30): n is a, c, g, or t
ntcgtatcggcatcgactctctncntaacnaccgacaggtctgccatcatggatgttctcgcagaagcaaatggcacctttgccttaaaccttttgaaaacgctgggtaaagacaactcgaagaatgtgtttttctcacccatgagcatgtcctgtgccctggccatggtctacatgggggcaaagggaaacaccgctgcacagatggcccagatactttctttcaataaaagtggcggtggtggagacatccaccagggcttccagtctcttctcaccgaagtgaacaagactggcacgcagtacttgcttaggatggccaacaggctctttggggaaaagtcttgtgatttcctctcatcttttagagattcctgccaaaaattctaccaagcagagatggaggagcttgactttatcagcgccgtagagaagtccagaaaacacataaacacctgggtagctgaaaagacagaaggtaaaattgcggagttgctctctccgggctcagtggatccattgacaaggctggttctggtgaatgctgtctatttcagaggaaactgggatgaacagtttgacaaggagaacaccgaggagagactgtttaaagtcagcaagaatgaggagaaacctgtgcaaatgatgtttaagcaatctacttttaagaagacctatataggagaaatatttacccaaatcttggtgcttccatatgttggcaaggaactgaatatgatcatcatgcttccggacgagaccactgacttgagaacggtggagaaagaactcacttacgagaagttcgtagaatggacgaggctggacatgatggatgaagaggaggtggaagtgtccctcccgcggtttaaactagaggaaagctacgacatggagagtgtcctgcgcaacctgggcatgactgatgccttcgagctgggcaaggcagacttctctggaatgtcccagacagacctgtctctgtccaaggtcgtgcacaagtcttttgtggaggtcaatgaggaaggcacggaggctgcagccgccacagctgccatcatgatgatgcggtgtgccagattcgtcccccgcttctgcgccgaccaccccttccttttcttcatccagcacagcaagaccaacgggattctcttctgcggccgcttttcctctccgtgaggacagggcagtcttggtgtgcagcccctctcctctctgtcccctgacactccacagtgtgcctgcaacccaagtggccttatccgtgcagtggtggcagttcagaaataaagggcccatttgtgggatgccgcattca

SEQ ID NO: 327013 - DNA, 1325 bp, Homo sapiens
cagccgtcattctgccattgttgccctgggttctctggagacatggtctgccatcatggatgttctcgcagaagcaaatggcacctttgccttaaaccttttgaaaacgctgggtaaagacaactcgaagaatgtgtttttctcacccatgagcatgtcctgtgccctggccatggtctacatgggggcaaagggaaacaccgctgcacagatggcccagatactttctttcaataaaagtggcggtggtggagacatccaccagggcttccagtctcttctcaccgaagtgaacaagactggcacgcagtacttgcttaggatggccaacaggctctttggggaaaagtcttgtgatttcctctcatcttttagagattcctgccaaaaattctaccaagcagagatggaggagcttgactttatcagcgccgtagagaagtccagaaaacacataaacacctgggtagctgaaaagacagaaggtaaaattgcggagttgctctctccgggctcagtggatccattgacaaggctggttctggtgaatgctgtctatttcagaggaaactgggatgaacagtttgacaaggagaacaccgaggagagactgtttaaagtcagcaagaatgaggagaaacctgtgcaaatgatgtttaagcaatctacttttaagaagacctatataggagaaatatttacccaaatcttggtgcttccatatgttggcaaggaactgaatatgatcatcatgcttccggacgagaccactgacttgagaacggtggagaaagaactcacttacgagaagttcgtagaatggacgaggctggacatgatggatgaagaggaggtggaagtgtccctcccgcggtttaaactagaggaaagctacgacatggagagtgtcctgcgcaacctgggcatgactgatgccttcgagctgggcaaggcagacttctctggaatgtcccagacagacctgtctctgtccaaggtcgtgcacaagtcttttgtggaggtcaatgaggaaggcacggaggctgcagccgccacagctgccatcatgatgatgcggtgtgccagattcgtcccccgcttctgcgccgaccaccccttccttttcttcatccagcacagcaagaccaacgggattctcttctgcggccgcttttcctctccgtgaggacagggcagtcttggtgtgcagcccctctcctctctgtcccctgacactccacagtgtgcctgcaacccaagtggccttatccgtgcagtggtggcagttcagaaataaagggcccatttgtgggatgccgcattca

SEQ ID NO: 327014 - DNA, 2576 bp, Homo sapiens
gcactccccagtggatggccgtgtatcaggagccggcccttttctggaaacaggccagcattcagtctccacagaggcaccataaacacgctggtggggccctgtactgtggtcaaagtcaaggcctccgggcaggactcgcggcccctccggctggcgggtggggttgacccgcacgtcccgccccgcctctccctccgcgctccggacgggcgacggtagctcgagacccgggactccgcccgcctccccgcgagtatttgaggtccggggcggctccggcgcctctgcccgccgttctgctcgctcgctccccgctctggagtacgtgtctggcttgggagccgctcggacacgctggcttgggtttgtcgctccaaagtcgggaaagccgggggcgcgagcggggaggggggcagggtgggggtcgcgcggggccgggaacgcgcgtgggtcgacggcgcgcggggacgctggagccccgagaatggggcgtggccgcgcggggctgtgaccccagcagtcccagcggggcgggggcccgggcgagcgtccggcttgggttcccttccggagcctcgcagcggcagagaacggcgacgcggccgggtgagtcgtgcgtggccgcgagcccggccggtgacgccgcggacccgaggaccccgggcgcccaggcccagcgcccacggaagaggcggccggcgcgggatgggggcggcgcagagcctcccgggccacaggtgaccccggtcggccccgcggcctcggtgacccctcgcccgctccgcgacccggaggacgcgtgctcagtcttggggcgccgggtgttaggagccgggcgggaggcggagagaggccgaggggttcggcgccaaacggtgccatccgggccccctgcgtgtgttcactggactggccgtgctgggcttggccaatccgcagcactttcaggtcgcccagacctgtggagacgatcgtgtggaccagcccggatctccttaccgctctgtgtttgaattaaactccctacaggcaaactattacaggctttgatgtcttcaaggcaaagaggaaactttaactacaaattggcatttaagttattttcttccttttttttttttttttttttgtcctaaagattggcttgggaaaactgagaacaccaccgatagccacaccgaagagttctcccatttgctggttcccggacaaaaaagctgctgatcccttgagcacactgcagtgaagctcccagctgacatgtcctgtccatgtaaacagaacttcctccatgtctgccatcatggatgttctcgcagaagcaaatggcacctttgccttaaaccttttgaaaacgctgggtaaagacaactcgaagaatgtgtttttctcacccatgagcatgtcctgtgccctggccatggtctacatgggggcaaagggaaacaccgctgcacagatggcccagatactttctttcaataaaagtggcggtggtggagacatccaccagggcttccagtctcttctcaccgaagtgaacaagactggcacgcagtacttgcttaggatggccaacaggctctttggggaaaagtcttgtgatttcctctcatcttttagagattcctgccaaaaattctaccaagcagagatggaggagcttgactttatcagcgccgtagagaagtccagaaaacacataaacacctgggtagctgaaaagacagaaggtaaaattgcggagttgctctctccgggctcagtggatccattgacaaggctggttctggtgaatgctgtctatttcagaggaaactgggatgaacagtttgacaaggagaacaccgaggagagactgtttaaagtcagcaagaatgaggagaaacctgtgcaaatgatgtttaagcaatctacttttaagaagacctatataggagaaatatttacccaaatcttggtgcttccatatgttggcaaggaactgaatatgatcatcatgcttccggacgagaccactgacttgagaacggtggagaaagaactcacttacgagaagttcgtagaatggacgaggctggacatgatggatgaagaggaggtggaagtgtccctcccgcggtttaaactagaggaaagctacgacatggagagtgtcctgcgcaacctgggcatgactgatgccttcgagctgggcaaggcagacttctctggaatgtcccagacagacctgtctctgtccaaggtcgtgcacaagtcttttgtggaggtcaatgaggaaggcacggaggctgcagccgccacagctgccatcatgatgatgcggtgtgccagattcgtcccccgcttctgcgccgaccaccccttccttttcttcatccagcacagcaagaccaacgggattctcttctgcggccgcttttcctctccgtgaggacagggcagtcttggtgtgcagcccctctcctctctgtcccctgacactccacagtgtgcctgcaacccaagtggccttatccgtgcagtggtggcagttcagaaataaagggcccatttgtgggatgccgcattca

SEQ ID NO: 327015 - DNA, 1637 bp, Homo sapiens
gcactccccagtggatggccgtgtatcaggagccggcccttttctggaaacaggccagcattcagtctccacagaggcaccataaacacgctggtggggccctgtactgtggtcaaagtcaaggcctccgggcaggactcgcggcccctccggctggcgggtggggttgacccgcacgtcccgccccgcctctccctccgcgctccggacgggcgacggtagctcgagacccgggactccgcccgcctccccgcgagtatttgaggtccggggcggctccggcgcctctgcccgccgttctgctcgctcgctccccgctctggagtctgccatcatggatgttctcgcagaagcaaatggcacctttgccttaaaccttttgaaaacgctgggtaaagacaactcgaagaatgtgtttttctcacccatgagcatgtcctgtgccctggccatggtctacatgggggcaaagggaaacaccgctgcacagatggcccagatactttctttcaataaaagtggcggtggtggagacatccaccagggcttccagtctcttctcaccgaagtgaacaagactggcacgcagtacttgcttaggatggccaacaggctctttggggaaaagtcttgtgatttcctctcatcttttagagattcctgccaaaaattctaccaagcagagatggaggagcttgactttatcagcgccgtagagaagtccagaaaacacataaacacctgggtagctgaaaagacagaaggtaaaattgcggagttgctctctccgggctcagtggatccattgacaaggctggttctggtgaatgctgtctatttcagaggaaactgggatgaacagtttgacaaggagaacaccgaggagagactgtttaaagtcagcaagaatgaggagaaacctgtgcaaatgatgtttaagcaatctacttttaagaagacctatataggagaaatatttacccaaatcttggtgcttccatatgttggcaaggaactgaatatgatcatcatgcttccggacgagaccactgacttgagaacggtggagaaagaactcacttacgagaagttcgtagaatggacgaggctggacatgatggatgaagaggaggtggaagtgtccctcccgcggtttaaactagaggaaagctacgacatggagagtgtcctgcgcaacctgggcatgactgatgccttcgagctgggcaaggcagacttctctggaatgtcccagacagacctgtctctgtccaaggtcgtgcacaagtcttttgtggaggtcaatgaggaaggcacggaggctgcagccgccacagctgccatcatgatgatgcggtgtgccagattcgtcccccgcttctgcgccgaccaccccttccttttcttcatccagcacagcaagaccaacgggattctcttctgcggccgcttttcctctccgtgaggacagggcagtcttggtgtgcagcccctctcctctctgtcccctgacactccacagtgtgcctgcaacccaagtggccttatccgtgcagtggtggcagttcagaaataaagggcccatttgtgggatgccgcattcaaaaaaaaaaaaaaaaaaaaaaaaaaaaatttgt

SEQ ID NO: 327016 - DNA, 1597 bp, Homo sapiens
  misc_feature (1551)..(1551): n is a, c, g, or t
gcactccccagtggatggccgtgtatcaggagccggcccttttctggaaacaggccagcattcagtctccacagaggcaccataaacacgctggtggggccctgtactgtggtcaaagtcaaggcctccgggcaggactcgcggcccctccggctggcgggtggggttgacccgcacgtcccgccccgcctctccctccgcgctccggacgggcgacggtagctcgagacccgggactccgcccgcctccccgcgagtatttgaggtccggggcggctccggcgcctctgcccgccgttctgctcgctcgctccccgctctggagtctgccatcatggatgttctcgcagaagcaaatggcacctttgccttaaaccttttgaaaacgctgggtaaagacaactcgaagaatgtgtttttctcacccatgagcatgtcctgtgccctggccatggtctacatgggggcaaagggaaacaccgctgcacagatggcccagatactttctttcaataaaagtggcggtggtggagacatccaccagggcttccagtctcttctcaccgaagtgaacaagactggcacgcagtacttgcttaggatggccaacaggctctttggggaaaagtcttgtgatttcctctcatcttttagagattcctgccaaaaattctaccaagcagagatggaggagcttgactttatcagcgccgtagagaagtccagaaaacacataaacacctgggtagctgaaaagacagaaggtaaaattgcggagttgctctctccgggctcagtggatccattgacaaggctggttctggtgaatgctgtctatttcagaggaaactgggatgaacagtttgacaaggagaacaccgaggagagactgtttaaagtcagcaagaatgaggagaaacctgtgcaaatgatgtttaagcaatctacttttaagaagacctatataggagaaatatttacccaaatcttggtgcttccatatgttggcaaggaactgaatatgatcatcatgcttccggacgagaccactgacttgagaacggtggagaaagaactcacttacgagaagttcgtagaatggacgaggctggacatgatggatgaagaggaggtggaagtgtccctcccgcggtttaaactagaggaaagctacgacatggagagtgtcctgcgcaacctgggcatgactgatgccttcgagctgggcaaggcagacttctctggaatgtcccagacagacctgtctctgtccaaggtcgtgcacaagtcttttgtggaggtcaatgaggaaggcacggaggctgcagccgccacagctgccatcatgatgatgcggtgtgccagattcgtcccccgcttctgcgccgaccaccccttccttttcttcatccagcacagcaagaccaacgggattctcttctgcggccgcttttcctctccgtgaggacagggcagtcttggtgtgcagcccctctcctctctgtcccctgacactccacagtgtgcctgcaacccaccggccttaaaatncagacgcagacagcagaggcagacaagcataggcagacaacatacc

SEQ ID NO: 327017 - DNA, 1223 bp, Homo sapiens
ggagtctcactctgtcgccaggctagagtgcagtggcacgatctcagctcactgcaacctccgcctcccgggttcaagcgattctctttcctcagcttcccgagtagctgggttacagatactttctttcaataaaagtggcggtggtggagacatccaccagggcttccagtctcttctcaccgaagtgaacaagactggcacgcagtacttgcttaggatggccaacaggctctttggggaaaagtcttgtgatttcctctcatcttttagagattcctgccaaaaattctaccaagcagagatggaggagcttgactttatcagcgccgtagagaagtccagaaaacacataaacacctgggtagctgaaaagacagaaggtaaaattgcggagttgctctctccgggctcagtggatccattgacaaggctggttctggtgaatgctgtctatttcagaggaaactgggatgaacagtttgacaaggagaacaccgaggagagactgtttaaagtcagcaagaatgaggagaaacctgtgcaaatgatgtttaagcaatctacttttaagaagacctatataggagaaatatttacccaaatcttggtgcttccatatgttggcaaggaactgaatatgatcatcatgcttccggacgagaccactgacttgagaacggtggagaaagaactcacttacgagaagttcgtagaatggacgaggctggacatgatggatgaagaggaggtggaagtgtccctcccgcggtttaaactagaggaaagctacgacatggagagtgtcctgcgcaacctgggcatgactgatgccttcgagctgggcaaggcagacttctctggaatgtcccagacagacctgtctctgtccaaggtcgtgcacaagtcttttgtggaggtcaatgaggaaggcacggaggctgcagccgccacagctgccatcatgatgatgcggtgtgccagattcgtcccccgcttctgcgccgaccaccccttccttttcttcatccagcacagcaagaccaacgggattctcttctgcggccgcttttcctctccgtgaggacagggcagtcttggtgtgcagcccctctcctctctgtcccctgacactccacagtgtgcctgcaacccaagtggccttatccgtgcagtggtggcagttcagaaataaagggcccatttgtgggatgccgcattca

SEQ ID NO: 327018 - DNA, 1189 bp, Homo sapiens
tgggattacaagtgtaagccacagtacctgaccttgacttagtttttaagctaggattaaatatagctaaagctaggaagttgtagtttaggttaagtcctcatatttatttgtaaattatgtatgtcaatcataaaattatagattttctgacttggtgcaatgaagaagtaggccgttggtgttcatcatttttgtagccaggcagttatgtcactctgtctatcctagtcttttagagattcctgccaaaaattctaccaagcagagatggaggagcttgactttatcagcgccgtagagaagtccagaaaacacataaacacctgggtagctgaaaagacagaaggtaaaattgcggagttgctctctccgggctcagtggatccattgacaaggctggttctggtgaatgctgtctatttcagaggaaactgggatgaacagtttgacaaggagaacaccgaggagagactgtttaaagtcagcaagaatgaggagaaacctgtgcaaatgatgtttaagcaatctacttttaagaagacctatataggagaaatatttacccaaatcttggtgcttccatatgttggcaaggaactgaatatgatcatcatgcttccggacgagaccactgacttgagaacggtggagaaagaactcacttacgagaagttcgtagaatggacgaggctggacatgatggatgaagaggaggtggaagtgtccctcccgcggtttaaactagaggaaagctacgacatggagagtgtcctgcgcaacctgggcatgactgatgccttcgagctgggcaaggcagacttctctggaatgtcccagacagacctgtctctgtccaaggtcgtgcacaagtcttttgtggaggtcaatgaggaaggcacggaggctgcagccgccacagctgccatcatgatgatgcggtgtgccagattcgtcccccgcttctgcgccgaccaccccttccttttcttcatccagcacagcaagaccaacgggattctcttctgcggccgcttttcctctccgtgaggacagggcagtcttggtgtgcagcccctctcctctctgtcccctgacactccacagtgtgcctgcaacccaagtggccttatccgtgcagtggtggcagttcagaaataaagggcccatttgtgggatgccgcattca

SEQ ID NO: 327019 - DNA, 1515 bp, Homo sapiens
gcactccccagtggatggccgtgtatcaggagccggcccttttctggaaacaggccagcattcagtctccacagaggcaccataaacacgctggtggggccctgtactgtggtcaaagtcaaggcctccgggcaggactcgcggcccctccggctggcgggtggggttgacccgcacgtcccgccccgcctctccctccgcgctccggacgggcgacggtagctcgagacccgggactccgcccgcctccccgcgagtatttgaggtccggggcggctccggcgcctctgcccgccgttctgctcgctcgctccccgctctggagtctgccatcatggatgttctcgcagaagcaaatggcacctttgccttaaaccttttgaaaacgctgggtaaagacaactcgaagaatgtgtttttctcacccatgagcatgtcctgtgccctggccatggtctacatgggggcaaagggaaacaccgctgcacagatggcccagatactttctttcaataaaagtggcggtggtggagacatccaccagggcttccagtctcttctcaccgaagtgaacaagactggcacgcagtacttgcttaggatggccaacaggctctttggggaaaagtcttgtgatttcctctcatcttttagagattcctgccaaaaattctaccaagcagagatggaggagcttgactttatcagcgccgtagagaagtccagaaaacacataaacacctgggtagctgaaaagacagaaggtaaaattgcggagttgctctctccgggctcagtggatccattgacaaggctggttctggtgaatgctgtctatttcagaggaaactgggatgaacagtttgacaaggagaacaccgaggagagactgtttaaagtcagcaagaatgaggagaaacctgtgcaaatgatgtttaagcaatctacttttaagaagacctatataggagaaatatttacccaaatcttggtgcttccatatgttggcaaggaactgaatatgatcatcatgcttccggacgagaccactgacttgagaacggtggagaaagaactcacttacgagaagttcgtagaatggacgaggctggacatgatggatgaagaggaggtggaagtgtccctcccgcggtttaaactagaggaaagctacgacatggagagtgtcctgcgcaacctgggcatgactgatgccttcgagctgggcaaggcagacttctctggaatgtcccagacagacctgtctctgtccaaggtcgtgcacaagtcttttgtggaggtcaatgaggaaggcacggaggctgcagccgccacagctgccatcatgatgatgcggtgtgccagattcgtcccccgcttctgcgccgaccaccccttcctttttctcctctctgtcccctgacactccacagtgtgcctgcaacccaagtggccttatccgtgcagtggtggcagttcagaaataaagggcccatttgtgggatgccgcattca

SEQ ID NO: 327020 - DNA, 1451 bp, Homo sapiens
ggagtctcactctgtcgccaggctagagtgcagtggcacgatctcagctcactgcaacctccgcctcccgggttcaagcgattctctttcctcagcttcccgagtagctgggttacaggtacgcaccaccaggcccagctcatttttgtgtgtttagtagagatggggttttgccatgttggccaggctgatctcgaactcctgacctcaggtgatcctcccgccttggcctcccaaagtgctgggattataggcgtgagctgctgcgcccagcctcggatagatcttttaagcagtaataagggtctggatggttgttaggctgagtttggggttgccccatttcctgaagtcagagcatacaggaatgatttgttttcattctgtttttgatttcagatactttctttcaataaaagtggcggtggtggagacatccaccagggcttccagtctcttctcaccgaagtgaacaagactggcacgcagtacttgcttaggatggccaacaggctctttggggaaaagtcttgtgatttcctctcatcttttagagattcctgccaaaaattctaccaagcagagatggaggagcttgactttatcagcgccgtagagaagtccagaaaacacataaacacctgggtagctgaaaagacagaaggttctggtgaatgctgtctatttcagaggaaactgggatgaacagtttgacaaggagaacaccgaggagagactgtttaaagtcagcaagaatgaggagaaacctgtgcaaatgatgtttaagcaatctacttttaagaagacctatataggagaaatatttacccaaatcttggtgcttccatatgttggcaaggaactgaatatgatcatcatgcttccggacgagaccactgacttgagaacggtggagaaagaactcacttacgagaagttcgtagaatggacgaggctggacatgatggatgaagaggaggtggaagtgtccctcccgcggtttaaactagaggaaagctacgacatggagagtgtcctgcgcaacctgggcatgactgatgccttcgagctgggcaaggcagacttctctggaatgtcccagacagacctgtctctgtccaaggtcgtgcacaagtcttttgtggaggtcaatgaggaaggcacggaggctgcagccgccacagctgccatcatgatgatgcggtgtgccagattcgtcccccgcttctgcgccgaccaccccttccttttcttcatccagcacagcaagaccaacgggattctcttctgcggccgcttttcctctccgtgaggacagggcagtcttggtgtgcagcccctctcctctctgtcccctgacactccacagtgtgcctgcaacccaagtggccttatccgtgcagtggtggcagttcagaaataaagggcccatttgtgggatgccgcattca

SEQ ID NO: 327021 - DNA, 1441 bp, Homo sapiens
gcactccccagtggatggccgtgtatcaggagccggcccttttctggaaacaggccagcattcagtctccacagaggcaccataaacacgctggtggggccctgtactgtggtcaaagtcaaggcctccgggcaggactcgcggcccctccggctggcgggtggggttgacccgcacgtcccgccccgcctctccctccgcgctccggacgggcgacggtagctcgagacccgggactccgcccgcctccccgcgagtatttgaggtccggggcggctccggcgcctctgcccgccgttctgctcgctcgctccccgctctggagtctgccatcatggatgttctcgcagaagcaaatggcacctttgccttaaaccttttgaaaacgctgggtaaagacaactcgaagaatgtgtttttctcacccatgagcatgtcctgtgccctggccatggtctacatgggggcaaagggaaacaccgctgcacagatggcccagatactttctttcaataaaagtggcggtggtggagacatccaccagggcttccagtctcttctcaccgaagtgaacaagactggcacgcagtacttgcttaggatggccaacaggctctttggggaaaagtcttgtgatttcctctcatcttttagagattcctgccaaaaattctaccaagcagagatggaggagcttgactttatcagcgccgtagagaagtccagaaaacacataaacacctgggtagctgaaaagacagaaggtaaaattgcggagttgctctctccgggctcagtggatccattgacaaggctggttctggtgaatgctgtctatttcagaggaaactgggatgaacagtttgacaaggagaacaccgaggagagactgtttaaagtcagcaagaatgaggagaaacctgtgcaaatgatgtttaagcaatctacttttaagaagacctatataggagaaatatttacccaaatcttggtgcttccatatgttggcaaggaactgaatatgatcatcatgcttccggacgagaccactgacttgagaacggtggagaaagaactcacttacgagaagttcgtagaatggacgaggctggacatgatggatgaagaggaggtggaagtgtccctccaggcacggaggctgcagccgccacagctgccatcatgatgatgcggtgtgccagattcgtcccccgcttctgcgccgaccaccccttccttttcttcatccagcacagcaagaccaacgggattctcttctgcggccgcttttcctctccgtgaggacagggcagtcttggtgtgcagcccctctcctctctgtcccctgacactccacagtgtgcctgcaacccaagtggccttatccgtgcagtggtggcagttcagaaataaagggcccatttgtgggatgccgcattca

SEQ ID NO: 327022 - DNA, 688 bp, Homo sapiens
tgcggcgtcgatccaagtctccacggtggtcctgaattccatcatcaaggccatgcgtggattgccagctggcatccacagcatagcacagggccctgctgggcagcagcaccctgggtcttaaagtcttcaactgtctccctctaggtggagaaagaactcacttacgagaagttcgtagaatggacgaggctggacatgatggatgaagaggaggtggaagtgtccctcccgcggtttaaactagaggaaagctacgacatggagagtgtcctgcgcaacctgggcatgactgatgccttcgagctgggcaaggcagacttctctggaatgtcccagacagacctgtctctgtccaaggtcgtgcacaagtcttttgtggaggtcaatgaggaaggcacggaggctgcagccgccacagctgccatcatgatgatgcggtgtgccagattcgtcccccgcttctgcgccgaccaccccttccttttcttcatccagcacagcaagaccaacgggattctcttctgcggccgcttttcctctccgtgaggacagggcagtcttggtgtgcagcccctctcctctctgtcccctgacactccacagtgtgcctgcaacccaagtggccttatccgtgcagtggtggcagttcagaaataaagggcccatttgtgggatgccgcattca

SEQ ID NO: 327023 - DNA, 634 bp, Homo sapiens
taaaaaaaaaaaaaaaaaaaaaaaaaaaaaaaaaaaaaaggggggggggcctcgtgccgaattcggcacgaggagaccactgacttgagaacggtggagaaagaactcacttacgagaagttcgtagaatggacgaggctggacatgatggatgaagaggaggtggaagtgtccctcccgcggtttaaactagaggaaagctacgacatggagagtgtcctgcgcaacctgggcatgactgatgccttcgagctgggcaaggcagacttctctggaatgtcccagacagacctgtctctgtccaaggtcgtgcacaagtcttttgtggaggtcaatgaggaaggcacggaggctgcagccgccacagctgccatcatgatgatgcggtgtgccagattcgtcccccgcttctgcgccgaccaccccttccttttcttcatccagcacagcaagaccaacgggattctcttctgcggccgcttttcctctccgtgaggacagggcagtcttggtgtgcagcccctctcctctctgtcccctgacactccacagtgtgcctgcaacccaagtggccttatccgtgcagtggtggcagttcagaaataaagggcccatttgtgggatgccgcattca

SEQ ID NO: 327024 - DNA, 2525 bp, Homo sapiens
ccatggattcgtggctaaactgcacatgtttattttctcagagttctgaggttggaggttggaaatgggttccgcagggccaggctcctccagaggatcctccttgcctttccagctactgcagctgtggtccttgcgtttcttggcttgaggcccttcatcttcaaggccagtggagtggcattttgctttattctttgcattgctttttcccgtgagatctccccctccctccctcttagaaggatacctgtgattacatttagggtcaactggaacaatccaggataatctcccatctcaagagcctgaatctaatcgtgctgcacagtcccttttgccatgtaaggggcattcacaggtcccagggattatgacccaggtatctttggagcacttgctcagccaaccccagctccaaatgtaaaggcatgcacagtggagagccgcttaattcagcatctcctcacagggcctccagtaggcacctccttccctctcccatctgctccaggaaatgtctgctccagcttctccccttccttgttccgtgggttcccactcactgctcaagtgagtcactgggactgtcttagaatgctggcattctctgactgggacatattcatttggtaaacatctgagaactgtgtcagagcaggcaggccccgcatccctgcattcctgcatcccctccttcccagcctgactgcctgtggggcccttagctgccccttgtcctctcacctgattctgcagattcttcttcttgagcagcagctcagaaagcgcatccgccctgcgtttcaagcccagctacttcttagcttcacttccgtcaacttcaccttccctgtagtgcagtggggcattgatggtaggtctctctaagggcttggtggactttaacatgtgattctgtgattccgacttgcctgaagataccccagctcccccctcccgactatccagctgcattcctgctctggaccctgctggggctgccacacccactgcacggcagggctagagagatgtgcagcctgaccctacccctgagcctgtctgtgaaggtggagatgggcatgcacccacagcccatgaggcaaggtggtgtcctgagtgtgctgtgagttcaggcgcaggaaggcctggcttgttgcagcaggatgtccccaagcgtggtccaaaattggggctttgccacctgcagggatttcctagaaggagatccaagggtcaggaggcatttgaaaggctttcacgcatctttgtatgtggcttgattgatccttttttaaggctcttgctacccagaaatgggattctctctctcattataaaaacatttggccatcttttcttgtgtaactgtcagtgaatgtatcattttgaatatttttcaaattaaaacagtacatttaagcccgcaaaacacaccaaagaatacaaacatagaagcaaaagccagtgccccttctgtaattccaccccaaggaagagactccaggaaagggtgcctccttcccactttctccacgtgcgggcaggcgtgcagggaggagtcctcacaaaacagggcggcgtttcacatagaactctttcattttccacacttaacattagaaacacacaaaataatgtggagggtcctaaaaagaaacagccagagttctgtgtgtgtttctgcttgcccactgaaccacagcatcggcggtgactgtcggtaaggcgcgtgagatgcagtcgcgtggaagctgtgcttaagtgatactgattttaaatcttgttccaggtctgccatcatggatgttctcgcagaagcaaatggcacctttgccttaaaccttttgaaaacgctgggtaaagacaactcgaagaatgtgtttttctcacccatgagcatgtcctgtgccctggccatggtctacatgggggcaaagggaaacaccgctgcacagatggcccagatactttctttcaataaaagtggcggtggtggagacatccaccagggcttccagtctcttctcaccgaagtgaacaagactggcacgcagtacttgcttcgcggtttaaactagaggaaagctacgacatggagagtgtcctgcgcaacctgggcatgactgatgccttcgagctgggcaaggcagacttctctggaatgtcccagacagacctgtctctgtccaaggtcgtgcacaagtcttttgtggaggtcaatgaggaaggcacggaggctgcagccgccacagctgccatcatgatgatgcggtgtgccagattcgtcccccgcttctgcgccgaccaccccttccttttcttcatccagcacagcaagaccaacgggattctcttctgcggccgcttttcctctccgtgaggacagggcagtcttggtgtgcagcccctctcctctctgtcccctgacactccacagtgtgcctgcaacccaagtggccttatccgtgcagtggtggcagttcagaaataaagggcccatttgtgggatgccgcattca

SEQ ID NO: 327025 - DNA, 1253 bp, Homo sapiens
gcactccccagtggatggccgtgtatcaggagccggcccttttctggaaacaggccagcattcagtctccacagaggcaccataaacacgctggtggggccctgtactgtggtcaaagtcaaggcctccgggcaggactcgcggcccctccggctggcgggtggggttgacccgcacgtcccgccccgcctctccctccgcgctccggacgggcgacggtagctcgagacccgggactccgcccgcctccccgcgagtatttgaggtccggggcggctccggcgcctctgcccgccgttctgctcgctcgctccccgctctggagtctgccatcatggatgttctcgcagaagcaaatggcacctttgccttaaaccttttgaaaacgctgggtaaagacaactcgaagaatgtgtttttctcacccatgagcatgtcctgtgccctggccatggtctacatgggggcaaagggaaacaccgctgcacagatggcccagatactttctttcaataaaagtggcggtggtggagacatccaccagggcttccagtctcttctcaccgaagtgaacaagactggcacgcagtacttgcttaggatggccaacaggctctttggggaaaagtcttgtgatttcctctcatcttttagagattcctgccaaaaattctaccaagcagagatggaggagcttgactttatcagcgccgtagagaagtccagaaaacacataaacacctgggtagctgaaaagacagaaggtaaaattgcggagttgctctctccgggctcagtggatccattgacaaggctggttctggtgaatgctgtctatttcagaggaaactgggatgaacagtttgacaaggagaacaccgaggagagactgtttaaagtcagcaaggacctgtctctgtccaaggtcgtgcacaagtcttttgtggaggtcaatgaggaaggcacggaggctgcagccgccacagctgccatcatgatgatgcggtgtgccagattcgtcccccgcttctgcgccgaccaccccttccttttcttcatccagcacagcaagaccaacgggattctcttctgcggccgcttttcctctccgtgaggacagggcagtcttggtgtgcagcccctctcctctctgtcccctgacactccacagtgtgcctgcaacccaagtggccttatccgtgcagtggtggcagttcagaaataaagggcccatttgtgggatgccgcattca

SEQ ID NO: 327026 - DNA, 931 bp, Homo sapiens
gcactccccagtggatggccgtgtatcaggagccggcccttttctggaaacaggccagcattcagtctccacagaggcaccataaacacgctggtggggccctgtactgtggtcaaagtcaaggcctccgggcaggactcgcggcccctccggctggcgggtggggttgacccgcacgtcccgccccgcctctccctccgcgctccggacgggcgacggtagctcgagacccgggactccgcccgcctccccgcgagtatttgaggtccggggcggctccggcgcctctgcccgccgttctgctcgctcgctccccgctctggagtctgccatcatggatgttctcgcagaagcaaatggcacctttgccttaaaccttttgaaaacgctgggtaaagacaactcgaagaatgtgtttttctcacccatgagcatgtcctgtgccctggccatggtctacatgggggcaaagggaaacaccgctgcacagatggcccagatactttctttcaataaaagtggcggtggtggagacatccaccagggcttccagtctcttctcaccgaagtgaacaagactggcacgcagtacttgcttaggatggccaacaggctctttggggaaaagtcttgtgatttcctctcatcttttagagattcctgccaaaaattctaccaagcagagatggaggagcttgactttatcagcgccgtagagaagtccagaaaacacataaacacctgggtagctgaaaagacagaaggtaaaattgcggagttgctctctccgggctcagtggatccattgacaaggctggttctggtgaatgctgtctatttcagaggaaactgggatgaacagtttgacaaggagaacaccgaggagagactgtttaaagtcagcaaggcgagtaaggggccgtgacaggag

SEQ ID NO: 327027 - DNA, 1456 bp, Homo sapiens
gcactccccagtggatggccgtgtatcaggagccggcccttttctggaaacaggccagcattcagtctccacagaggcaccataaacacgctggtggggccctgtactgtggtcaaagtcaaggcctccgggcaggactcgcggcccctccggctggcgggtggggttgacccgcacgtcccgccccgcctctccctccgcgctccggacgggcgacggtagctcgagacccgggactccgcccgcctccccgcgagtatttgaggtccggggcggctccggcgcctctgcccgccgttctgctcgctcgctccccgctctggagtacgtgtctggcttgggagccgctcggacacgctggcttgggtttgtcgctccaaagtcgggaaagccgggggcgcgagcggggaggggggcagggtgggggtcgcgcggggccgggaacgcgcgtgggtcgacggcgcgcggggacgctggagccccgagaatggggcgtggccgcgcggggctgtgaccccagcagtcccagcggggcgggggcccgggcgagcgtccggcttgggttcccttccggagcctcgcagcggcagagaacggcgacgcggccgggtgagtcgtgcgtggccgcgagcccggccggtgacgccgcggacccgaggaccccgggcgcccaggcccagcgcccacggaagaggcggccggcgcgggatgggggcggcgcagagcctcccgggccacaggtctgccatcatggatgttctcgcagaagcaaatggcacctttgccttaaaccttttgaaaacgctgggtaaagacaactcgaagaatgtgtttttctcacccatgagcatgtcctgtgccctggccatggtctacatgggggcaaagggaaacaccgctgcacagatggcccagatactttctttcaataaaagtggcggtggtggagacatccaccagggcttccagtctcttctcaccgaagtgaacaagactggcacgcagtacttgcttaggatggccaacaggctctttggggaaaagtcttgtgatttcctctcatcttttagagattcctgccaaaaattctaccaagcagagatggaggagcttgactttatcagcgccgtagagaagtccagaaaacacataaacacctgggtagctgaaaagacagaaggtgaaaatgtattgttattctacttttgtaataacctcttaatccattttattgtcagttccttcacaagactgtcaattgtaaacaggaatgatttttttttctctgaataactgcaaacttaaaaaatctgcttctgaaatcagttgccattatttgacattttggaaatgctcaatgtgttctgttctctctgatttctccctgtttccttggtgtacccgtgatgcctttcagtgtttggtatacctcttctggatcaatccacgttttaat

SEQ ID NO: 327028 - DNA, 1079 bp, Homo sapiens
gcactccccagtggatggccgtgtatcaggagccggcccttttctggaaacaggccagcattcagtctccacagaggcaccataaacacgctggtggggccctgtactgtggtcaaagtcaaggcctccgggcaggactcgcggcccctccggctggcgggtggggttgacccgcacgtcccgccccgcctctccctccgcgctccggacgggcgacggtagctcgagacccgggactccgcccgcctccccgcgagtatttgaggtccggggcggctccggcgcctctgcccgccgttctgctcgctcgctccccgctctggagtacgtgtctggcttgggagccgctcggacacgctggcttgggtttgtcgctccaaagtcgggaaagccgggggcgcgagcggggaggggggcagggtgggggtcgcgcggggccgggaacgcgcgtgggtcgacggcgcgcggggacgctggagccccgagaatggggcgtggccgcgcggggctgtgaccccagcagtcccagcggggcgggggcccgggcgagcgtccggcttgggttcccttccggagcctcgcagcggcagagaacggcgacgcggccgggtgagtcgtgcgtggccgcgagcccggccggtgacgccgcggacccgaggaccccgggcgcccaggcccagcgcccacggaagaggcggccggcgcgggatgggggcggcgcagagcctcccgggccacaggtctgccatcatggatgttctcgcagaagcaaatggcacctttgccttaaaccttttgaaaacgctgggtaaagacaactcgaagaatgtgtttttctcacccatgagcatgtcctgtgccctggccatggtctacatgggggcaaagggaaacaccgctgcacagatggcccagatactttctttcaataaaagtggcggtggtggagacatccaccagggcttccagtctcttctcaccgaagtgaacaagactggcacgcagtacttgcttaggatggccaacaggctctttggggaaaagtcttgtgatttcctctcagtaagtcatacttgctc

SEQ ID NO: 327029 - DNA, 1843 bp, Homo sapiens
gcactccccagtggatggccgtgtatcaggagccggcccttttctggaaacaggccagcattcagtctccacagaggcaccataaacacgctggtggggccctgtactgtggtcaaagtcaaggcctccgggcaggactcgcggcccctccggctggcgggtggggttgacccgcacgtcccgccccgcctctccctccgcgctccggacgggcgacggtagctcgagacccgggactccgcccgcctccccgcgagtatttgaggtccggggcggctccggcgcctctgcccgccgttctgctcgctcgctccccgctctggagtacgtgtctggcttgggagccgctcggacacgctggcttgggtttgtcgctccaaagtcgggaaagccgggggcgcgagcggggaggggggcagggtgggggtcgcgcggggccgggaacgcgcgtgggtcgacggcgcgcggggacgctggagccccgagaatggggcgtggccgcgcggggctgtgaccccagcagtcccagcggggcgggggcccgggcgagcgtccggcttgggttcccttccggagcctcgcagcggcagagaacggcgacgcggccgggtgagtcgtgcgtggccgcgagcccggccggtgacgccgcggacccgaggaccccgggcgcccaggcccagcgcccacggaagaggcggccggcgcgggatgggggcggcgcagagcctcccgggccacaggtgaccccggtcggccccgcggcctcggtgacccctcgcccgctccgcgacccggaggacgcgtgctcagtcttggggcgccgggtgttaggagccgggcgggaggcggagagaggccgaggggttcggcgccaaacggtgccatccgggccccctgcgtgtgttcactggactggccgtgctgggcttggccaatccgcagcactttcaggtcgcccagacctgtggagacgatcgtgtggaccagcccggatctccttaccgctctgtgtttgaattaaactccctacaggcaaactattacaggctttgatgtcttcaaggcaaagaggaaactttaactacaaattggcatttaagttattttcttccttttttttttttttttttttgtcctaaagattggcttgggaaaactgaggtacagaaaattaataattaatgttcacatgctgtcaggaatactcagatgcgagggggcatctgagtccattttttgggcacttttgctttctgggatgctctcgtgcctaatgacagccctgcagctgcctgcatcctttctggtgggggtcaggcctgatgcgatgagatctgatgtgttcagtgaccttctagttaaggtcctgggccggccttgtattgctggggcttttatgtgtgctgggattaacaccagtgactgctgttatcagcatagatggcgtttgttctcatttcaggaccgtatctgagtaattgcatccattgtgatgtgccaccaaagagaaaagtactttggtcatactcgactatgtaaactaagtattttaagttaaggccaattccaatgcattttattacaattcagcatgaaacagttaacacggaccagtaacagtagagtgaaattagcatgaatagaaccaacattcttttccacatatgtaataataagggcacccaagcagatgttgtacggtcccagggaagaccacacaccttacatttccaggcttactgcacttgggattaagccaaggcatccaaagaaagaaaattttttttttttttttttttgccaggctggagtgcagtggtgcgatttcggctgactgcaacct

SEQ ID NO: 327030 - DNA, 3075 bp, Homo sapiens
ccatggattcgtggctaaactgcacatgtttattttctcagagttctgaggttggaggttggaaatgggttccgcagggccaggctcctccagaggatcctccttgcctttccagctactgcagctgtggtccttgcgtttcttggcttgaggcccttcatcttcaaggccagtggagtggcattttgctttattctttgcattgctttttcccgtgagatctccccctccctccctcttagaaggatacctgtgattacatttagggtcaactggaacaatccaggataatctcccatctcaagagcctgaatctaatcgtgctgcacagtcccttttgccatgtaaggggcattcacaggtcccagggattatgacccaggtatctttggagcacttgctcagccaaccccagctccaaatgtaaaggcatgcacagtggagagccgcttaattcagcatctcctcacagggcctccagtaggcacctccttccctctcccatctgctccaggaaatgtctgctccagcttctccccttccttgttccgtgggttcccactcactgctcaagtgagtcactgggactgtcttagaatgctggcattctctgactgggacatattcatttggtaaacatctgagaactgtgtcagagcaggcaggccccgcatccctgcattcctgcatcccctccttcccagcctgactgcctgtggggcccttagctgccccttgtcctctcacctgattctgcagattcttcttcttgagcagcagctcagaaagcgcatccgccctgcgtttcaagcccagctacttcttagcttcacttccgtcaacttcaccttccctgtagtgcagtggggcattgatggtaggtctctctaagggcttggtggactttaacatgtgattctgtgattccgacttgcctgaagataccccagctcccccctcccgactatccagctgcattcctgctctggaccctgctggggctgccacacccactgcacggcagggctagagagatgtgcagcctgaccctacccctgagcctgtctgtgaaggtggagatgggcatgcacccacagcccatgaggcaaggtggtgtcctgagtgtgctgtgagttcaggcgcaggaaggcctggcttgttgcagcaggatgtccccaagcgtggtccaaaattggggctttgccacctgcagggatttcctagaaggagatccaagggtcaggaggcatttgaaaggctttcacgcatctttgtatgtggcttgattgatccttttttaaggctcttgctacccagaaatgggattctctctctcattataaaaacatttggccatcttttcttgtgtaactgtcagtgaatgtatcattttgaatatttttcaaattaaaacagtacatttaagcccgcaaaacacaccaaagaatacaaacatagaagcaaaagccagtgccccttctgtaattccaccccaaggaagagactccaggaaagggtgcctccttcccactttctccacgtgcgggcaggcgtgcagggaggagtcctcacaaaacagggcggcgtttcacatagaactctttcattttccacacttaacattagaaacacacaaaataatgtggagggtcctaaaaagaaacagccagagttctgtgtgtgtttctgcttgcccactgaaccacagcatcggcggtgactgtcggtaaggcgcgtgagatgcagtcgcgtggaagctgtgcttaagtgatactgattttaaatcttgttccaggtctgccatcatggatgttctcgcagaagcaaatggcacctttgccttaaaccttttgaaaacgctgggtaaagacaactcgaagaatgtgtttttctcacccatgagcatgtcctgtgccctggccatggtctacatgggggcaaagggaaacaccgctgcacagatggcccagatactttctttcaataaaagtggcggtggtggagacatccaccagggcttccagtctcttctcaccgaagtgaacaagactggcacgcagtacttgcttaggatggccaacaggctctttggggaaaagtcttgtgatttcctctcatcttttagagattcctgccaaaaattctaccaagcagagatggaggagcttgactttatcagcgccgtagagaagtccagaaaacacataaacacctgggtagctgaaaagacagaaggtaaaattgcggagttgctctctccgggctcagtggatccattgacaaggctggttctggtgaatgctgtctatttcagaggaaactgggatgaacagtttgacaaggagaacaccgaggagagactgtttaaagtcagcaagaatgaggagaaacctgtgcaaatgatgtttaagcaatctacttttaagaagacctatataggagaaatatttacccaaatcttggtgcttccatatgttggcaaggaactgaatatgatcatcatgcttccggacgagaccactgacttgagaacggtggagaaagaactcacttacgagaagttcgtagaatggacgaggctggacatgatggatgaagaggaggtggaagtgtccctcccgcggtttaaactagaggaaagctacgacatggagagtgtcctgcgcaacctgggcatgactgatgccttcgagctgggcaaggcagacttctctggaatgtcccagacagacctgtctctgtccaaggtcgtgcacaagtcttttgtggaggtcaatgaggaaggcacggaggctgcagccgccacagctgccatcatgatgatgcggtgtgccagattcgtcccccgcttctgcgccgaccaccccttccttttcttcatccagcacagcaagaccaacgggattctcttctgcggccgcttttcctctccgtgaggacagggcagtcttggtgtgcagcccctctcctctctgtcccctgacactccacagtgtgcctgcaacccaagtggccttatccgtgcagtggtggcagttcagaaataaagggcccatttgtgggatgccgcattca

SEQ ID NO: 327031 - DNA, 1792 bp, Homo sapiens
tctcctccgaatatcctggtctggtttctccagttcagtgtttcagattaaatcccctgacacagtaaaactcatgtgcactgacttctcctccgaatatcctgctttggtttctccagttcagtatttcaaattaaatcccctgacacagtgaaactcatgtgcaccgacttctcctctgccccagatggtgtaacctgggctggccagacaggcacctccccagtgggcgtgtcttcagacaaaggtggctttgctttgttgaagttactgatataaagatcagcgcctgaaacagattctccgggatattaccggagacggagtgttttattattagcctttcttaggtggacatttccatttgaattacaagtcctttaggctgggcgtggtgcatggctgtaatctcagcaccttgggaggctgaggcaggaagatcacttgaggccaggcgttggagagcagcctgggcaaggtggcaagaaccttgtctctacaaaaaaaaaagcgtctgccatcatggatgttctcgcagaagcaaatggcacctttgccttaaaccttttgaaaacgctgggtaaagacaactcgaagaatgtgtttttctcacccatgagcatgtcctgtgccctggccatggtctacatgggggcaaagggaaacaccgctgcacagatggcccagatactttctttcaataaaagtggcggtggtggagacatccaccagggcttccagtctcttctcaccgaagtgaacaagactggcacgcagtacttgcttaggatggccaacaggctctttggggaaaagtcttgtgatttcctctcatcttttagagattcctgccaaaaattctaccaagcagagatggaggagcttgactttatcagcgccgtagagaagtccagaaaacacataaacacctgggtagctgaaaagacagaaggtaaaattgcggagttgctctctccgggctcagtggatccattgacaaggctggttctggtgaatgctgtctatttcagaggaaactgggatgaacagtttgacaaggagaacaccgaggagagactgtttaaagtcagcaagaatgaggagaaacctgtgcaaatgatgtttaagcaatctacttttaagaagacctatataggagaaatatttacccaaatcttggtgcttccatatgttggcaaggaactgaatatgatcatcatgcttccggacgagaccactgacttgagaacggtggagaaagaactcacttacgagaagttcgtagaatggacgaggctggacatgatggatgaagaggaggtggaagtgtccctcccgcggtttaaactagaggaaagctacgacatggagagtgtcctgcgcaacctgggcatgactgatgccttcgagctgggcaaggcagacttctctggaatgtcccagacagacctgtctctgtccaaggtcgtgcacaagtcttttgtggaggtcaatgaggaaggcacggaggctgcagccgccacagctgccatcatgatgatgcggtgtgccagattcgtcccccgcttctgcgccgaccaccccttccttttcttcatccagcacagcaagaccaacgggattctcttctgcggccgcttttcctctccgtgaggacagggcagtcttggtgtgcagcccctctcctctctgtcccctgacactccacagtgtgcctgcaacccaagtggccttatccgtgcagtggtggcagttcagaaataaagggcccatttgtgggatgccgcattca

SEQ ID NO: 327032 - DNA, 572 bp, Homo sapiens
tagccggccccacattcgatcgcggagaacggtggagaaagaactcacttacgagaagttcgtagaatggacgaggctggacatgatggatgaagaggaggtggaagtgtccctcccgcggtttaaactagaggaaagctacgacatggagagtgtcctgcgcaacctgggcatgactgatgccttcgagctgggcaaggcagacttctctggaatgtcccagacagacctgtctctgtccaaggtcgtgcacaagtcttttgtggaggtcaatgaggaaggcacggaggctgcagccgccacagctgccatcatgatgatgcggtgtgccagattcgtcccccgcttctgcgccgaccaccccttccttttcttcatccagcacagcaagaccaacgggattctcttctgcggccgcttttcctctccgtgaggacagggcagtcttggtgtgcagcccctctcctctctgtcccctgacactccacagtgtgcctgcaacccaagtggccttatccgtgcagtggtggcagttcagaaataaagggcccatttgtgggatgccgcattca

SEQ ID NO: 327033 - DNA, 2020 bp, Homo sapiens
gcactccccagtggatggccgtgtatcaggagccggcccttttctggaaacaggccagcattcagtctccacagaggcaccataaacacgctggtggggccctgtactgtggtcaaagtcaaggcctccgggcaggactcgcggcccctccggctggcgggtggggttgacccgcacgtcccgccccgcctctccctccgcgctccggacgggcgacggtagctcgagacccgggactccgcccgcctccccgcgagtatttgaggtccggggcggctccggcgcctctgcccgccgttctgctcgctcgctccccgctctggagtacgtgtctggcttgggagccgctcggacacgctggcttgggtttgtcgctccaaagtcgggaaagccgggggcgcgagcggggaggggggcagggtgggggtcgcgcggggccgggaacgcgcgtgggtcgacggcgcgcggggacgctggagccccgagaatggggcgtggccgcgcggggctgtgaccccagcagtcccagcggggcgggggcccgggcgagcgtccggcttgggttcccttccggagcctcgcagcggcagagaacggcgacgcggccgggtgagtcgtgcgtggccgcgagcccggccggtgacgccgcggacccgaggaccccgggcgcccaggcccagcgcccacggaagaggcggccggcgcgggatgggggcggcgcagagcctcccgggccacaggtctgccatcatggatgttctcgcagaagcaaatggcacctttgccttaaaccttttgaaaacgctgggtaaagacaactcgaagaatgtgtttttctcacccatgagcatgtcctgtgccctggccatggtctacatgggggcaaagggaaacaccgctgcacagatggcccagatactttctttcaataaaagtggcggtggtggagacatccaccagggcttccagtctcttctcaccgaagtgaacaagactggcacgcagtacttgcttaggatggccaacaggctctttggggaaaagtcttgtgatttcctctcatcttttagagattcctgccaaaaattctaccaagcagagatggaggagcttgactttatcagcgccgtagagaagtccagaaaacacataaacacctgggtagctgaaaagacagaaggtaaaattgcggagttgctctctccgggctcagtggatccattgacaaggctggttctggtgaatgctgtctatttcagaggaaactgggatgaacagtttgacaaggagaacaccgaggagagactgtttaaagtcagcaagaatgaggagaaacctgtgcaaatgatgtttaagcaatctacttttaagaagacctatataggagaaatatttacccaaatcttggtgcttccatatgttggcaaggaactgaatatgatcatcatgcttccggacgagaccactgacttgagaacggtggagaaagaactcacttacgagaagttcgtagaatggacgaggctggacatgatggatgaagaggaggtggaagtgtccctcccgcggtttaaactagaggaaagctacgacatggagagtgtcctgcgcaacctgggcatgactgatgccttcgagctgggcaaggcagacttctctggaatgtcccagacagacctgtctctgtccaaggtcgtgcacaagtcttttgtggaggtcaatgaggaaggcacggaggctgcagccgccacagctgccatcatgatgatgcggtgtgccagattcgtcccccgcttctgcgccgaccaccccttccttttcttcatccagcacagcaagaccaacgggattctcttctgcggccgcttttcctctccgtgaggacagggcagtcttggtgtgcagcccctctcctctctgtcccctgacactccacagtgtgcctgcaacccaagtggccttatccgtgcagtggtggcagttcagaaataaagggcccatttgtgggatgccgcattca

SEQ ID NO: 327034 - DNA, 1370 bp, Homo sapiens
aatgctatgaggcgggtaatcggagaggcggagtttgagtcgggcggtccgggctctgccgcgttctgctcgctcgctccccgctctggagtctgccatcatggatgttctcgcagaagcaaatggcacctttgccttaaaccttttgaaaacgctgggtaaagacaactcgaagaatgtgtttttctcacccatgagcatgtcctgtgccctggccatggtctacatgggggcaaagggaaacaccgctgcacagatggcccagatactttctttcaataaaagtggcggtggtggagacatccaccagggcttccagtctcttctcaccgaagtgaacaagactggcacgcagtacttgcttaggatggccaacaggctctttggggaaaagtcttgtgatttcctctcatcttttagagattcctgccaaaaattctaccaagcagagatggaggagcttgactttatcagcgccgtagagaagtccagaaaacacataaacacctgggtagctgaaaagacagaaggtaaaattgcggagttgctctctccgggctcagtggatccattgacaaggctggttctggtgaatgctgtctatttcagaggaaactgggatgaacagtttgacaaggagaacaccgaggagagactgtttaaagtcagcaagaatgaggagaaacctgtgcaaatgatgtttaagcaatctacttttaagaagacctatataggagaaatatttacccaaatcttggtgcttccatatgttggcaaggaactgaatatgatcatcatgcttccggacgagaccactgacttgagaacggtggagaaagaactcacttacgagaagttcgtagaatggacgaggctggacatgatggatgaagaggaggtggaagtgtccctcccgcggtttaaactagaggaaagctacgacatggagagtgtcctgcgcaacctgggcatgactgatgccttcgagctgggcaaggcagacttctctggaatgtcccagacagacctgtctctgtccaaggtcgtgcacaagtcttttgtggaggtcaatgaggaaggcacggaggctgcagccgccacagctgccatcatgatgatgcggtgtgccagattcgtcccccgcttctgcgccgaccaccccttccttttcttcatccagcacagcaagaccaacgggattctcttctgcggccgcttttcctctccgtgaggacagggcagtcttggtgtgcagcccctctcctctctgtcccctgacactccacagtgtgcctgcaacccaagtggccttatccgtgcagtggtggcagttcagaaataaagggcccatttgtgggatgccgcattca

SEQ ID NO: 327035 - DNA, 1838 bp, Homo sapiens
cttagctatcttatttactgaagctaaagaagtaggtccttaaaaagccattgacaggtcttgagtttgcaacgtgactgtgaaacaggcatccttgttactcacacgtttgctgaaaggataacagaaagccctcgatagaaaaatctcactagattgtttataatttgttgatatttggagtatcttgagtggtaaactttaaatgtggatttattttttctttccttttaggatttggatctctccaatcttttttatgattaattgttcagtgtttatgcattattgcgaagtgataatgaaaatgctcaaactcagggtcctgcaggcactgtgggggaggcagtggggacgtgaggggattacagatccagtagaagccccccgacccccatctgcttccaccccatctccttccagaacaccaccgatagccacaccgaagagttctcccatttgctggttcccggacaaaaaagctgctgatcccttgagcacactgcagtgaagctcccagctgacatgtcctgtccatgtaaacagaacttcctccatgtctgccatcatggatgttctcgcagaagcaaatggcacctttgccttaaaccttttgaaaacgctgggtaaagacaactcgaagaatgtgtttttctcacccatgagcatgtcctgtgccctggccatggtctacatgggggcaaagggaaacaccgctgcacagatggcccagatactttctttcaataaaagtggcggtggtggagacatccaccagggcttccagtctcttctcaccgaagtgaacaagactggcacgcagtacttgcttaggatggccaacaggctctttggggaaaagtcttgtgatttcctctcatcttttagagattcctgccaaaaattctaccaagcagagatggaggagcttgactttatcagcgccgtagagaagtccagaaaacacataaacacctgggtagctgaaaagacagaaggtaaaattgcggagttgctctctccgggctcagtggatccattgacaaggctggttctggtgaatgctgtctatttcagaggaaactgggatgaacagtttgacaaggagaacaccgaggagagactgtttaaagtcagcaagaatgaggagaaacctgtgcaaatgatgtttaagcaatctacttttaagaagacctatataggagaaatatttacccaaatcttggtgcttccatatgttggcaaggaactgaatatgatcatcatgcttccggacgagaccactgacttgagaacggtggagaaagaactcacttacgagaagttcgtagaatggacgaggctggacatgatggatgaagaggaggtggaagtgtccctcccgcggtttaaactagaggaaagctacgacatggagagtgtcctgcgcaacctgggcatgactgatgccttcgagctgggcaaggcagacttctctggaatgtcccagacagacctgtctctgtccaaggtcgtgcacaagtcttttgtggaggtcaatgaggaaggcacggaggctgcagccgccacagctgccatcatgatgatgcggtgtgccagattcgtcccccgcttctgcgccgaccaccccttccttttcttcatccagcacagcaagaccaacgggattctcttctgcggccgcttttcctctccgtgaggacagggcagtcttggtgtgcagcccctctcctctctgtcccctgacactccacagtgtgcctgcaacccaagtggccttatccgtgcagtggtggcagttcagaaataaagggcccatttgtgggatgccgcattca

SEQ ID NO: 327036 - DNA, 1898 bp, Homo sapiens
gcactccccagtggatggccgtgtatcaggagccggcccttttctggaaacaggccagcattcagtctccacagaggcaccataaacacgctggtggggccctgtactgtggtcaaagtcaaggcctccgggcaggactcgcggcccctccggctggcgggtggggttgacccgcacgtcccgccccgcctctccctccgcgctccggacgggcgacggtagctcgagacccgggactccgcccgcctccccgcgagtatttgaggtccggggcggctccggcgcctctgcccgccgttctgctcgctcgctccccgctctggagtctgccatcatggatgttctcgcagaagcaaatggcacctttgccttaaaccttttgaaaacgctgggtaaagacaactcgaagaatgtgtttttctcacccatgagcatgtcctgtgccctggccatggtctacatgggggcaaagggaaacaccgctgcacagatggcccagatactttctttcaataaaagtggcggtggtggagacatccaccagggcttccagtctcttctcaccgaagtgaacaagactggcacgcagtacttgcttaggatggccaacaggctctttggggaaaagtcttgtgatttcctctcatcttttagagattcctgccaaaaattctaccaagcagagatggaggagcttgactttatcagcgccgtagagaagtccagaaaacacataaacacctgggtagctgaaaagacagaaggtaaaattgcggagttgctctctccgggctcagtggatccattgacaaggctggttctggtgaatgctgtctatttcagaggaaactgggatgaacagtttgacaaggagaacaccgaggagagactgtttaaagtcagcaagaatgaggagaaacctgtgcaaatgatgtttaagcaatctacttttaagaagacctatataggagaaatatttacccaaatcttggtgcttccatatgttggcaaggaactgaatatgatcatcatgcttccggacgagaccactgacttgagaacggtggagaaagaactcacttacgagaagttcgtagaatggacgaggctggacatgatggatgaagaggaggtggaagtgtccctcccgcggtttaaactagaggaaagctacgacatggagagtgtcctgcgcaacctgggcatgactgatgccttcgagctgggcaaggcagacttctctggaatgtcccagacagacctgtctctgtccaaggtcgtgcacaagtcttttgtggaggtcaatgaggaaggcacggaggctgcagccgccacagctgccatcatgatgatgcggtgtgccagattcgtcccccgcttctgcgccgaccaccccttccttttcttcatccagcacagcaagaccaacgggattctcttctgcggccgcttttcctctccgtgaggacagggcagtcttggtgtgcagcccctctcctctctgtcccctgacactccacagtgtgcctgcaacccaagtggccttatccgtgcagtggtggcagttcagaaataaagggcccatttgtgggatgccgcattcaaaaaacaacacacacaacaacaagcaaaaaaaccgggacatagggggggaaaaaatataagggccagcgtgtaacacggtcgctacacccttttttcacaggggaaacggggcgcccaaagggggaatatacacatggtacatagtttacagagagtacattttgtatatctatactaatgacccaattaccattctggagtaacacatgcttcttcacctagagcacatcatctcatgtgcaatcggatagactctctcatatgtgtctgtacttctggttataccgatcgcg

SEQ ID NO: 327037 - DNA, 1504 bp, Homo sapiens
ggagtctcactctgtcgccaggctagagtgcagtggcacgatctcagctcactgcaacctccgcctcccgggttcaagcgattctctttcctcagcttcccgagtagctgggttacaggtacgcaccaccaggcccagctcatttttgtgtgtttagtagagatggggttttgccatgttggccaggctgatctcgaactcctgacctcaggtgatcctcccgccttggcctcccaaagtgctgggattataggcgtgagctgctgcgcccagcctcggatagatcttttaagcagtaataagggtctggatggttgttaggctgagtttggggttgccccatttcctgaagtcagagcatacaggaatgatttgttttcattctgtttttgatttcagatactttctttcaataaaagtggcggtggtggagacatccaccagggcttccagtctcttctcaccgaagtgaacaagactggcacgcagtacttgcttaggatggccaacaggctctttggggaaaagtcttgtgatttcctctcatcttttagagattcctgccaaaaattctaccaagcagagatggaggagcttgactttatcagcgccgtagagaagtccagaaaacacataaacacctgggtagctgaaaagacagaaggtaaaattgcggagttgctctctccgggctcagtggatccattgacaaggctggttctggtgaatgctgtctatttcagaggaaactgggatgaacagtttgacaaggagaacaccgaggagagactgtttaaagtcagcaagaatgaggagaaacctgtgcaaatgatgtttaagcaatctacttttaagaagacctatataggagaaatatttacccaaatcttggtgcttccatatgttggcaaggaactgaatatgatcatcatgcttccggacgagaccactgacttgagaacggtggagaaagaactcacttacgagaagttcgtagaatggacgaggctggacatgatggatgaagaggaggtggaagtgtccctcccgcggtttaaactagaggaaagctacgacatggagagtgtcctgcgcaacctgggcatgactgatgccttcgagctgggcaaggcagacttctctggaatgtcccagacagacctgtctctgtccaaggtcgtgcacaagtcttttgtggaggtcaatgaggaaggcacggaggctgcagccgccacagctgccatcatgatgatgcggtgtgccagattcgtcccccgcttctgcgccgaccaccccttccttttcttcatccagcacagcaagaccaacgggattctcttctgcggccgcttttcctctccgtgaggacagggcagtcttggtgtgcagcccctctcctctctgtcccctgacactccacagtgtgcctgcaacccaagtggccttatccgtgcagtggtggcagttcagaaataaagggcccatttgtgggatgccgcattca

SEQ ID NO: 327038 - DNA, 1663 bp, Homo sapiens
cttagctatcttatttactgaagctaaagaagtaggtccttaaaaagccattgacaggtcttgagtttgcaacgtgactgtgaaacaggcatccttgttactcacacgtttgctgaaaggataacagaaagccctcgatagaaaaatctcactagattgtttataatttgttgatatttggagtatcttgagtggtaaactttaaatgtggatttattttttctttccttttaggatttggatctctccaatcttttttatgattaattgttcagtgtttatgcattattgcgaagtgataatgaaaatgctcaaactcagggtcctgcaggcactgtgggggaggcagtggggacgtgaggggattacagatccagtagaagccccccgacccccatctgcttccaccccatctccttccagaacaccaccgatagccacaccgaagagttctcccatttgctggttcccggacaaaaaagctgctgatcccttgagcacactgcagtgaagctcccagctgacatgtcctgtccatgtaaacagaacttcctccatatactttctttcaataaaagtggcggtggtggagacatccaccagggcttccagtctcttctcaccgaagtgaacaagactggcacgcagtacttgcttaggatggccaacaggctctttggggaaaagtcttgtgatttcctctcatcttttagagattcctgccaaaaattctaccaagcagagatggaggagcttgactttatcagcgccgtagagaagtccagaaaacacataaacacctgggtagctgaaaagacagaaggtaaaattgcggagttgctctctccgggctcagtggatccattgacaaggctggttctggtgaatgctgtctatttcagaggaaactgggatgaacagtttgacaaggagaacaccgaggagagactgtttaaagtcagcaagaatgaggagaaacctgtgcaaatgatgtttaagcaatctacttttaagaagacctatataggagaaatatttacccaaatcttggtgcttccatatgttggcaaggaactgaatatgatcatcatgcttccggacgagaccactgacttgagaacggtggagaaagaactcacttacgagaagttcgtagaatggacgaggctggacatgatggatgaagaggaggtggaagtgtccctcccgcggtttaaactagaggaaagctacgacatggagagtgtcctgcgcaacctgggcatgactgatgccttcgagctgggcaaggcagacttctctggaatgtcccagacagacctgtctctgtccaaggtcgtgcacaagtcttttgtggaggtcaatgaggaaggcacggaggctgcagccgccacagctgccatcatgatgatgcggtgtgccagattcgtcccccgcttctgcgccgaccaccccttccttttcttcatccagcacagcaagaccaacgggattctcttctgcggccgcttttcctctccgtgaggacagggcagtcttggtgtgcagcccctctcctctctgtcccctgacactccacagtgtgcctgcaacccaagtggccttatccgtgcagtggtggcagttcagaaataaagggcccatttgtgggatgccgcattca

SEQ ID NO: 327039 - DNA, 1967 bp, Homo sapiens
gcactccccagtggatggccgtgtatcaggagccggcccttttctggaaacaggccagcattcagtctccacagaggcaccataaacacgctggtggggccctgtactgtggtcaaagtcaaggcctccgggcaggactcgcggcccctccggctggcgggtggggttgacccgcacgtcccgccccgcctctccctccgcgctccggacgggcgacggtagctcgagacccgggactccgcccgcctccccgcgagtatttgaggtccggggcggctccggcgcctctgcccgccgttctgctcgctcgctccccgctctggagtacgtgtctggcttgggagccgctcggacacgctggcttgggtttgtcgctccaaagtcgggaaagccgggggcgcgagcggggaggggggcagggtgggggtcgcgcggggccgggaacgcgcgtgggtcgacggcgcgcggggacgctggagccccgagaatggggcgtggccgcgcggggctgtgaccccagcagtcccagcggggcgggggcccgggcgagcgtccggcttgggttcccttccggagcctcgcagcggcagagaacggcgacgcggccgggtgagtcgtgcgtggccgcgagcccggccggtgacgccgcggacccgaggaccccgggcgcccaggcccagcgcccacggaagaggcggccggcgcgggatgggggcggcgcagagcctcccgggccacaggtctgccatcatggatgttctcgcagaagcaaatggcacctttgccttaaaccttttgaaaacgctgggtaaagacaactcgaagaatgtgtttttctcacccatgagcatgtcctgtgccctggccatggtctacatgggggcaaagggaaacaccgctgcacagatggcccagatactttctttcaataaaagtggcggtggtggagacatccaccagggcttccagtctcttctcaccgaagtgaacaagactggcacgcagtacttgcttaggatggccaacaggctctttggggaaaagtcttgtgatttcctctcatcttttagagattcctgccaaaaattctaccaagcagagatggaggagcttgactttatcagcgccgtagagaagtccagaaaacacataaacacctgggtagctgaaaagacagaaggttctggtgaatgctgtctatttcagaggaaactgggatgaacagtttgacaaggagaacaccgaggagagactgtttaaagtcagcaagaatgaggagaaacctgtgcaaatgatgtttaagcaatctacttttaagaagacctatataggagaaatatttacccaaatcttggtgcttccatatgttggcaaggaactgaatatgatcatcatgcttccggacgagaccactgacttgagaacggtggagaaagaactcacttacgagaagttcgtagaatggacgaggctggacatgatggatgaagaggaggtggaagtgtccctcccgcggtttaaactagaggaaagctacgacatggagagtgtcctgcgcaacctgggcatgactgatgccttcgagctgggcaaggcagacttctctggaatgtcccagacagacctgtctctgtccaaggtcgtgcacaagtcttttgtggaggtcaatgaggaaggcacggaggctgcagccgccacagctgccatcatgatgatgcggtgtgccagattcgtcccccgcttctgcgccgaccaccccttccttttcttcatccagcacagcaagaccaacgggattctcttctgcggccgcttttcctctccgtgaggacagggcagtcttggtgtgcagcccctctcctctctgtcccctgacactccacagtgtgcctgcaacccaagtggccttatccgtgcagtggtggcagttcagaaataaagggcccatttgtgggatgccgcattca

SEQ ID NO: 327040 - DNA, 2716 bp, Homo sapiens
  misc_feature (1979)..(1983): n is a, c, g, or t
  misc_feature (1985)..(1986): n is a, c, g, or t
ccatggattcgtggctaaactgcacatgtttattttctcagagttctgaggttggaggttggaaatgggttccgcagggccaggctcctccagaggatcctccttgcctttccagctactgcagctgtggtccttgcgtttcttggcttgaggcccttcatcttcaaggccagtggagtggcattttgctttattctttgcattgctttttcccgtgagatctccccctccctccctcttagaaggatacctgtgattacatttagggtcaactggaacaatccaggataatctcccatctcaagagcctgaatctaatcgtgctgcacagtcccttttgccatgtaaggggcattcacaggtcccagggattatgacccaggtatctttggagcacttgctcagccaaccccagctccaaatgtaaaggcatgcacagtggagagccgcttaattcagcatctcctcacagggcctccagtaggcacctccttccctctcccatctgctccaggaaatgtctgctccagcttctccccttccttgttccgtgggttcccactcactgctcaagtgagtcactgggactgtcttagaatgctggcattctctgactgggacatattcatttggtaaacatctgagaactgtgtcagagcaggcaggccccgcatccctgcattcctgcatcccctccttcccagcctgactgcctgtggggcccttagctgccccttgtcctctcacctgattctgcagattcttcttcttgagcagcagctcagaaagcgcatccgccctgcgtttcaagcccagctacttcttagcttcacttccgtcaacttcaccttccctgtagtgcagtggggcattgatggtaggtctctctaagggcttggtggactttaacatgtgattctgtgattccgacttgcctgaagataccccagctcccccctcccgactatccagctgcattcctgctctggaccctgctggggctgccacacccactgcacggcagggctagagagatgtgcagcctgaccctacccctgagcctgtctgtgaaggtggagatgggcatgcacccacagcccatgaggcaaggtggtgtcctgagtgtgctgtgagttcaggcgcaggaaggcctggcttgttgcagcaggatgtccccaagcgtggtccaaaattggggctttgccacctgcagggatttcctagaaggagatccaagggtcaggaggcatttgaaaggctttcacgcatctttgtatgtggcttgattgatccttttttaaggctcttgctacccagaaatgggattctctctctcattataaaaacatttggccatcttttcttgtgtaactgtcagtgaatgtatcattttgaatatttttcaaattaaaacagtacatttaagcccgcaaaacacaccaaagaatacaaacatagaagcaaaagccagtgccccttctgtaattccaccccaaggaagagactccaggaaagggtgcctccttcccactttctccacgtgcgggcaggcgtgcagggaggagtcctcacaaaacagggcggcgtttcacatagaactctttcattttccacacttaacattagaaacacacaaaataatgtggagggtcctaaaaagaaacagccagagttctgtgtgtgtttctgcttgcccactgaaccacagcatcggcggtgactgtcggtaaggcgcgtgagatgcagtcgcgtggaagctgtgcttaagtgatactgattttaaatcttgttccaggtctgccatcatggatgttctcgcagaagcaaatggcacctttgccttaaaccttttgaaaacgctgggtaaagacaactcgaagaatgtgtttttctcacccatgagcatgtcctgtgccctggccatggtctacatgggggcaaagggaaacaccgctgcacagatggcccagtttctttcnnnnnanntggcggtggtggagactgtttaaagtcagcaagaatgaggagaaacctgtgcaaatgatgtttaagcaatctacttttaagaagacctatataggagaaatatttacccaaatcttggtgcttccatatgttggcaaggaactgaatatgatcatcatgcttccggacgagaccactgacttgagaacggtggagaaagaactcacttacgagaagttcgtagaatggacgaggctggacatgatggatgaagaggaggtggaagtgtccctcccgcggtttaaactagaggaaagctacgacatggagagtgtcctgcgcaacctgggcatgactgatgccttcgagctgggcaaggcagacttctctggaatgtcccagacagacctgtctctgtccaaggtcgtgcacaagtcttttgtggaggtcaatgaggaaggcacggaggctgcagccgccacagctgccatcatgatgatgcggtgtgccagattcgtcccccgcttctgcgccgaccaccccttccttttcttcatccagcacagcaagaccaacgggattctcttctgcggccgcttttcctctccgtgaggacagggcagtcttggtgtgcagcccctctcctctctgtcccctgacactccacagtgtgcctgcaacccaagtggccttatccgtgcagtggtggcagttcagaaataaagggcccatttgtgggatgccgcattca

SEQ ID NO: 327041 - DNA, 1371 bp, Homo sapiens
  misc_feature (1334)..(1334): n is a, c, g, or t
gcactccccagtggatggccgtgtatcaggagccggcccttttctggaaacaggccagcattcagtctccacagaggcaccataaacacgctggtggggccctgtactgtggtcaaagtcaaggcctccgggcaggactcgcggcccctccggctggcgggtggggttgacccgcacgtcccgccccgcctctccctccgcgctccggacgggcgacggtagctcgagacccgggactccgcccgcctccccgcgagtatttgaggtccggggcggctccggcgcctctgcccgccgttctgctcgctcgctccccgctctggagtctgccatcatggatgttctcgcagaagcaaatggcacctttgccttaaaccttttgaaaacgctgggtaaagacaactcgaagaatgtgtttttctcacccatgagcatgtcctgtgccctggccatggtctacatgggggcaaagggaaacaccgctgcacagatggcccagatactttctttcaataaaagtggcggtggtggagacatccaccagggcttccagtctcttctcaccgaagtgaacaagactggcacgcagtacttgcttaggatggccaacaggctctttggggaaaagtcttgtgatttcctctcatcttttagagattcctgccaaaaattctaccaagcagagatggaggagcttgactttatcagcgccgtagagaagtccagaaaacacataaacacctgggtagctgaaaagacagaaggtaaaattgcggagttgctctctccgggctcagtggatccattgacaaggctggttctggtgaatgctgtctatttcagaggaaactgggatgaacagtttgacaaggagaacaccgaggagagactgtttaaagtcagcaagaatgaggagaaacctgtgcaaatgatgtttaagcaatctacttttaagaagacctatataggagaaatatttacccaaatcttggtgcttccatatgttggcaaggaactgaatatgatcatcatgcttccggacgagaccactgacttgagaacggtggagaaagaactcacttacgagaagttcgtagaatggacgaggctggacatgatggatgaagaggaggtggaagtgtccctccaggcacggaggctgcagccgccacagctgccatcatgatgatgcggtgtgccagattcgtcccccgcttctgcgccgaccaccccttccttttcttcatccagcacagcaagaccaacgggattctcttctgcggcccagcttatgaactttagtccggattcctctgccggctgctgcaatgttntgctgtttccctctccgtgggggggggggggggggga

SEQ ID NO: 327042 - DNA, 1306 bp, Homo sapiens
gcactccccagtggatggccgtgtatcaggagccggcccttttctggaaacaggccagcattcagtctccacagaggcaccataaacacgctggtggggccctgtactgtggtcaaagtcaaggcctccgggcaggactcgcggcccctccggctggcgggtggggttgacccgcacgtcccgccccgcctctccctccgcgctccggacgggcgacggtagctcgagacccgggactccgcccgcctccccgcgagtatttgaggtccggggcggctccggcgcctctgcccgccgttctgctcgctcgctccccgctctggagtctgccatcatggatgttctcgcagaagcaaatggcacctttgccttaaaccttttgaaaacgctgggtaaagacaactcgaagaatgtgtttttctcacccatgagcatgtcctgtgccctggccatggtctacatgggggcaaagggaaacaccgctgcacagatggcccagatactttctttcaataaaagtggcggtggtggagacatccaccagggcttccagtctcttctcaccgaagtgaacaagactggcacgcagtacttgcttaggatggccaacaggctctttggggaaaagtcttgtgatttcctctcatcttttagagattcctgccaaaaattctaccaagcagagatggaggagcttgactttatcagcgccgtagagaagtccagaaaacacataaacacctgggtagctgaaaagacagaaggtaaaattgcggagttgctctctccgggctcagtggatccattgacaaggctggttctggtgaatgctgtctatttcagaggaaactgggatgaacagtttgacaaggagaacaccgaggagagactgtttaaagtcagcaagaatgaggagaaacctgtgcaaatgatgtttaagcaatctacttttaagaagacgacctgtctctgtccaaggtcgtgcacaagtcttttgtggaggtcaatgaggaaggcacggaggctgcagccgccacagctgccatcatgatgatgcggtgtgccagattcgtcccccgcttctgcgccgaccaccccttccttttcttcatccagcacagcaagaccaacgggattctcttctgcggccgcttttcctctccgtgaggacagggcagtcttggtgtgcagcccctctcctctctgtcccctgacactccacagtgtgcctgcaacccaagtggccttatccgtgcagtggtggcagttcagaaataaagggcccatttgtgggatgccgcattca

SEQ ID NO: 327043 - DNA, 1088 bp, Homo sapiens
gcactccccagtggatggccgtgtatcaggagccggcccttttctggaaacaggccagcattcagtctccacagaggcaccataaacacgctggtggggccctgtactgtggtcaaagtcaaggcctccgggcaggactcgcggcccctccggctggcgggtggggttgacccgcacgtcccgccccgcctctccctccgcgctccggacgggcgacggtagctcgagacccgggactccgcccgcctccccgcgagtatttgaggtccggggcggctccggcgcctctgcccgccgttctgctcgctcgctccccgctctggagtctgccatcatggatgttctcgcagaagcaaatggcacctttgccttaaaccttttgaaaacgctgggtaaagacaactcgaagaatgtgtttttctcacccatgagcatgtcctgtgccctggccatggtctacatgggggcaaagggaaacaccgctgcacagatggcccagatactttctttcaataaaagtggcggtggtggagacatccaccagggcttccagtctcttctcaccgaagtgaacaagactggcacgcagtacttgcttaggatggccaacaggctctttggggaaaagtcttgtgatttcctctcatcttttagagattcctgccaaaaattctaccaagcagagatggaggagcttgactttatcagcgccgtagagaagtccagaaaacacataaacacctgggtagctgaaaagacagaaggtaaaattgcggagttgctctctccgggctcagtggatccattgacaaggctggttctggtgaatgctgtctatttcagaggaaactgggatgaacagtttgacaaggagaacaccgaggagagactgtttaaagtcagcaagaccaacgggattctcttctgcggccgcttttcctctccgtgaggacagggcagtcttggtgtgcagcccctctcctctctgtcccctgacactccacagtgtgcctgcaacccaagtggccttatccgtgcagtggtggcagttcagaaataaagggcccatttgtgggatgccgcattca

SEQ ID NO: 327044 - DNA, 1130 bp, Homo sapiens
gcactccccagtggatggccgtgtatcaggagccggcccttttctggaaacaggccagcattcagtctccacagaggcaccataaacacgctggtggggccctgtactgtggtcaaagtcaaggcctccgggcaggactcgcggcccctccggctggcgggtggggttgacccgcacgtcccgccccgcctctccctccgcgctccggacgggcgacggtagctcgagacccgggactccgcccgcctccccgcgagtatttgaggtccggggcggctccggcgcctctgcccgccgttctgctcgctcgctccccgctctggagtacgtgtctggcttgggagccgctcggacacgctggcttgggtctgccatcatggatgttctcgcagaagcaaatggcacctttgccttaaaccttttgaaaacgctgggtaaagacaactcgaagaatgtgtttttctcacccatgagcatgtcctgtgccctggccatggtctacatgggggcaaagggaaacaccgctgcacagatggcccagatactttctttcaataaaagtggcggtggtggagacatccaccagggcttccagtctcttctcaccgaagtgaacaagactggcacgcagtacttgcttaggatggccaacaggctctttggggaaaagtcttgtgatttcctctcatcttttagagattcctgccaaaaattctaccaagcagagatggaggagcttgactttatcagcgccgtagagaagtccagaaaacacataaacacctgggtagctgaaaagacagaaggtaaaattgcggagttgctctctccgggctcagtggatccattgacaaggctggttctggtgaatgctgtctatttcagaggaaactgggatgaacagtttgacaaggagaacaccgaggagagactgtttaaagtcagcaagaccaacgggattctcttctgcggccgcttttcctctccgtgaggacagggcagtcttggtgtgcagcccctctcctctctgtcccctgacactccacagtgtgcctgcaacccaagtggccttatccgtgcagtggtggcagttcagaaataaagggcccatttgtgggatgccgcattca

SEQ ID NO: 327045 - DNA, 1487 bp, Homo sapiens
agtagggaggcggcaacgacgcctgcgcagtgtgaccgggatggcgcattttcttgcaccaactaatgcggtgtcgctggcggctgaggagggcggagagttctgtggtgaaatagtgggaaggattcatgtaggcatcgggaagagcctaagtccacattataaaataggaagttgatgcggggtacagttactcccggaccggcggcgtgaaagtcgtgatatcatcgttgaactattagctttgaagtttaaatccaatggagaagactcaagaaacagtccaaagaattcttctagaaccctataaatacttacttcagttaccaggtaaacaagtgagaaccaaactttcacaggcatttaatcattggctgaaagttccagaggacaagctacagattattattgaagtgacagaaatgttgcataatgccagtttactcatcgatgatattgaagacaactcaaaactccgacgtggctttccagtggcccacagcatctatggaatcccatctgtcatcaattctgccaattacgtgtatttccttggcttggagaaagtcttaacccttgatcacccagatgcagtgaagctttttacccgccagcttttggaactccatcagggacaaggcctagatatttactggagggataattacacttgtcccactgaagaagaatataaagctatggtgctgcagaaaacaggtggactgtttggattagcagtaggtctcatgcagttgttctctgattacaaagaagatttaaaaccgctacttaatacacttgggctctttttccaaattagggatgattatgctaatctacactccaaagaatatagtgaaaacaaaagtttttgtgaagatctgacagagggaaagttctcatttcctactattcatgctatttggtcaaggcctgaaagcacccaggtgcagaatatcttgcgccagagaacagaaaacatagatataaaaaaatactgtgtacattatcttgaggatgtaggttcttttgaatacactcgtaatacccttaaagagcttgaagctaaagcctataaacagattgatgcacgtggtgggaaccctgagctagtagccttagtaaaacacttaagtaagatgttcaaagaagaaaatgaataatgttaagccattcttgattggacctcatagcttattttagttaatcttttttttgtcttttagccttaccaccttttaaaaaatttgttattctccagaaacagtaaataggtgagtaggggtggtgcaagtgaattcgttttcatttagaagcccctctgtacagataatcaaaattcaaagttgaaagaatcaaaagcagccacagttatgtaggtctgatttgaatgtcataattgcagtgacaggacattgccaccaactctatcctactaccatcaatgttgtgtttattccgtcaataaaaaagacttgcttccagga

SEQ ID NO: 327046 - DNA, 2921 bp, Homo sapiens
agtagggaggcggcaacgacgcctgcgcagtgtgaccgggatggcgcattttcttgcaccaactaatgcggtgtcgctggcggctgaggagggcggagagttctgtggtgaaatagtgggaaggattcatgtaggcatcgggaagagcctaagtccacattataaaataggaagttgatgcggggtacagttactcccggaccggcggcgtgaaagtcgtgatatcatcgttgaactattagctttgaagtttaaatccaatggagaagactcaagaaacagtccaaagaattcttctagaaccctataaatacttacttcagttaccaggtaaacaagtgagaaccaaactttcacaggcatttaatcattggctgaaagttccagaggacaagctacagattattattgaagtgacagaaatgttgcataatgccagtttactcatcgatgatattgaagacaactcaaaactccgacgtggctttccagtggcccacagcatctatggaatcccatctgtcatcaattctgccaattacgtgtatttccttggcttggagaaagtcttaacccttgatcacccagatgcagtgaagctttttacccgccagcttttggaactccatcagggacaaggcctagatatttactggagggataattacacttgtcccactgaagaagaatataaagctatggtgctgcagaaaacaggtggactgtttggattagcagtaggtctcatgcagttgttctctgattacaaagaagatttaaaaccgctacttaatacacttgggctctttttccaaattagggatgattatgctaatctacactccaaagaatatagtgaaaacaaaagtttttgtgaagatctgacagagggaaagttctcatttcctactattcatgctatttggtcaaggcctgaaagcacccaggtgcagaatatcttgcgccagagaacagaaaacatagatataaaaaaatactgtgtacattatcttgaggatgtaggttcttttgaatacactcgtaatacccttaaagagcttgaagctaaagcctataaacagattgatgcacgtggtgggaaccctgagctagtagccttagtaaaacacttaagtaagatgttcaaagaagaaaatgaataatgttaagccattcttgattggacctcatagcttattttagttaatcttttttttgtcttttagccttaccaccttttaaaaaatttgttattctccagaaacagtaaataggtgagtaggggtggtgcaagtgaattcgttttcatttagaagcccctctgtacagataatcaaaattcaaagttgaaagaatcaaaagcagccacagttatgtaggtctgatttgaatgtcataattgcagtgacaggacattgccaccaactctatcctactaccatcaatgttgtgtttattccgtcaataaaaaagacttgcttccaggaatttttatccatacactttctaactgtactatctgggcagttccaagccagtttctattagctagctggaccaaagaccacaaatctctttttttcctaaacgctgctgtaaggaatatctcacttttccccccggaaacaccctcactgaagtcttctatgaaaaggctgataatgggctgggcgcggtggctcacgcctgtaatcccagcactttgggaggccgaggcgggcagatcacgaggtcaggagatcgagaccatcctgacacggtgaaaccctgtctctactaaaaatacaaaaaattagctgggcgtggtggtgggcgcctgtagtcccagctactcgggaggctgaggcaggagaatggtgtgaacccaggaggcggagcttgcagtgagccgagatagtgcctctgcactccagcctgggtgacagagcaagactccgtctcaaaaaaaaagggctgataatgataaacagtgagcactccggtcctttttcttacgttttccttttttccttcctctccaccccacaagttttgctttttaaccaaggtgtctctgcttgatgaaattcacatgctagtctaaatctttttttctcccttgtaacatttatgtgccccaaactggttagtatatgggtacagcattccctttccaattgggaagcggaaaaagagagtatgggatattttagaagggagcctttgaaccttattatatttccccatcattgatagtgacaatcttaaaagggttgttttcttaccttaagtacaaaagcatggaaaaatgcgcttttccttcccgcccacatcaccaccccgacttgaagacagtaggtgcttgaatggaaagtgagtaggcatctttaatcgccctgattaaaggaaagtgttagcctgagagggcctgactgaaaagtaaccaaaggcttaatatcaaacactaattagctttttagtgccttaaccctgacctggttaccagttttctgtagtttctacacccaagccactgaagtcatctgtggcccaagaggtaggacaaaaaaaaaaaaaaaaaaagctgatttcaatatttgatttgttgacatcccaaaatgaaagttttatgtttcccttagaaacatgttttgcttggttctatagtatgttacttaggatctatttaccatatatttgtatgagaaatcctcacccaagcattcaacctaaatctttgaaaagttgggtgctgtctttagtaacttttaaaatagtttaaatctcccattttaatagtgataaggaaacctgttaaaatcatggctattgatgttatagtatggaaagttgaactttatgaacccatacttttaaaaagcatttttaaaaatctaacactgactatagaaacaaattaaaatgtctacctttaagtataa

SEQ ID NO: 327047 - DNA, 2894 bp, Homo sapiens
agtagggaggcggcaacgacgcctgcgcagtgtgaccgggatggcgcattttcttgcaccaactaatgcggtgtcgctggcggctgaggagggcggagagttctgtggtgaaatagtgggaaggattcatgtaggcatcgggaagagcctaagtccacattataaaataggaagttgatgcggggtacagttactcccggaccggcggcgtgaaagtcgtgatatcatcgttgaactattagctttgaagtttaaatccaatggagaagactcaagaaacagtccaaagaattcttctagaaccctataaatacttacttcagttaccaggtaaacaagtgagaaccaaactttcacaggcatttaatcattggctgaaagttccagaggacaagctacagattattattgaagtgacagaaatgttgcataatgccagtttactcatcgatgatattgaagacaactcaaaactccgacgtggctttccagtggcccacagcatctatggaatcccatctgtcatcaattctgccaattacgtgtatttccttggcttggagaaagtcttaacccttgatcacccagatgcagtgaagctttttacccgccagcttttggaactccatcagggacaaggcctagatatttactggagggataattacacttgtcccactgaagaagaatataaagctatggtgctgcagaaaacaggtggactgtttggattagcagtaggtctcatgcagttgttctctgattacaaagaagatttaaaaccgctacttaatacacttgggctctttttccaaattagggatgattatgctaatctacactccaaagaatatagtgaaaacaaaagtttttgtgaagatctgacagagggaaagttctcatttcctactattcatgctatttggtcaaggcctgaaagcacccaggtgcagaatatcttgcgccagagaacagaaaacatagatataaaaaaatactgtgtacattatcttgaggatgtaggttcttttgaatacactcgtaatacccttaaagagcttgaagctaaagcctataaacagattgatgcacgtggtgggaaccctgagctagtagccttagtaaaacacttaagtaagatgttcaaagaagaaaatgaataatgttaagccattcttgattggacctcatagcttattttagttaatcttttttttgtcttttagccttaccaccttttaaaaaatttgttattctccagaaacagtaaataggtgagtaggggtggtgcaagtgaattcgttttcatttagaagcccctctgtacagataatcaaaattcaaagttgaaagaatcaaaagcagccacagttatgtaggtctgatttgaatgtcataattgcagtgacaggacattgccaccaactctatcctactaccatcaatgttgtgtttattccgtcaataaaaaagacttgcttccaggaatttttatccatacactttctaactgtactatctgggcagttccaagccagtttctattagctagctggaccaaagaccacaaatctctttttttcctaaacgctgctgtaaggaatatctcacttttccccccggaaacaccctcactgaagtcttctatgaaaaggctgataatgggctgggcgcggtggctcacgcctgtaatcccagcactttgggaggccgaggcgggcagatcacgaggtcaggagatcgagaccatcctgacacggtgaaaccctgtctctactaaaaatacaaaaaattagctgggcgtggtggtgggcgcctgtagtcccagctactcgggaggctgaggcaggagaatggtgtgaacccaggaggcggagcttgcagtgagccgagatagtgcctctgcactccagcctgggtgacagagcaagactccgtctcaaaaaaaaagggctgataatgataaacagtgagcactccggtcctttttcttacgttttccttttttccttcctctccaccccacaagttttgctttttaaccaaggtgtctctgcttgatgaaattcacatgctagtctaaatctttttttctcccttgtaacatttatgtgccccaaactggttagtatatgggtacagcattccctttccaattgggaagcggaaaaagagagtatgggatattttagaagggagcctttgaaccttattatatttccccatcattgatagtgacaatcttaaaagggttgttttcttaccttaagtacaaaagcatggaaaaatgcgcttttccttcccgcccacatcaccaccccgacttgaagacagtaggtgcttgaatggaaagtgagtaggcatctttaatcgccctgattaaaggaaagtgttagcctgagagggcctgactgaaaagtaaccaaaggcttaatatcaaacactaattagctttttagtgccttaaccctgacctggttaccagttttctgtagtttctacacccaagccactgaagtcatctgtggcccaagaggtaggacaaaaaaaaaaaaaaaaaaagctgatttcaatatttgatttgttgacatcccaaaatgaaagttttatgtttcccttagaaacatgttttgcttggttctatagtatgttacttaggatctatttaccatatatttgtatgagaaatcctcacccaagcattcaacctaaatctttgaaaagttgggtgctgtctttagtaacttttaaaatagtttaaatctcccattttaatagtgataaggaaacctgttaaaatcatggctattgatgttatagtatggaaagttgaactttatgaacccatacttttaaagcattgattgtagcacctgctgggtcctctaggtcag

SEQ ID NO: 327048 - DNA, 4128 bp, Homo sapiens
agtagggaggcggcaacgacgcctgcgcagtgtgaccgggatggcgcattttcttgcaccaactaatgcggtgtcgctggcggctgaggagggcggagagttctgtggtgaaatagtgggaaggattcatgtaggcatcgggaagagcctaagtccacattataaaataggaagttgatgcggggtacagttactcccggaccggcggcgtgaaagtcgtgatatcatcgttgaactgtgagcggcagtggcggcggctggggggaacccggatgggaagaagggcgggggaggctgggaggcggggcagaggaaagaaagaaaggagagtgaggacccggatgctgaaccggattgtgtatgaattttccatcccctagctttaagcgaggagggagaggaagggttggccaagtggggcggaagggagcatctgagcgaggaggaagcagaaacctcaccgtttcttcccctccggactctgtgctagcactgtatacgtttgcagttctctgcccagccgctgtggaaaatcggcctcgaagtgattgaaattccctgtttatatcaggcggcttctttcagatccatcgtctttctcccggagtatgaatggaaggattcagtatgcgcttcacatttgtatgtctctggccattctcaaaccaggcccttccctttgaaaagtcgtttgcatgggatgttcacttcttagacgcaaggttgtgtgccctggtttcatcgtctaacgcgttagaaggcgctttcatttcttcatgggtgttgagcgccgaccactggggtggcctctgccttcgtagacctgcgcctggtgagacggacagatgctgaacaaaacgatgtgaaattaccgcagtggcagtgccccagaggagagttccacggtgataggagaatgagggaatttggcttctttagggagggaaaggaagggtttctgagcaagtgaggatcgagctgagagctgaagggctagcaggagttaactaaggaaagagaaaaggaaaagacattccagacaaaaagactaacttgtcagaaagccctgtggcggaagggagcttttccaatatgaagaactgagcctggagagatgggatgagggggagtgtcgaaccttttaggctttgtaaaggagttttggttttctcctaatagcaatgggatatcttccaaggaatctcaatcaaaagggagagatggctccgattggaatgtcatccctggctgaagagtagaggaagcgaaaaaaagaagagttaaagaggcaaatgcagggaacccgacgaggaggctattgccgtagtagttcacatggtgaaaagaatggagcgtttgtattaatgattatggattcactctttgaacaaatttctggcagctttttagttttgaaagtgagaagtttcagactctcactgagattagctttgaagtttaaatccaatggagaagactcaagaaacagtccaaagaattcttctagaaccctataaatacttacttcagttaccaggtaaacaagtgagaaccaaactttcacaggcatttaatcattggctgaaagttccagaggacaagctacagattattattgaagtgacagaaatgttgcataatgccagtttactcatcgatgatattgaagacaactcaaaactccgacgtggctttccagtggcccacagcatctatggaatcccatctgtcatcaattctgccaattacgtgtatttccttggcttggagaaagtcttaacccttgatcacccagatgcagtgaagctttttacccgccagcttttggaactccatcagggacaaggcctagatatttactggagggataattacacttgtcccactgaagaagaatataaagctatggtgctgcagaaaacaggtggactgtttggattagcagtaggtctcatgcagttgttctctgattacaaagaagatttaaaaccgctacttaatacacttgggctctttttccaaattagggatgattatgctaatctacactccaaagaatatagtgaaaacaaaagtttttgtgaagatctgacagagggaaagttctcatttcctactattcatgctatttggtcaaggcctgaaagcacccaggtgcagaatatcttgcgccagagaacagaaaacatagatataaaaaaatactgtgtacattatcttgaggatgtaggttcttttgaatacactcgtaatacccttaaagagcttgaagctaaagcctataaacagattgatgcacgtggtgggaaccctgagctagtagccttagtaaaacacttaagtaagatgttcaaagaagaaaatgaataatgttaagccattcttgattggacctcatagcttattttagttaatcttttttttgtcttttagccttaccaccttttaaaaaatttgttattctccagaaacagtaaataggtgagtaggggtggtgcaagtgaattcgttttcatttagaagcccctctgtacagataatcaaaattcaaagttgaaagaatcaaaagcagccacagttatgtaggtctgatttgaatgtcataattgcagtgacaggacattgccaccaactctatcctactaccatcaatgttgtgtttattccgtcaataaaaaagacttgcttccaggaatttttatccatacactttctaactgtactatctgggcagttccaagccagtttctattagctagctggaccaaagaccacaaatctctttttttcctaaacgctgctgtaaggaatatctcacttttccccccggaaacaccctcactgaagtcttctatgaaaaggctgataatgggctgggcgcggtggctcacgcctgtaatcccagcactttgggaggccgaggcgggcagatcacgaggtcaggagatcgagaccatcctgacacggtgaaaccctgtctctactaaaaatacaaaaaattagctgggcgtggtggtgggcgcctgtagtcccagctactcgggaggctgaggcaggagaatggtgtgaacccaggaggcggagcttgcagtgagccgagatagtgcctctgcactccagcctgggtgacagagcaagactccgtctcaaaaaaaaagggctgataatgataaacagtgagcactccggtcctttttcttacgttttccttttttccttcctctccaccccacaagttttgctttttaaccaaggtgtctctgcttgatgaaattcacatgctagtctaaatctttttttctcccttgtaacatttatgtgccccaaactggttagtatatgggtacagcattccctttccaattgggaagcggaaaaagagagtatgggatattttagaagggagcctttgaaccttattatatttccccatcattgatagtgacaatcttaaaagggttgttttcttaccttaagtacaaaagcatggaaaaatgcgcttttccttcccgcccacatcaccaccccgacttgaagacagtaggtgcttgaatggaaagtgagtaggcatctttaatcgccctgattaaaggaaagtgttagcctgagagggcctgactgaaaagtaaccaaaggcttaatatcaaacactaattagctttttagtgccttaaccctgacctggttaccagttttctgtagtttctacacccaagccactgaagtcatctgtggcccaagaggtaggacaaaaaaaaaaaaaaaaaaagctgatttcaatatttgatttgttgacatcccaaaatgaaagttttatgtttcccttagaaacatgttttgcttggttctatagtatgttacttaggatctatttaccatatatttgtatgagaaatcctcacccaagcattcaacctaaatctttgaaaagttgggtgctgtctttagtaacttttaaaatagtttaaatctcccattttaatagtgataaggaaacctgttaaaatcatggctattgatgttatagtatggaaagttgaactttatgaacccatacttttaaaaagcatttttaaaaatctaacactgactatagaaacaaattaaaatgtctacctttaagtataa

SEQ ID NO: 327049 - DNA, 2940 bp, Homo sapiens
ccccctcccctacctctttcccggatggcctcttagacgaccttggattggttaaagttctttagaacccgcctatacactgttcctattggtccctggatacaaacaacgacgccattttcccaccagttctatggaaacagaaagttacgcctcaaggctttctgggaaataaagtccatactctggggccaacgcgcaaatcctcgtccgcgagaactgcaaggcccgcaatgccctgcgcctgcgtggaccgattagctttgaagtttaaatccaatggagaagactcaagaaacagtccaaagaattcttctagaaccctataaatacttacttcagttaccaggtaaacaagtgagaaccaaactttcacaggcatttaatcattggctgaaagttccagaggacaagctacagattattattgaagtgacagaaatgttgcataatgccagtttactcatcgatgatattgaagacaactcaaaactccgacgtggctttccagtggcccacagcatctatggaatcccatctgtcatcaattctgccaattacgtgtatttccttggcttggagaaagtcttaacccttgatcacccagatgcagtgaagctttttacccgccagcttttggaactccatcagggacaaggcctagatatttactggagggataattacacttgtcccactgaagaagaatataaagctatggtgctgcagaaaacaggtggactgtttggattagcagtaggtctcatgcagttgttctctgattacaaagaagatttaaaaccgctacttaatacacttgggctctttttccaaattagggatgattatgctaatctacactccaaagaatatagtgaaaacaaaagtttttgtgaagatctgacagagggaaagttctcatttcctactattcatgctatttggtcaaggcctgaaagcacccaggtgcagaatatcttgcgccagagaacagaaaacatagatataaaaaaatactgtgtacattatcttgaggatgtaggttcttttgaatacactcgtaatacccttaaagagcttgaagctaaagcctataaacagattgatgcacgtggtgggaaccctgagctagtagccttagtaaaacacttaagtaagatgttcaaagaagaaaatgaataatgttaagccattcttgattggacctcatagcttattttagttaatcttttttttgtcttttagccttaccaccttttaaaaaatttgttattctccagaaacagtaaataggtgagtaggggtggtgcaagtgaattcgttttcatttagaagcccctctgtacagataatcaaaattcaaagttgaaagaatcaaaagcagccacagttatgtaggtctgatttgaatgtcataattgcagtgacaggacattgccaccaactctatcctactaccatcaatgttgtgtttattccgtcaataaaaaagacttgcttccaggaatttttatccatacactttctaactgtactatctgggcagttccaagccagtttctattagctagctggaccaaagaccacaaatctctttttttcctaaacgctgctgtaaggaatatctcacttttccccccggaaacaccctcactgaagtcttctatgaaaaggctgataatgggctgggcgcggtggctcacgcctgtaatcccagcactttgggaggccgaggcgggcagatcacgaggtcaggagatcgagaccatcctgacacggtgaaaccctgtctctactaaaaatacaaaaaattagctgggcgtggtggtgggcgcctgtagtcccagctactcgggaggctgaggcaggagaatggtgtgaacccaggaggcggagcttgcagtgagccgagatagtgcctctgcactccagcctgggtgacagagcaagactccgtctcaaaaaaaaagggctgataatgataaacagtgagcactccggtcctttttcttacgttttccttttttccttcctctccaccccacaagttttgctttttaaccaaggtgtctctgcttgatgaaattcacatgctagtctaaatctttttttctcccttgtaacatttatgtgccccaaactggttagtatatgggtacagcattccctttccaattgggaagcggaaaaagagagtatgggatattttagaagggagcctttgaaccttattatatttccccatcattgatagtgacaatcttaaaagggttgttttcttaccttaagtacaaaagcatggaaaaatgcgcttttccttcccgcccacatcaccaccccgacttgaagacagtaggtgcttgaatggaaagtgagtaggcatctttaatcgccctgattaaaggaaagtgttagcctgagagggcctgactgaaaagtaaccaaaggcttaatatcaaacactaattagctttttagtgccttaaccctgacctggttaccagttttctgtagtttctacacccaagccactgaagtcatctgtggcccaagaggtaggacaaaaaaaaaaaaaaaaaaagctgatttcaatatttgatttgttgacatcccaaaatgaaagttttatgtttcccttagaaacatgttttgcttggttctatagtatgttacttaggatctatttaccatatatttgtatgagaaatcctcacccaagcattcaacctaaatctttgaaaagttgggtgctgtctttagtaacttttaaaatagtttaaatctcccattttaatagtgataaggaaacctgttaaaatcatggctattgatgttatagtatggaaagttgaactttatgaacccatacttttaaaaagcatttttaaaaatctaacactgactatagaaacaaattaaaatgtctacctttaagtataa

SEQ ID NO: 327050 - DNA, 2828 bp, Homo sapiens
agtagggaggcggcaacgacgcctgcgcagtgtgaccgggatggcgcattttcttgcaccaactaatgcggtgtcgctggcggctgaggagggcggagagttctgtggtgaaatagtgggaaggattcatgtaggcatcgggaagagcctaagtccacattataaaataggaagttgatgcggggtacagttactcccggaccggcggcgtgaaagtcgtgatatcatcgttgaactgtaaacaagtgagaaccaaactttcacaggcatttaatcattggctgaaagttccagaggacaagctacagattattattgaagtgacagaaatgttgcataatgccagtttactcatcgatgatattgaagacaactcaaaactccgacgtggctttccagtggcccacagcatctatggaatcccatctgtcatcaattctgccaattacgtgtatttccttggcttggagaaagtcttaacccttgatcacccagatgcagtgaagctttttacccgccagcttttggaactccatcagggacaaggcctagatatttactggagggataattacacttgtcccactgaagaagaatataaagctatggtgctgcagaaaacaggtggactgtttggattagcagtaggtctcatgcagttgttctctgattacaaagaagatttaaaaccgctacttaatacacttgggctctttttccaaattagggatgattatgctaatctacactccaaagaatatagtgaaaacaaaagtttttgtgaagatctgacagagggaaagttctcatttcctactattcatgctatttggtcaaggcctgaaagcacccaggtgcagaatatcttgcgccagagaacagaaaacatagatataaaaaaatactgtgtacattatcttgaggatgtaggttcttttgaatacactcgtaatacccttaaagagcttgaagctaaagcctataaacagattgatgcacgtggtgggaaccctgagctagtagccttagtaaaacacttaagtaagatgttcaaagaagaaaatgaataatgttaagccattcttgattggacctcatagcttattttagttaatcttttttttgtcttttagccttaccaccttttaaaaaatttgttattctccagaaacagtaaataggtgagtaggggtggtgcaagtgaattcgttttcatttagaagcccctctgtacagataatcaaaattcaaagttgaaagaatcaaaagcagccacagttatgtaggtctgatttgaatgtcataattgcagtgacaggacattgccaccaactctatcctactaccatcaatgttgtgtttattccgtcaataaaaaagacttgcttccaggaatttttatccatacactttctaactgtactatctgggcagttccaagccagtttctattagctagctggaccaaagaccacaaatctctttttttcctaaacgctgctgtaaggaatatctcacttttccccccggaaacaccctcactgaagtcttctatgaaaaggctgataatgggctgggcgcggtggctcacgcctgtaatcccagcactttgggaggccgaggcgggcagatcacgaggtcaggagatcgagaccatcctgacacggtgaaaccctgtctctactaaaaatacaaaaaattagctgggcgtggtggtgggcgcctgtagtcccagctactcgggaggctgaggcaggagaatggtgtgaacccaggaggcggagcttgcagtgagccgagatagtgcctctgcactccagcctgggtgacagagcaagactccgtctcaaaaaaaaagggctgataatgataaacagtgagcactccggtcctttttcttacgttttccttttttccttcctctccaccccacaagttttgctttttaaccaaggtgtctctgcttgatgaaattcacatgctagtctaaatctttttttctcccttgtaacatttatgtgccccaaactggttagtatatgggtacagcattccctttccaattgggaagcggaaaaagagagtatgggatattttagaagggagcctttgaaccttattatatttccccatcattgatagtgacaatcttaaaagggttgttttcttaccttaagtacaaaagcatggaaaaatgcgcttttccttcccgcccacatcaccaccccgacttgaagacagtaggtgcttgaatggaaagtgagtaggcatctttaatcgccctgattaaaggaaagtgttagcctgagagggcctgactgaaaagtaaccaaaggcttaatatcaaacactaattagctttttagtgccttaaccctgacctggttaccagttttctgtagtttctacacccaagccactgaagtcatctgtggcccaagaggtaggacaaaaaaaaaaaaaaaaaaagctgatttcaatatttgatttgttgacatcccaaaatgaaagttttatgtttcccttagaaacatgttttgcttggttctatagtatgttacttaggatctatttaccatatatttgtatgagaaatcctcacccaagcattcaacctaaatctttgaaaagttgggtgctgtctttagtaacttttaaaatagtttaaatctcccattttaatagtgataaggaaacctgttaaaatcatggctattgatgttatagtatggaaagttgaactttatgaacccatacttttaaaaagcatttttaaaaatctaacactgactatagaaacaaattaaaatgtctacctttaagtataa

SEQ ID NO: 327051 - DNA, 1607 bp, Homo sapiens
agtagggaggcggcaacgacgcctgcgcagtgtgaccgggatggcgcattttcttgcaccaactaatgcggtgtcgctggcggctgaggagggcggagagttctgtggtgaaatagtgggaaggattcatgtaggcatcgggaagagcctaagtccacattataaaataggaagttgatgcggggtacagttactcccggaccggcggcgtgaaagtcgtgatatcatcgttgaactgtgagcggcagtggcggcggctggggggaacccggatgggaagaagggcgggggaggctgggaggcggggcagaggaaagaaagaaaggagagtgaggacccggatgctgaaccggattgtgtatgaattttccatcccctagctttaagcgaggagggagaggaagggttggccaagtggggcggaagggagcatctgagcgaggaggaagcagaaacctcaccgtttcttcccctccggactctgtgctagcactgtatacgtttgcagttctctgcccagccgctgtggaaaatcggcctcgaagtgattgaaattccctgtttatatcaggcggcttctttcagatccatcgtctttctcccggagtatgaatggaaggattcagtatgcgcttcacatttgtatgtctctggccattctcaaaccaggcccttccctttgaaaagtcgtttgcatgggatgttcacttcttagacgcaaggttgtgtgccctggtttcatcgtctaacgcgttagaaggcgctttcatttcttcatgggtgttgagcgccgaccactggggtggcctctgccttcgtagacctgcgcctggtgagacggacagatgctgaacaaaacgatgtgaaattaccgcagtggcagtgccccagaggagagttccacggtgataggagaatgagggaatttggcttctttagggagggaaaggaagggtttctgagcaagtgaggatcgagctgagagctgaagggctagcaggagttaactaaggaaagagaaaaggaaaagacattccagacaaaaagactaacttgtcagaaagccctgtggcggaagggagcttttccaatatgaagaactgagcctggagagatgggatgagggggagtgtcgaaccttttaggctttgtaaaggagttttggttttctcctaatagcaatgggatatcttccaaggaatctcaatcaaaagggagagatggctccgattggaatgtcatccctggctgaagagtagaggaagcgaaaaaaagaagagttaaagaggcaaatgcagggaacccgacgaggaggctattgccgtagtagttcacatggtgaaaagaatggagcgtttgtattaatgattatggattcactctttgaacaaatttctggcagctttttagttttgaaagtgagaagtttcagactctcactgaggtattctgtagttttttcactctaaaaggaaactagtagagttcatgtaacacacactaatgcctctttacatttaactttagtatgtgatagctgaaatttccagctgtgataaattgggaaatcctttgatttaaaagaaaaacaaaggcgggtgagggtg

SEQ ID NO: 327052 - DNA, 465 bp, Homo sapiens
gcaaccaggcgccagcccccgaaccatcacacgccgactcggggctccctccggccccgccatccccgcaaacccaaccacctacacagctcggcagcttcccgtccccattgtcgagacccgacggagtttcccgtctacgacaatgacgccatttctgtcagagaagaaactcacaacaagcccggcgtccggcgcagggccggccgctctcccctagggcctcggcgcccggccgagcgaatccgcgcccccacgcgccgcgtccgagcgagaggccggccgggggccaccgaggggccaggagggcctgtgggccgcgggcaggaccggcccgccacagagcccctgcccacgtcccgttccgggctcagacccgacaagtgggagcgagatcaacatctggccccgccgcggggacaacgtgagggccgagggccccggaggcggaacggcccccaccct

SEQ ID NO: 327053 - DNA, 1481 bp, Homo sapiens
ggtattttacaacactgagaaagtagctccagcagcacccgagagggtcaggagaaacagcggaggaagctgggtaggccctgagggcggagagttctgtggtgaaatagtgggaaggattcatgtaggcatcgggaagagcctaagtccacattataaaataggaagttgatgcggggtacagttactcccggaccggcggcgtgaaagtcgtgatatcatcgttgaactattagctttgaagtttaaatccaatggagaagactcaagaaacagtccaaagaattcttctagaaccctataaatacttacttcagttaccaggtaaacaagtgagaaccaaactttcacaggcatttaatcattggctgaaagttccagaggacaagctacagattattattgaagtgacagaaatgttgcataatgccagtttactcatcgatgatattgaagacaactcaaaactccgacgtggctttccagtggcccacagcatctatggaatcccatctgtcatcaattctgccaattacgtgtatttccttggcttggagaaagtcttaacccttgatcacccagatgcagtgaagctttttacccgccagcttttggaactccatcagggacaaggcctagatatttactggagggataattacacttgtcccactgaagaagaatataaagctatggtgctgcagaaaacaggtggactgtttggattagcagtaggtctcatgcagttgttctctgattacaaagaagatttaaaaccgctacttaatacacttgggctctttttccaaattagggatgattatgctaatctacactccaaagaatatagtgaaaacaaaagtttttgtgaagatctgacagagggaaagttctcatttcctactattcatgctatttggtcaaggcctgaaagcacccaggtgcagaatatcttgcgccagagaacagaaaacatagatataaaaaaatactgtgtacattatcttgaggatgtaggttcttttgaatacactcgtaatacccttaaagagcttgaagctaaagcctataaacagattgatgcacgtggtgggaaccctgagctagtagccttagtaaaacacttaagtaagatgttcaaagaagaaaatgaataatgttaagccattcttgattggacctcatagcttattttagttaatcttttttttgtcttttagccttaccaccttttaaaaaatttgttattctccagaaacagtaaataggtgagtaggggtggtgcaagtgaattcgttttcatttagaagcccctctgtacagataatcaaaattcaaagttgaaagaatcaaaagcagccacagttatgtaggtctgatttgaatgtcataattgcagtgacaggacattgccaccaactctatcctactaccatcaatgttgtgtttattccgtcaataaaaaagacttgcttccagga

SEQ ID NO: 327054 - DNA, 3108 bp, Homo sapiens
gcaaccaggcgccagcccccgaaccatcacacgccgactcggggctccctccggccccgccatccccgcaaacccaaccacctacacagctcggcagcttcccgtccccattgtcgagacccgacggagtttcccgtctacgacaatgacgccatttctgtcagagaagaaactcacaacaagcccggcgtccggcgcagggccggccgctctcccctagggcctcggcgcccggccgagcgaatccgcgcccccacgcgccgcgtccgagcgagaggccggccgggggccaccgaggggccaggagggcctgtgggccgcgggcaggaccggcccgccacagagcccctgcccacgtcccgttccgggctcagacccgacaagtgggagcgagatcaacatctggccccgccgcggggacaacattagctttgaagtttaaatccaatggagaagactcaagaaacagtccaaagaattcttctagaaccctataaatacttacttcagttaccaggtaaacaagtgagaaccaaactttcacaggcatttaatcattggctgaaagttccagaggacaagctacagattattattgaagtgacagaaatgttgcataatgccagtttactcatcgatgatattgaagacaactcaaaactccgacgtggctttccagtggcccacagcatctatggaatcccatctgtcatcaattctgccaattacgtgtatttccttggcttggagaaagtcttaacccttgatcacccagatgcagtgaagctttttacccgccagcttttggaactccatcagggacaaggcctagatatttactggagggataattacacttgtcccactgaagaagaatataaagctatggtgctgcagaaaacaggtggactgtttggattagcagtaggtctcatgcagttgttctctgattacaaagaagatttaaaaccgctacttaatacacttgggctctttttccaaattagggatgattatgctaatctacactccaaagaatatagtgaaaacaaaagtttttgtgaagatctgacagagggaaagttctcatttcctactattcatgctatttggtcaaggcctgaaagcacccaggtgcagaatatcttgcgccagagaacagaaaacatagatataaaaaaatactgtgtacattatcttgaggatgtaggttcttttgaatacactcgtaatacccttaaagagcttgaagctaaagcctataaacagattgatgcacgtggtgggaaccctgagctagtagccttagtaaaacacttaagtaagatgttcaaagaagaaaatgaataatgttaagccattcttgattggacctcatagcttattttagttaatcttttttttgtcttttagccttaccaccttttaaaaaatttgttattctccagaaacagtaaataggtgagtaggggtggtgcaagtgaattcgttttcatttagaagcccctctgtacagataatcaaaattcaaagttgaaagaatcaaaagcagccacagttatgtaggtctgatttgaatgtcataattgcagtgacaggacattgccaccaactctatcctactaccatcaatgttgtgtttattccgtcaataaaaaagacttgcttccaggaatttttatccatacactttctaactgtactatctgggcagttccaagccagtttctattagctagctggaccaaagaccacaaatctctttttttcctaaacgctgctgtaaggaatatctcacttttccccccggaaacaccctcactgaagtcttctatgaaaaggctgataatgggctgggcgcggtggctcacgcctgtaatcccagcactttgggaggccgaggcgggcagatcacgaggtcaggagatcgagaccatcctgacacggtgaaaccctgtctctactaaaaatacaaaaaattagctgggcgtggtggtgggcgcctgtagtcccagctactcgggaggctgaggcaggagaatggtgtgaacccaggaggcggagcttgcagtgagccgagatagtgcctctgcactccagcctgggtgacagagcaagactccgtctcaaaaaaaaagggctgataatgataaacagtgagcactccggtcctttttcttacgttttccttttttccttcctctccaccccacaagttttgctttttaaccaaggtgtctctgcttgatgaaattcacatgctagtctaaatctttttttctcccttgtaacatttatgtgccccaaactggttagtatatgggtacagcattccctttccaattgggaagcggaaaaagagagtatgggatattttagaagggagcctttgaaccttattatatttccccatcattgatagtgacaatcttaaaagggttgttttcttaccttaagtacaaaagcatggaaaaatgcgcttttccttcccgcccacatcaccaccccgacttgaagacagtaggtgcttgaatggaaagtgagtaggcatctttaatcgccctgattaaaggaaagtgttagcctgagagggcctgactgaaaagtaaccaaaggcttaatatcaaacactaattagctttttagtgccttaaccctgacctggttaccagttttctgtagtttctacacccaagccactgaagtcatctgtggcccaagaggtaggacaaaaaaaaaaaaaaaaaaagctgatttcaatatttgatttgttgacatcccaaaatgaaagttttatgtttcccttagaaacatgttttgcttggttctatagtatgttacttaggatctatttaccatatatttgtatgagaaatcctcacccaagcattcaacctaaatctttgaaaagttgggtgctgtctttagtaacttttaaaatagtttaaatctcccattttaatagtgataaggaaacctgttaaaatcatggctattgatgttatagtatggaaagttgaactttatgaacccatacttttaaaaagcatttttaaaaatctaacactgactatagaaacaaattaaaatgtctacctttaagtataa

SEQ ID NO: 327055 - DNA, 2814 bp, Homo sapiens
agtagggaggcggcaacgacgcctgcgcagtgtgaccgggatggcgcattttcttgcaccaactaatgcggtgtcgctggcggctgaggagggcggagagttctgtggtgaaatagtgggaaggattcatattagctttgaagtttaaatccaatggagaagactcaagaaacagtccaaagaattcttctagaaccctataaatacttacttcagttaccaggtaaacaagtgagaaccaaactttcacaggcatttaatcattggctgaaagttccagaggacaagctacagattattattgaagtgacagaaatgttgcataatgccagtttactcatcgatgatattgaagacaactcaaaactccgacgtggctttccagtggcccacagcatctatggaatcccatctgtcatcaattctgccaattacgtgtatttccttggcttggagaaagtcttaacccttgatcacccagatgcagtgaagctttttacccgccagcttttggaactccatcagggacaaggcctagatatttactggagggataattacacttgtcccactgaagaagaatataaagctatggtgctgcagaaaacaggtggactgtttggattagcagtaggtctcatgcagttgttctctgattacaaagaagatttaaaaccgctacttaatacacttgggctctttttccaaattagggatgattatgctaatctacactccaaagaatatagtgaaaacaaaagtttttgtgaagatctgacagagggaaagttctcatttcctactattcatgctatttggtcaaggcctgaaagcacccaggtgcagaatatcttgcgccagagaacagaaaacatagatataaaaaaatactgtgtacattatcttgaggatgtaggttcttttgaatacactcgtaatacccttaaagagcttgaagctaaagcctataaacagattgatgcacgtggtgggaaccctgagctagtagccttagtaaaacacttaagtaagatgttcaaagaagaaaatgaataatgttaagccattcttgattggacctcatagcttattttagttaatcttttttttgtcttttagccttaccaccttttaaaaaatttgttattctccagaaacagtaaataggtgagtaggggtggtgcaagtgaattcgttttcatttagaagcccctctgtacagataatcaaaattcaaagttgaaagaatcaaaagcagccacagttatgtaggtctgatttgaatgtcataattgcagtgacaggacattgccaccaactctatcctactaccatcaatgttgtgtttattccgtcaataaaaaagacttgcttccaggaatttttatccatacactttctaactgtactatctgggcagttccaagccagtttctattagctagctggaccaaagaccacaaatctctttttttcctaaacgctgctgtaaggaatatctcacttttccccccggaaacaccctcactgaagtcttctatgaaaaggctgataatgggctgggcgcggtggctcacgcctgtaatcccagcactttgggaggccgaggcgggcagatcacgaggtcaggagatcgagaccatcctgacacggtgaaaccctgtctctactaaaaatacaaaaaattagctgggcgtggtggtgggcgcctgtagtcccagctactcgggaggctgaggcaggagaatggtgtgaacccaggaggcggagcttgcagtgagccgagatagtgcctctgcactccagcctgggtgacagagcaagactccgtctcaaaaaaaaagggctgataatgataaacagtgagcactccggtcctttttcttacgttttccttttttccttcctctccaccccacaagttttgctttttaaccaaggtgtctctgcttgatgaaattcacatgctagtctaaatctttttttctcccttgtaacatttatgtgccccaaactggttagtatatgggtacagcattccctttccaattgggaagcggaaaaagagagtatgggatattttagaagggagcctttgaaccttattatatttccccatcattgatagtgacaatcttaaaagggttgttttcttaccttaagtacaaaagcatggaaaaatgcgcttttccttcccgcccacatcaccaccccgacttgaagacagtaggtgcttgaatggaaagtgagtaggcatctttaatcgccctgattaaaggaaagtgttagcctgagagggcctgactgaaaagtaaccaaaggcttaatatcaaacactaattagctttttagtgccttaaccctgacctggttaccagttttctgtagtttctacacccaagccactgaagtcatctgtggcccaagaggtaggacaaaaaaaaaaaaaaaaaaagctgatttcaatatttgatttgttgacatcccaaaatgaaagttttatgtttcccttagaaacatgttttgcttggttctatagtatgttacttaggatctatttaccatatatttgtatgagaaatcctcacccaagcattcaacctaaatctttgaaaagttgggtgctgtctttagtaacttttaaaatagtttaaatctcccattttaatagtgataaggaaacctgttaaaatcatggctattgatgttatagtatggaaagttgaactttatgaacccatacttttaaaaagcatttttaaaaatctaacactgactatagaaacaaattaaaatgtctacctttaagtataa

SEQ ID NO: 327056 - DNA, 9931 bp, Homo sapiens
gcttgcttgcccggctcgctcacgggtcgttgaggccggtgacatgtctgtgagctgcggaggctgcggcccccagatctttctctttgacactttgcaataaaaaagggcagtgagattgaataggtgttttgtggattaactcttcattgattatatacaacaaaaaatagttatggcgactttcagaaacaatcacatgaagactaaagcatctgtcagaaaaagcttcagtgaagatgtgttccagtctgtaaagtctttattgcagagtcagaaggaactatgcagtgtaacagcagaggactgtttacagcaggatgagcatgccaatttaactgaggtcacatttctgggttttaatgaagagacagatgctgctcatatacaggatttagctgcagtttctttggaacttccagatattctgaattcactccacttctgcagtctaaatgaaaatgaaattatttgtatgaagaatataaataaaccattagatataagcagtgatcctctaaatcagagtcatccttctggaatgctttgtgtcatgagagtgtcacctacatcaccaagacttaggattgattttatctttagtctcctaagtaaatatgctactggtataaggtacaccttggacacattcttgcatcagaagcaccaacttgagaccactgatgaagatgatgatgatactaaccagtctgtgtcatccatagaggatgactttgtcactgcttttgagcacttagaagaggaagagacttcaaagccatacaatgatggaatgaacattactgtgctaaggagccagtgtgatgctgcttcccagacggttactggtcatcatttagaaacccatgatttaaagattctcattagctctggacagcagaagtcattggctaaaccctcaacttcctcagtgaatgtcctgggacataaagaactaccttctgtgaaaacttcagtcacaacatcaatttcagagccttggacccaaaggagtttctataggtcatctaatgcttcagataaagatagtgatttacagaaaacatttttttcgtcttctcctgcctactcatctgaatcagaatgttcaagtccaagtcctgttattttcttggatgaagagggatatcaaaaaagcttaaaagcaaaacttgagctgcctaaaattcctgtgatgaaagatgatatagaggattcagactcagaagtaagtgaattttttgatagttttgatcagtttgatgaactagaacaaactttagagacttgcctgtttaacaaagatcccgtcatagggaagtcatcgcagaggaaagggcacaaacatggaaagtcatgtatgaatcctcaaaaattcaagtttgatcgtccagctctcccagctaatgttagaaagccaactcctcgtaaaccagaatctccatatggtaacctgtgtgatgctccggattctcctcgcccagtgaaggcatcaagggaagatagtggtttatttagtcctattcgatcctctgcttttagtcctcttggaggctgtactccagctgaatgtttttgccaaacagatattggtggagataggattcatgaaaatcatgattctgtttattacacctatgaagactatgcaaaaagcatttcatgtgaagtactaggctcagttcttcgtacccaccatactaataccctatcaaatattaacagtattaaacatggagaaaataaaactgtaacttttaagcatggaaaccttgatcaaaaaaataaatctaaaaataaatccttaatgattaaagatagcattcaaaaatttgcagcagatcttgtggaaaaaagttttggcagtgcatttaaagacttacagaaaggagtctcttcatgtaccaatgctttgtaccacttagccatcaaattgacatcatctgttttgcagatggcatttgatgagctgagaaggcagcgtgcattttcactaaaagaacgtgccattagtggcctggctaactttttggtgagtgaagctttatcaaatgccttaaaagatttacagtatgtaaagaagcagatattcacaaacacagttgctaggtttgctgcagatcttgctgaagagcttgtttttgaaggcatcatggaggtgtgtcagttttcatatcctcaaacgcctgcatctccacagtgtgggtcgtttgactttgaagacaaagtagtgaagttgtatgcaaaagatttgtctgaatctgtaatacaggaagcattcattgagctatcacaagttgatgtgacctttacaacaaaggcagcagttagtgtctctacggataatatcaagtatgtgagtgcagaaagtgtagtgccatcgacacaggctgtcacgttttccccttcttttcacaatcaagcaattatggtgacaaaaccagtgcaggaatataaaaaggaatacacagtgcagcaggccttgttttgtacttctggaattgttacttctataccggtgcccttggcaggaagtgcccttctcccatatcatatttcatctactgcatgtcaggccaaggctcatctgtcatctgatgatagtaattcaaatggtgattctgcccaagtgcatattgccacaaaaaacagagaagaaaaagcagcttgtctcagaaatatttgtttaccttcagaacacaatccaggtaatcagaatgattttaaaccaactaatgacgatattgaaatgcagagttcctcaaaattaccaaatgatcctgcaattattagcaacttttctgcagcagtggtgcatacgatagtaaatgaaactttagagtcaatgacatcattggaagttacaaaaatggttgatgaacgtacagattatttaactaaatctttaaaggagaaaacccctccattttcccactgtgatcaggcagtgctgcaatgcagtgaagctagtagcaataaggacatgtttgctgaccggttatctaaatctattattaaacattccatagataagagcaaatcagtgatcccaaatatagataaaaatgcagtatacaaggaaagcttgcctgtttctggagaagaatcacagttgacaccagaaaagtctcccaaatttcctgactctcagaatcagttaactcactgctcactttcagctgcaaaggattgtgttccagaatgtaaagtttctatggttcatggatcctccctagagacactgccatcttgtccagctgtgacaggtcagaaatctgacttgaaggaatctgctaaggatcaaccactgaaaaagcataacttgaatagtacatcacttgaggccttgtcttttggacaggaaaacccctttcctcattcacatactttctcatctacagcacttacctgtgtagatggtttgcatgtggaagataaacagaaagtcagagacagaaatgtaatacctgatactcctccatcaactcctctagtaccatcccgggctagttctgaatgggatatcaagaagttaactaaaaagctcaagggagaattagccaaagagtttgcacctgctacaccaccttctactccacacaactcatctgttggtagtttgtctgagaatgaacaaaatactatagaaaaagaagagttcatgttgaaactcatgcgatctctttctgaagaagttgagagtagtgaaagtggagagctcccagaagtggatgtgaagtcggagcactcagggaagaaggttcagtttgcagaagcattagctacacacatcctttctcttgcaactgaaatggcagcttcccatttagataacaaaataattcaagaacccaaggttaaaaacccttgcttaaatgtgcaaagtcaaagaagtgtgtcgcctacttttttaaacccctcagacgaaaatttgaaaacattatgcaattttgcgggtgatctggcagcagaagtcattacagaagctgagaaaatagcaaaagtccgaaattgtatgcttttcaagcaaaagaagaacagttgttatgctgatggtgacgaagattataaagtagaagagaagttggatatagaggctgtagtgcacccaagagaagtggatccgtttattctttcattaccaccaagttcttgtatgtcaggtctgatgtataagtatcccagctgtgaaagtgtgacagatgaatatgcaggtcaccttattcagatactaaaacaggaaggtggtaatagtgagttgataatggatcagtatgccaataggcttgcctaccgatctgttaaatcaggattacaggaagcagctaagacaaccaaagtgcagtgcaactcaagaatgttccctgtgccaagttcacaagtgaaaacaaacaaggaactgttaatgttttcaaacaaagagcaccaccaagaagcagacaaaaagagacaaagtaaaagaaatgaaggttacttttgtaaaaatcaaacttgtgaaaggaccctggatccatatagaaatgaggtctcccaactgtatagtttttcaacctctctcgttcacagcataacaaaagatgctaaggaagagttgacagcctctctagttggcctaccaaaatccttaacagattcttgcttgtttgaaaaatctggatatgaagaagataatgagtgtcacgttacaccagaattgcctaagtctcttcagccttcctcacaaaatcacaggttttaccacagcactggcagtttaaatggatatggttgtggagacaatgttgttcaagctgtagaacagtatgccaaaaaagtagtggatgacactctagagctaactctaggatctacagtgttccgagtgtctgagaccacaaaatcagcagacagggtcacttatgcagaaaagttgtcacctcttacaggtcaagcttgcagatactgtgaccttaaagaactccacaattgcactggaaattcatctcagcactttttcagacagggttctctcgccagtagtaagccagcttctaatccaaaatttagcagccgctatcagaaatctaggatttttcatctcagtgtccctcagattcatgttaatcttgataagaaggcagtgcttgctgagaagatagttgctgaagccattgaaaaagctgagcgagagctgagcagtaccagcctggcagccgacagtgggatcggacaggagggtgccagctttgctgaaagccttgccacagaaaccatgacagcagctgtcacaaatgttgggcatgctgttagcagttcaaaagaaatagaagactttcagtcaaccgagtctgtcagtagccagcagatgaacctcagtattggtgatgacagcactggtagctggtccaatttaagttttgaagatgaacaccaagatgaaagcagcagttttcatcatctaagtgaaagtaatggtaacagcagtagctggagcagtcttggtttagaaggagatttgtatgaggacaatttatcctttccaacatcagacagtgatggaccagatgataaagatgaagagcatgaggacgaagtagaaggtttggggcaagatggaaagacactgctaattacgaatattgacatggagccatgcacggtagacccccagctaaggattattcttcagtggctcattgcctctgaggctgaagttgcagaactttattttcatgactctgcaaataaggagtttatgctactttcaaaacaattacaagagaaaggatggaaagtgggagacctcctgcaggctgtgcttcaatactatgaagtgatggaaaaagcttccagtgaggagagatgcaagtcgctgtttgattggctcttggaaaatgcatagagcaaaccccaaaccagtatattttagtatttgtttggggaggggaacaagccaataaagatgtttaggataaaatttgaatagtgaatattaacatcgtaagtcagttgggaggcaagtaaatatagctttctgagcgctttgtgttatcactcggtgtatatagttcatacttttgtaatctgtcaaaatactaccttcatttattcttctatacacatgtgtagtgtgtcaagaccctaagaacatgtatttgaaggaaggtctaaccagggggttttcaggggcattgtctgaccacattctttttgtatccaaatagtgctgctagaaactgcactgaagtggctgaggataggttccagtgatagagttataattttgctcctttgcaaacaaatggtatctaattaataactagtctgacatcagaaaataaaattgaggctgatttttaaaaatttctagtagatttttggcctttctttcctgtttttaaaaatcagtttcattttcatatttcatagatcagctattggtagctttttgatttccccaaactatttaatttcttagcagaaacattagtattttaggtttctataaacactataagtgatagtttcccccatcctttcattgacattatttgccaatgctgccagtcattctggcatgaaaggtgtgtgtgtgtgtgtgtgtgtgtgtgtgtgtgtgtgtgtgtgtgtgtgtgtaagggagtactttaaccttgccagtttgttccctcttttattttactgttttctttttagaaacccactgttaaaatttaaaaaggtgctttaaaataaaacgcctataaagattgtgcagtaagaatttttattgacaataattaaaattttttttgacaattttgggttcccaacttatcttacaagtgaaaacttaaattgtaaaacatgttgaaattttaaaaattaatgttaatatggaaatgcatttagagaagcccagtagtttttattgttggatttttgaaaaaacctctaccaagaatgtggtgttttttttttttgtttgtttgttcgttttagaaaaattgggatttccccccaccccgccccacccagataaactatatctacactgtctcgtcaagttctctgacacgatctttctgggctctacatttcctactagtttgtgtccagaaactgcaagttgacatgaatagaggacaaaggttgtgtcttgcttttgtctctctcttccctccctgcaactctctctcccctcctcccactctcttccccctcccccctcctcccactgtctctcacctcccccaccccccactctctctcatctctcgctgtgtcctgtgtatgtgtgggtgtgtgtgtatttgggtgtgtaaatgttggttcttccactactggattttgtaatctaggataaatcactttttttggggactttgattttgctccattacgttttcattttttctgagcactgactgttctgaaagctgcacaaaacgtagaaagaagacatagcgcctgccagggaataggaaatgagggcacttacacattaatgtgaattagtaattgtggtatagaaatgttttatagtgaaagattcaaatttgcttttcaagaaaaatgccaaaagctatttaaataattcgaggttacatcgtaggttttgatttttctcaatttaagatacagaaatacagcaagccttaatataaagtttcctaaagtttcttcaagtattttttaaggtggagaaatgcaggaattgtataaccagaattgttcctgcctttagcttttcagaacttgagatgtggcagcactggactgggtttttttaaatgttaggactaggaatgtttgctcttgttaattatgaattaattgattattaagtttagaatgcatttttacaagtatctaactatcaaattgtgtttagtaacttgagtgtatgcacaagtttgatcaacagcaaaatagagttctgaatttcttttaaagtgatgatatattattttgtgaaactttgtgtttgaaaatgtttatttctgtttatggtgtaatcattctgaggtgaggcttttcttatttcctttgcattttgctagagctgtgctgagttcagcatttgcttatttaaccactacataatgacagaccagttattaggtattagcatgtgtggtaataataatagtggaacttcacacttacatcaattcagtgcaggggcatagaataaaatattaaatattggcagatgtatgaaaagaagtgtgagttaaaaatattgaatattggcaggtgtgaaaacaagtgtcaaaattcctcatatagagaaaataattttgagtttagagtattatcttttaattaagtgtagtctaaacttaactttctgtaaaggcactttgtggtttttccaaagatgttctagatctatttggttgctctatagtcaaacagctcttttgaagacaactgtcttattttattacaaattggcttgacatatttatactgtaacattgtaatattgctgtgctgtacattttggcccttacgaaatacgtctttttcagaactgttaaagttttgatgtacatcgagctgaattctgtttttaccagtttcaaaaccttcaagtgatatgtggaaaaaagtgaatgagacctctgatagggggttttcagaaccttgttcacaccaaaatgtgacagttctttcatgttttcctaaaccaagttaaaattacatgtatattttggtgttaaggttgatttttaagatacttctgatttgtacaaaaggaatgtttcctttataaatcacagaagaaaatgacaatatctgttggatatttgatataatttaatggtgttataaaacctttaagaggattcatggtgaatatatgtgataacatctttatactttgaaaaatgttccacttacccttcagatatttgttgtaagttaattcaattcttaatactttaattttgctccaacaagggctttatgttgctggtaagagaatttatttactaaatgcactatgtataaagtgaaagatagtttacttatctgactttgatattagatggctgacattagtgcacataatgcagagtttaaccttgattcttcaacagagtccagatttaaatgtctacttagttaattagttagctgatattcttccacaattaatatattcaatttcccatcagtatatcactttaaattttatgtttttctaaggaaactttccacagaattttaaacaactgatgcatccatactcagggtgtagggagaatactttgcatttaaaaaccctgtccacctgtcaccagcacaagagaattagagcttcagtgagaatttagaaaaattatactaaagtgagatgcattttttctcattttcagcaagactcctctaagcatttactcatttactgtattcctgctctgaagatgtggatacagaattagtcactcttgtcactttatttatttattggtttttttttaaccatctgtgtacattcctttcatagggtagagttctagttctagaagttcttattttgtttttgttgtaatgtttgaatactatttaatatccggttttaatattgctggatttgctacctttggttacttgtgcagtgttaaaagtaatccactttcttgtttaatataccagatacatagcaaaagcagcttggaataattatagctgtttatttggctgtgctcagttactatattaagatcttgtactgtgtaacagtaactcttttttgcttttcagtaatttaatatgttcacttaacaaaatacgaactttgagatgcactaaagttttgtttcagcagtggctcaaaaaatttcagaaattacttttgtaattatttgcaattaattgttcttttatcttacaattgtttaagcctgtgatctttcttctcccagctaagagttcttcaataaatttaagaaatacctgg

SEQ ID NO: 327057 - DNA, 342 bp, Homo sapiens
tcccccgggaaaaaccccggacaaaaaaaaggggttccggggggggggtttttcccccgggaaaaaccctggccaaaaaatcggattttcgggggggggtttttccccccgggaacacctatggccaaaatttagaatttggggccgggggccccccgggaggcccaaaaaaaaaaaaaaaaaaagactgtgacaatttgaaaacaccttgccagtttcattataagcaggaagttcagtggagggcaacaactaaaaaacacaccaatttcagattttcaaaagtgtttaggaggattatataattatttgatcagaaaagaactgggtggatagtctgtg

SEQ ID NO: 327058 - DNA, 9847 bp, Homo sapiens
gcttgcttgcccggctcgctcacgggtcgttgaggccggtgacatgtctgtgagctgcggaggctgcggcccccagatctttctctttgacactttgcaataaaaaagggcagtgagattgaataggtgttttgtggattaactcttcattgattatatacaacaaaaaatagttatggcgactttcagaaacaatcacatgaagactaaagcatctgtcagaaaaagcttcagtgaagatgtgttccagtctgtaaagtctttattgcagagtcagaaggaactatgcagtgtaacagcagaggactgtttacagcaggatgagcatgccaatttaactgaggtcacatttctgggttttaatgaagagacagatgctgctcatatacaggatttagctgcagtttctttggaacttccagatattctgaattcactccacttctgcagtctaaatgaaaatgaaattatttgtatgaagaatataaataaaccattagatataagcagtgatcctctaaatcagagtcatccttctggaatgctttgtgtcatgagagtgtcacctacatcaccaagacttaggattgattttatctttagtctcctaagtaaatatgctactggtataaggtacaccttggacacattcttgcatcagaagcaccaacttgagaccactgatgaagatgatgatgatactaaccagtctgtgtcatccatagaggatgactttgtcactgcttttgagcacttagaagaggaagagacttcaaagccatacaatgatggaatgaacattactgtgctaaggagccagtgtgatgctgcttcccagacggttactggtcatcatttagaaacccatgatttaaagattctcattagctctggacagcagaagtcattggctaaaccctcaacttcctcagtgaatgtcctgggacataaagaactaccttctgtgaaaacttcagtcacaacatcaatttcagagccttggacccaaaggagtttctataggtcatctaatgcttcagataaagatagtgatttacagaaaacatttttttcgtcttctcctgcctactcatctgaatcagaatgttcaagtccaagtcctgttattttcttggatgaagagggatatcaaaaaagcttaaaagcaaaacttgagctgcctaaaattcctgtgatgaaagatgatatagaggattcagactcagaagtaagtgaattttttgatagttttgatcagtttgatgaactagaacaaactttagagacttgcctgtttaacaaagatcccgtcatagggaagtcatcgcagaggaaagggcacaaacatggaaagtcatgtatgaatcctcaaaaattcaagtttgatcgtccagctctcccagctaatgttagaaagccaactcctcgtaaaccagaatctccatatggtaacctgtgtgatgctccggattctcctcgcccagtgaaggcatcaagggaagatagtggtttatttagtcctattcgatcctctgcttttagtcctcttggaggctgtactccagctgaatgtttttgccaaacagatattggtggagataggattcatgaaaatcatgattctgtttattacacctatgaagactatgcaaaaagcatttcatgtgaagtactaggctcagttcttcgtacccaccatactaataccctatcaaatattaacagtattaaacatggagaaaataaaactgtaacttttaagcatggaaaccttgatcaaaaaaataaatctaaaaataaatccttaatgattaaagatagcattcaaaaatttgcagcagatcttgtggaaaaaagttttggcagtgcatttaaagacttacagaaaggagtctcttcatgtaccaatgctttgtaccacttagccatcaaattgacatcatctgttttgcagatggcatttgatgagctgagaaggcagcgtgcattttcactaaaagaacgtgccattagtggcctggctaactttttggtgagtgaagctttatcaaatgccttaaaagatttacagtatgtaaagaagcagatattcacaaacacagttgctaggtttgctgcagatcttgctgaagagcttgtttttgaaggcatcatggaggtgtgtcagttttcatatcctcaaacgcctgcatctccacagtgtgggtcgtttgactttgaagacaaagtagtgaagttgtatgcaaaagatttgtctgaatctgtaatacaggaagcattcattgagctatcacaagttgatgtgacctttacaacaaaggcagcagttagtgtctctacggataatatcaagtatgtgagtgcagaaagtgtagtgccatcgacacaggctgtcacgttttccccttcttttcacaatcaagcaattatggtgacaaaaccagtgcaggaatataaaaaggaatacacagtgcagcaggccttgttttgtacttctggaattgttacttctataccggtgcccttggcaggaagtgcccttctcccatatcatatttcatctactgcatgtcaggccaaggctcatctgtcatctgatgatagtaattcaaatggtgattctgcccaagtgcatattgccacaaaaaacagagaagaaaaagcagcttgtctcagaaatatttgtttaccttcagaacacaatccaggtaatcagaatgattttaaaccaactaatgacgatattgaaatgcagagttcctcaaaattaccaaatgatcctgcaattattagcaacttttctgcagcagtggtgcatacgatagtaaatgaaactttagagtcaatgacatcattggaagttacaaaaatggttgatgaacgtacagattatttaactaaatctttaaaggagaaaacccctccattttcccactgtgatcaggcagtgctgcaatgcagtgaagctagtagcaataaggacatgtttgctgaccggttatctaaatctattattaaacattccatagataagagcaaatcagtgatcccaaatatagataaaaatgcagtatacaaggaaagcttgcctgtttctggagaagaatcacagttgacaccagaaaagtctcccaaatttcctgactctcagaatcagttaactcactgctcactttcagctgcaaaggattgtgttccagaatgtaaagtttctatggttcatggatcctccctagagacactgccatcttgtccagctgtgacaggtcagaaatctgacttgaaggaatctgctaaggatcaaccactgaaaaagcataacttgaatagtacatcacttgaggccttgtcttttggacaggaaaacccctttcctcattcacatactttctcatctacagcacttacctgtgtagatggtttgcatgtggaagataaacagaaagtcagagacagaaatgtaatacctgatactcctccatcaactcctctagtaccatcccgggctagttctgaatgggatatcaagaagttaactaaaaagctcaagggagaattagccaaagagtttgcacctgctacaccaccttctactccacacaactcatctgttggtagtttgtctgagaatgaacaaaatactatagaaaaagaagagttcatgttgaaactcatgcgatctctttctgaagaagttgagagtagtgaaagtggagagctcccagaagtggatgtgaagtcggagcactcagggaagaaggttcagtttgcagaagcattagctacacacatcctttctcttgcaactgaaatggcagcttcccatttagataacaaaataattcaagaacccaaggttaaaaacccttgcttaaatgtgcaaagtcaaagaagtgtgtcgcctacttttttaaacccctcagacgaaaatttgaaaacattatgcaattttgcgggtgatctggcagcagaagtcattacagaagctgagaaaatagcaaaagtccgaaattgtatgcttttcaagcaaaagaagaacagttgttatgctgatggtgacgaagattataaagtagaagagaagttggatatagaggctgtagtgcacccaagagaagtggatccgtttattctttcattaccaccaagttcttgtatgtcaggtctgatgtataagtatcccagctgtgaaagtgtgacagatgaatatgcaggtcaccttattcagatactaaaacaggaaggtggtaatagtgagttgataatggatcagtatgccaataggcttgcctaccgatctgttaaatcaggattacaggaagcagctaagacaaccaaagtgcagtgcaactcaagaatgttccctgtgccaagttcacaagtgaaaacaaacaaggaactgttaatgttttcaaacaaagagcaccaccaagaagcagacaaaaagagacaaagtaaaagaaatgaaggttacttttgtaaaaatcaaacttgtgaaaggaccctggatccatatagaaatgaggtctcccaactgtatagtttttcaacctctctcgttcacagcataacaaaagatgctaaggaagagttgacagcctctctagttggcctaccaaaatccttaacagattcttgcttgtttgaaaaatctggatatgaagaagataatgagtgtcacgttacaccagaattgcctaagtctcttcagccttcctcacaaaatcacaggttttaccacagcactggcagtttaaatggatatggttgtggagacaatgttgttcaagctgtagaacagtatgccaaaaaagtagtggatgacactctagagctaactctaggatctacagtgttccgagtgtctgagaccacaaaatcagcagacagggtcacttatgcagaaaagttgtcacctcttacaggtcaagcttgcagatactgtgaccttaaagaactccacaattgcactggaaattcatctcagcactttttcagacagggttctctcgccagtagtaagccagcttctaatccaaaatttagcagccgctatcagaaatctaggatttttcatctcagtgtccctcagattcatgttaatcttgataagaaggcagtgcttgctgagaagatagttgctgaagccattgaaaaagctgagcgagagctgagcagtaccagcctggcagccgacagtgggatcggacaggagggtgccagctttgctgaaagccttgccacagaaaccatgacagcagctgtcacaaatgttgggcatgctgttagcagttcaaaagaaatagaagactttcagtcaaccgagtctgtcagtagccagcagatgaacctcagtattggtgatgacagcactggtagctggtccaatttaagttttgaagatgaacaccaagatgaaagcagcagttttcatcatctaagtgaaagtgatggaccagatgataaagatgaagagcatgaggacgaagtagaaggtttggggcaagatggaaagacactgctaattacgaatattgacatggagccatgcacggtagacccccagctaaggattattcttcagtggctcattgcctctgaggctgaagttgcagaactttattttcatgactctgcaaataaggagtttatgctactttcaaaacaattacaagagaaaggatggaaagtgggagacctcctgcaggctgtgcttcaatactatgaagtgatggaaaaagcttccagtgaggagagatgcaagtcgctgtttgattggctcttggaaaatgcatagagcaaaccccaaaccagtatattttagtatttgtttggggaggggaacaagccaataaagatgtttaggataaaatttgaatagtgaatattaacatcgtaagtcagttgggaggcaagtaaatatagctttctgagcgctttgtgttatcactcggtgtatatagttcatacttttgtaatctgtcaaaatactaccttcatttattcttctatacacatgtgtagtgtgtcaagaccctaagaacatgtatttgaaggaaggtctaaccagggggttttcaggggcattgtctgaccacattctttttgtatccaaatagtgctgctagaaactgcactgaagtggctgaggataggttccagtgatagagttataattttgctcctttgcaaacaaatggtatctaattaataactagtctgacatcagaaaataaaattgaggctgatttttaaaaatttctagtagatttttggcctttctttcctgtttttaaaaatcagtttcattttcatatttcatagatcagctattggtagctttttgatttccccaaactatttaatttcttagcagaaacattagtattttaggtttctataaacactataagtgatagtttcccccatcctttcattgacattatttgccaatgctgccagtcattctggcatgaaaggtgtgtgtgtgtgtgtgtgtgtgtgtgtgtgtgtgtgtgtgtgtgtgtgtgtaagggagtactttaaccttgccagtttgttccctcttttattttactgttttctttttagaaacccactgttaaaatttaaaaaggtgctttaaaataaaacgcctataaagattgtgcagtaagaatttttattgacaataattaaaattttttttgacaattttgggttcccaacttatcttacaagtgaaaacttaaattgtaaaacatgttgaaattttaaaaattaatgttaatatggaaatgcatttagagaagcccagtagtttttattgttggatttttgaaaaaacctctaccaagaatgtggtgttttttttttttgtttgtttgttcgttttagaaaaattgggatttccccccaccccgccccacccagataaactatatctacactgtctcgtcaagttctctgacacgatctttctgggctctacatttcctactagtttgtgtccagaaactgcaagttgacatgaatagaggacaaaggttgtgtcttgcttttgtctctctcttccctccctgcaactctctctcccctcctcccactctcttccccctcccccctcctcccactgtctctcacctcccccaccccccactctctctcatctctcgctgtgtcctgtgtatgtgtgggtgtgtgtgtatttgggtgtgtaaatgttggttcttccactactggattttgtaatctaggataaatcactttttttggggactttgattttgctccattacgttttcattttttctgagcactgactgttctgaaagctgcacaaaacgtagaaagaagacatagcgcctgccagggaataggaaatgagggcacttacacattaatgtgaattagtaattgtggtatagaaatgttttatagtgaaagattcaaatttgcttttcaagaaaaatgccaaaagctatttaaataattcgaggttacatcgtaggttttgatttttctcaatttaagatacagaaatacagcaagccttaatataaagtttcctaaagtttcttcaagtattttttaaggtggagaaatgcaggaattgtataaccagaattgttcctgcctttagcttttcagaacttgagatgtggcagcactggactgggtttttttaaatgttaggactaggaatgtttgctcttgttaattatgaattaattgattattaagtttagaatgcatttttacaagtatctaactatcaaattgtgtttagtaacttgagtgtatgcacaagtttgatcaacagcaaaatagagttctgaatttcttttaaagtgatgatatattattttgtgaaactttgtgtttgaaaatgtttatttctgtttatggtgtaatcattctgaggtgaggcttttcttatttcctttgcattttgctagagctgtgctgagttcagcatttgcttatttaaccactacataatgacagaccagttattaggtattagcatgtgtggtaataataatagtggaacttcacacttacatcaattcagtgcaggggcatagaataaaatattaaatattggcagatgtatgaaaagaagtgtgagttaaaaatattgaatattggcaggtgtgaaaacaagtgtcaaaattcctcatatagagaaaataattttgagtttagagtattatcttttaattaagtgtagtctaaacttaactttctgtaaaggcactttgtggtttttccaaagatgttctagatctatttggttgctctatagtcaaacagctcttttgaagacaactgtcttattttattacaaattggcttgacatatttatactgtaacattgtaatattgctgtgctgtacattttggcccttacgaaatacgtctttttcagaactgttaaagttttgatgtacatcgagctgaattctgtttttaccagtttcaaaaccttcaagtgatatgtggaaaaaagtgaatgagacctctgatagggggttttcagaaccttgttcacaccaaaatgtgacagttctttcatgttttcctaaaccaagttaaaattacatgtatattttggtgttaaggttgatttttaagatacttctgatttgtacaaaaggaatgtttcctttataaatcacagaagaaaatgacaatatctgttggatatttgatataatttaatggtgttataaaacctttaagaggattcatggtgaatatatgtgataacatctttatactttgaaaaatgttccacttacccttcagatatttgttgtaagttaattcaattcttaatactttaattttgctccaacaagggctttatgttgctggtaagagaatttatttactaaatgcactatgtataaagtgaaagatagtttacttatctgactttgatattagatggctgacattagtgcacataatgcagagtttaaccttgattcttcaacagagtccagatttaaatgtctacttagttaattagttagctgatattcttccacaattaatatattcaatttcccatcagtatatcactttaaattttatgtttttctaaggaaactttccacagaattttaaacaactgatgcatccatactcagggtgtagggagaatactttgcatttaaaaaccctgtccacctgtcaccagcacaagagaattagagcttcagtgagaatttagaaaaattatactaaagtgagatgcattttttctcattttcagcaagactcctctaagcatttactcatttactgtattcctgctctgaagatgtggatacagaattagtcactcttgtcactttatttatttattggtttttttttaaccatctgtgtacattcctttcatagggtagagttctagttctagaagttcttattttgtttttgttgtaatgtttgaatactatttaatatccggttttaatattgctggatttgctacctttggttacttgtgcagtgttaaaagtaatccactttcttgtttaatataccagatacatagcaaaagcagcttggaataattatagctgtttatttggctgtgctcagttactatattaagatcttgtactgtgtaacagtaactcttttttgcttttcagtaatttaatatgttcacttaacaaaatacgaactttgagatgcactaaagttttgtttcagcagtggctcaaaaaatttcagaaattacttttgtaattatttgcaattaattgttcttttatcttacaattgtttaagcctgtgatctttcttctcccagctaagagttcttcaataaatttaagaaatacctgg

SEQ ID NO: 327059 - DNA, 6122 bp, Homo sapiens
gcttgcttgcccggctcgctcacgggtcgttgaggccggtgacatgtctgtgagctgcggaggctgcggcccccagatctttctctttgacactttgcaataaaaaagggcagtgagattgaataggtgttttgtggattaactcttcattgattatatacaacaaaaaatagttatggcgactttcagaaacaatcacatgaagactaaagcatctgtcagaaaaagcttcagtgaagatgtgttccagtctgtaaagtctttattgcagagtcagaaggaactatgcagtgtaacagcagaggactgtttacagcaggatgagcatgccaatttaactgaggtcacatttctgggttttaatgaagagacagatgctgctcatatacaggatttagctgcagtttctttggaacttccagatattctgaattcactccacttctgcagtctaaatgaaaatgaaattatttgtatgaagaatataaataaaccattagatataagcagtgatcctctaaatcagagtcatccttctggaatgctttgtgtcatgagagtgtcacctacatcaccaagacttaggattgattttatctttagtctcctaagtaaatatgctactggtataaggtacaccttggacacattcttgcatcagaagcaccaacttgagaccactgatgaagatgatgatgatactaaccagtctgtgtcatccatagaggatgactttgtcactgcttttgagcacttagaagaggaagagacttcaaagccatacaatgatggaatgaacattactgtgctaaggagccagtgtgatgctgcttcccagacggttactggtcatcatttagaaacccatgatttaaagattctcattagctctggacagcagaagtcattggctaaaccctcaacttcctcagtgaatgtcctgggacataaagaactaccttctgtgaaaacttcagtcacaacatcaatttcagagccttggacccaaaggagtttctataggtcatctaatgcttcagataaagatagtgatttacagaaaacatttttttcgtcttctcctgcctactcatctgaatcagaatgttcaagtccaagtcctgttattttcttggatgaagagggatatcaaaaaagcttaaaagcaaaacttgagctgcctaaaattcctgtgatgaaagatgatatagaggattcagactcagaagtaagtgaattttttgatagttttgatcagtttgatgaactagaacaaactttagagacttgcctgtttaacaaagatcccgtcatagggaagtcatcgcagaggaaagggcacaaacatggaaagtcatgtatgaatcctcaaaaattcaagtttgatcgtccagctctcccagctaatgttagaaagccaactcctcgtaaaccagaatctccatatggtaacctgtgtgatgctccggattctcctcgcccagtgaaggcatcaagggaagatagtggtttatttagtcctattcgatcctctgcttttagtcctcttggaggctgtactccagctgaatgtttttgccaaacagatattggtggagataggattcatgaaaatcatgattctgtttattacacctatgaagactatgcaaaaagcatttcatgtgaagtactaggctcagttcttcgtacccaccatactaataccctatcaaatattaacagtattaaacatggagaaaataaaactgtaacttttaagcatggaaaccttgatcaaaaaaataaatctaaaaataaatccttaatgattaaagatagcattcaaaaatttgcagcagatcttgtggaaaaaagttttggcagtgcatttaaagacttacagaaaggagtctcttcatgtaccaatgctttgtaccacttagccatcaaattgacatcatctgttttgcagatggcatttgatgagctgagaaggcagcgtgcattttcactaaaagaacgtgccattagtggcctggctaactttttggtgagtgaagctttatcaaatgccttaaaagatttacagtatgtaaagaagcagatattcacaaacacagttgctaggtttgctgcagatcttgctgaagagcttgtttttgaaggcatcatggaggtgtgtcagttttcatatcctcaaacgcctgcatctccacagtgtgggtcgtttgactttgaagacaaagtagtgaagttgtatgcaaaagatttgtctgaatctgtaatacaggaagcattcattgagctatcacaagttgatgtgacctttacaacaaaggcagcagttagtgtctctacggataatatcaagtatgtgagtgcagaaagtgtagtgccatcgacacaggctgtcacgttttccccttcttttcacaatcaagcaattatggtgacaaaaccagtgcaggaatataaaaaggaatacacagtgcagcaggccttgttttgtacttctggaattgttacttctataccggtgcccttggcaggaagtgcccttctcccatatcatatttcatctactgcatgtcaggccaaggctcatctgtcatctgatgatagtaattcaaatggtgattctgcccaagtgcatattgccacaaaaaacagagaagaaaaagcagcttgtctcagaaatatttgtttaccttcagaacacaatccaggtaatcagaatgattttaaaccaactaatgacgatattgaaatgcagagttcctcaaaattaccaaatgatcctgcaattattagcaacttttctgcagcagtggtgcatacgatagtaaatgaaactttagagtcaatgacatcattggaagttacaaaaatggttgatgaacgtacagattatttaactaaatctttaaaggagaaaacccctccattttcccactgtgatcaggcagtgctgcaatgcagtgaagctagtagcaataaggacatgtttgctgaccggttatctaaatctattattaaacattccatagataagagcaaatcagtgatcccaaatatagataaaaatgcagtatacaaggaaagcttgcctgtttctggagaagaatcacagttgacaccagaaaagtctcccaaatttcctgactctcagaatcagttaactcactgctcactttcagctgcaaaggattgtgttccagaatgtaaagtttctatggttcatggatcctccctagagacactgccatcttgtccagctgtgacaggtcagaaatctgacttgaaggaatctgctaaggatcaaccactgaaaaagcataacttgaatagtacatcacttgaggccttgtcttttggacaggaaaacccctttcctcattcacatactttctcatctacagcacttacctgtgtagatggtttgcatgtggaagataaacagaaagtcagagacagaaatgtaatacctgatactcctccatcaactcctctagtaccatcccgggctagttctgaatgggatatcaagaagttaactaaaaagctcaagggagaattagccaaagagtttgcacctgctacaccaccttctactccacacaactcatctgttggtagtttgtctgagaatgaacaaaatactatagaaaaagaagagttcatgttgaaactcatgcgatctctttctgaagaagttgagagtagtgaaagtggagagctcccagaagtggatgtgaagtcggagcactcagggaagaaggttcagtttgcagaagcattagctacacacatcctttctcttgcaactgaaatggcagcttcccatttagataacaaaataattcaagaacccaaggttaaaaacccttgcttaaatgtgcaaagtcaaagaagtgtgtcgcctacttttttaaacccctcagacgaaaatttgaaaacattatgcaattttgcgggtgatctggcagcagaagtcattacagaagctgagaaaatagcaaaagtccgaaattgtatgcttttcaagcaaaagaagaacagttgttatgctgatggtgacgaagattataaagtagaagagaagttggatatagaggctgtagtgcacccaagagaagtggatccgtttattctttcattaccaccaagttcttgtatgtcaggtctgatgtataagtatcccagctgtgaaagtgtgacagatgaatatgcaggtcaccttattcagatactaaaacaggaaggtggtaatagtgagttgataatggatcagtatgccaataggcttgcctaccgatctgttaaatcaggattacaggaagcagctaagacaaccaaagtgcagtgcaactcaagaatgttccctgtgccaagttcacaagtgaaaacaaacaaggaactgttaatgttttcaaacaaagagcaccaccaagaagcagacaaaaagagacaaagtaaaagaaatgaaggttacttttgtaaaaatcaaacttgtgaaaggaccctgtggaccatcagttgaacttagcccctggaaatggcaaactaggtgtgggagggaaggcaactcttggaaaagggaatgaggtagcataaggaaaggaaatggcttttcacctgatagaacacttcatctcgaagagttttgttcgatgcttggattaacctggaaatattaatatttttgtaaagtatattttgtcatagtttattatggtgctatataaaccaccaatatttcttaaaatctaggtccaaaaagacagtgtttaaaactggtagaagcaagtgggggcaatgtcacaaatcatgatttggcccttttctataactttatctagaaaaggatactaacatttagtttcttctctcattttgagaaacacaggcttctatgatttcagtggggttgacagtgttgcctaggaaatcctggcgttaaaatgggagattgaggtgtgggtagaggctttaagcattaagaggacttgtagtcagttgaacaactctgtgctgaatattatctaatttgatgagaaaaaggagtcgtcttaccggtttctgtccttggttctgtcctccttagcattatttattaatgatgtggaatactcatttgtggatgattcaacacaggctgaaaaaagaatctcattaacagaacaaaggttaaaaagaccaaatcaagctgaggttaaaataattatgtttaacatggataaatgcatttaggctcagaaaattaatgattaatatttgaacttaagtggggagcaaacctggcttgatggcattttgtcagaaaaagacctgtgtttccattgaccaaagttgtaatgtgacttaatgtaatgctgcgtggcattaaggttctggcacagagaaaaagcggggctcatccaggattggtggtgtgctcgttgcatatacagtgtccagggtctcacctccagagatgaagatttatgaagtcagtgaagggtcctgagaatctgcatgcttgataagcatcacagatgatttcagtgcaggtgattcagagacctcacttgaaaatatattgatttacaagatatgttgcatctgttgatgacaattgatatctatactgttcttttctgctacagagatcaaggtaggagataaagacttcaggcgatttgggctgggcgcggtgattcacgcctgtaatcccagaactctgggaagccaatgggggtgggggtggatcacttgaggtcaggagttcaagaccagcctgggcaacatggtgaaaccccgtctctaccaaaaatacaaaaattagccaggcgtggtggcaggcacctgtaatcccagctacttgggaggctaaggcaggagaattgcttgaacctgggaggcagagattgcagtgagctgagattgtgccactgtactccatcctgggcgacagagacagactccgtcaaaaaaaaaaaaaaaagactgtgacaatttgaaaacaccttgccagtttcattataagcaggaagttcagtggagggcaacaactaaaaaacacaccaatttcagattttcaaaagtgtttaggaggattatataattatttgatcagaaaagaactgggtggatagtctgtg

SEQ ID NO: 327060 - DNA, 1789 bp, Homo sapiens
gcttgcttgcccggctcgctcacgggtcgttgaggccggtgacatgtctgtgagctgcggaggctgcggcccccagatctttctctttgacactttgcaataaaaaagggcagtgagattgaataggtgttttgtggattaactcttcattgattatatacaacaaaaaatagttatggcgactttcagaaacaatcacatgaagactaaagcatctgtcagaaaaagcttcagtgaagatgtgttccagtctgtaaagtctttattgcagagtcagaaggaactatgcagtgtaacagcagaggactgtttacagcaggatgagcatgccaatttaactgaggtcacatttctgggttttaatgaagagacagatgctgctcatatacaggatttagctgcagtttctttggaacttccagatattctgaattcactccacttctgcagtctaaatgaaaatgaaattatttgtatgaagaatataaataaaccattagatataagcagtgatcctctaaatcagagtcatccttctggaatgctttgtgtcatgagagtgtcacctacatcaccaagacttaggattgattttatctttagtctcctaagtaaatatgctactggtataaggtacaccttggacacattcttgcatcagaagcaccaacttgagaccactgatgaagatgatgatgatactaaccagtctgtgtcatccatagaggatgactttgtcactgcttttgagcacttagaagaggaagagacttcaaagccatacaatgatggaatgaacattactgtgctaaggagccagtgtgatgctgcttcccagacggttactggtcatcatttagaaacccatgatttaaagattctcattagctctggacagcagaagtcattggctaaaccctcaacttcctcagtgaatgtcctgggacataaagaactaccttctgtgaaaacttcagtcacaacatcaatttcagagccttggacccaaaggagtttctataggtcatctaatgcttcagataaagatagtgatttacagaaaacatttttttcgtcttctcctgcctactcatctgaatcagaatgttcaagtccaagtcctgttattttcttggatgaagagggatatcaaaaaagcttaaaagcaaaacttgagctgcctaaaattcctgtgatgaaagatgatatagaggattcagactcagaagtaagtgaattttttgatagttttgatcagtttgatgaactagaacaaactttagagacttgcctgtttaacaaagatcccgtcatagggaagtcatcgcagaggaaagggcacaaacatggaaagtcatgtatgaatcctcaaaaattcaagtttgatcgtccagctctcccagctaatgttagaaagccaactcctcgtaaaccagaatctccatatggtaacctgtgtgatgctccggattctcctcgcccagtgaaggcatcaagggaagatagtggtttatttagtcctattcgatcctctgcttttagtcctcttggaggctgtactccagctgaatgtttttgccaaacagatattggtggagataggattcatgaaaatcatgattctgtttattacacctatgaagactatgcaaaaagcatttcatgtgaagtactaggctcagttcttcgtacccaccatactaataccctatcaaggtttccatgcttaaaagttacagttttattctaccatgttaatactgtaatattgataggtatagggccggct

SEQ ID NO: 327061 - DNA, 1046 bp, Homo sapiens
gcttgcttgcccggctcgctcacgggtcgttgaggccggtgacatgtctgtgagctgcggaggctgcggcccccagatctttctctttgacactttgcaataaaaaagggcagtgagattgaataggtgttttgtggattaactcttcattgattatatacaacaaaaaatagttatggcgactttcagaaacaatcacatgaagactaaagcatctgtcagaaaaagcttcagtgaagatgtgttccagtctgtaaagtctttattgcagagtcagaaggaactatgcagtgtaacagcagaggactgtttacagcaggatgagcatgccaatttaactgaggtttaacatactactttctaaaccctttcctaataatgcacagcatattttcatgcatctttgtaggactctatgatctatttttaaaatgcctaaaatctctatttgttgttacatgtatcagaagtacctgttttgtgggcgggagaggggaaaaaaaagaagtacctgttttaaatactggctaaaataattttcttaattgacaatgaactcaaacaaatgagcacatttattttatgcagagtactaattggatatatagcattacattagatgatgcctactatattcagcaactgatactttaatatgaatttttctactctgaaacatagaacaaatgcatgattcttatgttgattttttgggttattttcttgactgtttaaattcagtgctttgattaaaaatgaaaaagtagtgataaatttatctttgaaattaagatacttactctattacttgaggataagataatataccttgctcacctatttctctgctacatccagtgtttcaaatctttgtttgaatttattattataaaaagagtaagatccttttctataatatatccatacttcatcatcacatttgttaccaaatacgagatgtattaggtcgttgcagctcacaactgatgaatatttgaagttaaaacattttattttgaaataagcgttctaataaaatcgtggtt

SEQ ID NO: 327062 - DNA, 9776 bp, Homo sapiens
ggtttaagaactgcgttttggagcccaatctttggtgaaaaatatttttgggtcatctttgaaaaaaatccttttcaagcagacagcattttaatgctttgtctgttttttcctgtttgtcagctctgtcaccagcctgaaagatttaaaaattcaaattaatggaggtttatttgttctttactcaggtcacatttctgggttttaatgaagagacagatgctgctcatatacaggatttagctgcagtttctttggaacttccagatattctgaattcactccacttctgcagtctaaatgaaaatgaaattatttgtatgaagaatataaataaaccattagatataagcagtgatcctctaaatcagagtcatccttctggaatgctttgtgtcatgagagtgtcacctacatcaccaagacttaggattgattttatctttagtctcctaagtaaatatgctactggtataaggtacaccttggacacattcttgcatcagaagcaccaacttgagaccactgatgaagatgatgatgatactaaccagtctgtgtcatccatagaggatgactttgtcactgcttttgagcacttagaagaggaagagacttcaaagccatacaatgatggaatgaacattactgtgctaaggagccagtgtgatgctgcttcccagacggttactggtcatcatttagaaacccatgatttaaagattctcattagctctggacagcagaagtcattggctaaaccctcaacttcctcagtgaatgtcctgggacataaagaactaccttctgtgaaaacttcagtcacaacatcaatttcagagccttggacccaaaggagtttctataggtcatctaatgcttcagataaagatagtgatttacagaaaacatttttttcgtcttctcctgcctactcatctgaatcagaatgttcaagtccaagtcctgttattttcttggatgaagagggatatcaaaaaagcttaaaagcaaaacttgagctgcctaaaattcctgtgatgaaagatgatatagaggattcagactcagaagtaagtgaattttttgatagttttgatcagtttgatgaactagaacaaactttagagacttgcctgtttaacaaagatcccgtcatagggaagtcatcgcagaggaaagggcacaaacatggaaagtcatgtatgaatcctcaaaaattcaagtttgatcgtccagctctcccagctaatgttagaaagccaactcctcgtaaaccagaatctccatatggtaacctgtgtgatgctccggattctcctcgcccagtgaaggcatcaagggaagatagtggtttatttagtcctattcgatcctctgcttttagtcctcttggaggctgtactccagctgaatgtttttgccaaacagatattggtggagataggattcatgaaaatcatgattctgtttattacacctatgaagactatgcaaaaagcatttcatgtgaagtactaggctcagttcttcgtacccaccatactaataccctatcaaatattaacagtattaaacatggagaaaataaaactgtaacttttaagcatggaaaccttgatcaaaaaaataaatctaaaaataaatccttaatgattaaagatagcattcaaaaatttgcagcagatcttgtggaaaaaagttttggcagtgcatttaaagacttacagaaaggagtctcttcatgtaccaatgctttgtaccacttagccatcaaattgacatcatctgttttgcagatggcatttgatgagctgagaaggcagcgtgcattttcactaaaagaacgtgccattagtggcctggctaactttttggtgagtgaagctttatcaaatgccttaaaagatttacagtatgtaaagaagcagatattcacaaacacagttgctaggtttgctgcagatcttgctgaagagcttgtttttgaaggcatcatggaggtgtgtcagttttcatatcctcaaacgcctgcatctccacagtgtgggtcgtttgactttgaagacaaagtagtgaagttgtatgcaaaagatttgtctgaatctgtaatacaggaagcattcattgagctatcacaagttgatgtgacctttacaacaaaggcagcagttagtgtctctacggataatatcaagtatgtgagtgcagaaagtgtagtgccatcgacacaggctgtcacgttttccccttcttttcacaatcaagcaattatggtgacaaaaccagtgcaggaatataaaaaggaatacacagtgcagcaggccttgttttgtacttctggaattgttacttctataccggtgcccttggcaggaagtgcccttctcccatatcatatttcatctactgcatgtcaggccaaggctcatctgtcatctgatgatagtaattcaaatggtgattctgcccaagtgcatattgccacaaaaaacagagaagaaaaagcagcttgtctcagaaatatttgtttaccttcagaacacaatccaggtaatcagaatgattttaaaccaactaatgacgatattgaaatgcagagttcctcaaaattaccaaatgatcctgcaattattagcaacttttctgcagcagtggtgcatacgatagtaaatgaaactttagagtcaatgacatcattggaagttacaaaaatggttgatgaacgtacagattatttaactaaatctttaaaggagaaaacccctccattttcccactgtgatcaggcagtgctgcaatgcagtgaagctagtagcaataaggacatgtttgctgaccggttatctaaatctattattaaacattccatagataagagcaaatcagtgatcccaaatatagataaaaatgcagtatacaaggaaagcttgcctgtttctggagaagaatcacagttgacaccagaaaagtctcccaaatttcctgactctcagaatcagttaactcactgctcactttcagctgcaaaggattgtgttccagaatgtaaagtttctatggttcatggatcctccctagagacactgccatcttgtccagctgtgacaggtcagaaatctgacttgaaggaatctgctaaggatcaaccactgaaaaagcataacttgaatagtacatcacttgaggccttgtcttttggacaggaaaacccctttcctcattcacatactttctcatctacagcacttacctgtgtagatggtttgcatgtggaagataaacagaaagtcagagacagaaatgtaatacctgatactcctccatcaactcctctagtaccatcccgggctagttctgaatgggatatcaagaagttaactaaaaagctcaagggagaattagccaaagagtttgcacctgctacaccaccttctactccacacaactcatctgttggtagtttgtctgagaatgaacaaaatactatagaaaaagaagagttcatgttgaaactcatgcgatctctttctgaagaagttgagagtagtgaaagtggagagctcccagaagtggatgtgaagtcggagcactcagggaagaaggttcagtttgcagaagcattagctacacacatcctttctcttgcaactgaaatggcagcttcccatttagataacaaaataattcaagaacccaaggttaaaaacccttgcttaaatgtgcaaagtcaaagaagtgtgtcgcctacttttttaaacccctcagacgaaaatttgaaaacattatgcaattttgcgggtgatctggcagcagaagtcattacagaagctgagaaaatagcaaaagtccgaaattgtatgcttttcaagcaaaagaagaacagttgttatgctgatggtgacgaagattataaagtagaagagaagttggatatagaggctgtagtgcacccaagagaagtggatccgtttattctttcattaccaccaagttcttgtatgtcaggtctgatgtataagtatcccagctgtgaaagtgtgacagatgaatatgcaggtcaccttattcagatactaaaacaggaaggtggtaatagtgagttgataatggatcagtatgccaataggcttgcctaccgatctgttaaatcaggattacaggaagcagctaagacaaccaaagtgcagtgcaactcaagaatgttccctgtgccaagttcacaagtgaaaacaaacaaggaactgttaatgttttcaaacaaagagcaccaccaagaagcagacaaaaagagacaaagtaaaagaaatgaaggttacttttgtaaaaatcaaacttgtgaaaggaccctggatccatatagaaatgaggtctcccaactgtatagtttttcaacctctctcgttcacagcataacaaaagatgctaaggaagagttgacagcctctctagttggcctaccaaaatccttaacagattcttgcttgtttgaaaaatctggatatgaagaagataatgagtgtcacgttacaccagaattgcctaagtctcttcagccttcctcacaaaatcacaggttttaccacagcactggcagtttaaatggatatggttgtggagacaatgttgttcaagctgtagaacagtatgccaaaaaagtagtggatgacactctagagctaactctaggatctacagtgttccgagtgtctgagaccacaaaatcagcagacagggtcacttatgcagaaaagttgtcacctcttacaggtcaagcttgcagatactgtgaccttaaagaactccacaattgcactggaaattcatctcagcactttttcagacagggttctctcgccagtagtaagccagcttctaatccaaaatttagcagccgctatcagaaatctaggatttttcatctcagtgtccctcagattcatgttaatcttgataagaaggcagtgcttgctgagaagatagttgctgaagccattgaaaaagctgagcgagagctgagcagtaccagcctggcagccgacagtgggatcggacaggagggtgccagctttgctgaaagccttgccacagaaaccatgacagcagctgtcacaaatgttgggcatgctgttagcagttcaaaagaaatagaagactttcagtcaaccgagtctgtcagtagccagcagatgaacctcagtattggtgatgacagcactggtagctggtccaatttaagttttgaagatgaacaccaagatgaaagcagcagttttcatcatctaagtgaaagtaatggtaacagcagtagctggagcagtcttggtttagaaggagatttgtatgaggacaatttatcctttccaacatcagacagtgatggaccagatgataaagatgaagagcatgaggacgaagtagaaggtttggggcaagatggaaagacactgctaattacgaatattgacatggagccatgcacggtagacccccagctaaggattattcttcagtggctcattgcctctgaggctgaagttgcagaactttattttcatgactctgcaaataaggagtttatgctactttcaaaacaattacaagagaaaggatggaaagtgggagacctcctgcaggctgtgcttcaatactatgaagtgatggaaaaagcttccagtgaggagagatgcaagtcgctgtttgattggctcttggaaaatgcatagagcaaaccccaaaccagtatattttagtatttgtttggggaggggaacaagccaataaagatgtttaggataaaatttgaatagtgaatattaacatcgtaagtcagttgggaggcaagtaaatatagctttctgagcgctttgtgttatcactcggtgtatatagttcatacttttgtaatctgtcaaaatactaccttcatttattcttctatacacatgtgtagtgtgtcaagaccctaagaacatgtatttgaaggaaggtctaaccagggggttttcaggggcattgtctgaccacattctttttgtatccaaatagtgctgctagaaactgcactgaagtggctgaggataggttccagtgatagagttataattttgctcctttgcaaacaaatggtatctaattaataactagtctgacatcagaaaataaaattgaggctgatttttaaaaatttctagtagatttttggcctttctttcctgtttttaaaaatcagtttcattttcatatttcatagatcagctattggtagctttttgatttccccaaactatttaatttcttagcagaaacattagtattttaggtttctataaacactataagtgatagtttcccccatcctttcattgacattatttgccaatgctgccagtcattctggcatgaaaggtgtgtgtgtgtgtgtgtgtgtgtgtgtgtgtgtgtgtgtgtgtgtgtgtgtaagggagtactttaaccttgccagtttgttccctcttttattttactgttttctttttagaaacccactgttaaaatttaaaaaggtgctttaaaataaaacgcctataaagattgtgcagtaagaatttttattgacaataattaaaattttttttgacaattttgggttcccaacttatcttacaagtgaaaacttaaattgtaaaacatgttgaaattttaaaaattaatgttaatatggaaatgcatttagagaagcccagtagtttttattgttggatttttgaaaaaacctctaccaagaatgtggtgttttttttttttgtttgtttgttcgttttagaaaaattgggatttccccccaccccgccccacccagataaactatatctacactgtctcgtcaagttctctgacacgatctttctgggctctacatttcctactagtttgtgtccagaaactgcaagttgacatgaatagaggacaaaggttgtgtcttgcttttgtctctctcttccctccctgcaactctctctcccctcctcccactctcttccccctcccccctcctcccactgtctctcacctcccccaccccccactctctctcatctctcgctgtgtcctgtgtatgtgtgggtgtgtgtgtatttgggtgtgtaaatgttggttcttccactactggattttgtaatctaggataaatcactttttttggggactttgattttgctccattacgttttcattttttctgagcactgactgttctgaaagctgcacaaaacgtagaaagaagacatagcgcctgccagggaataggaaatgagggcacttacacattaatgtgaattagtaattgtggtatagaaatgttttatagtgaaagattcaaatttgcttttcaagaaaaatgccaaaagctatttaaataattcgaggttacatcgtaggttttgatttttctcaatttaagatacagaaatacagcaagccttaatataaagtttcctaaagtttcttcaagtattttttaaggtggagaaatgcaggaattgtataaccagaattgttcctgcctttagcttttcagaacttgagatgtggcagcactggactgggtttttttaaatgttaggactaggaatgtttgctcttgttaattatgaattaattgattattaagtttagaatgcatttttacaagtatctaactatcaaattgtgtttagtaacttgagtgtatgcacaagtttgatcaacagcaaaatagagttctgaatttcttttaaagtgatgatatattattttgtgaaactttgtgtttgaaaatgtttatttctgtttatggtgtaatcattctgaggtgaggcttttcttatttcctttgcattttgctagagctgtgctgagttcagcatttgcttatttaaccactacataatgacagaccagttattaggtattagcatgtgtggtaataataatagtggaacttcacacttacatcaattcagtgcaggggcatagaataaaatattaaatattggcagatgtatgaaaagaagtgtgagttaaaaatattgaatattggcaggtgtgaaaacaagtgtcaaaattcctcatatagagaaaataattttgagtttagagtattatcttttaattaagtgtagtctaaacttaactttctgtaaaggcactttgtggtttttccaaagatgttctagatctatttggttgctctatagtcaaacagctcttttgaagacaactgtcttattttattacaaattggcttgacatatttatactgtaacattgtaatattgctgtgctgtacattttggcccttacgaaatacgtctttttcagaactgttaaagttttgatgtacatcgagctgaattctgtttttaccagtttcaaaaccttcaagtgatatgtggaaaaaagtgaatgagacctctgatagggggttttcagaaccttgttcacaccaaaatgtgacagttctttcatgttttcctaaaccaagttaaaattacatgtatattttggtgttaaggttgatttttaagatacttctgatttgtacaaaaggaatgtttcctttataaatcacagaagaaaatgacaatatctgttggatatttgatataatttaatggtgttataaaacctttaagaggattcatggtgaatatatgtgataacatctttatactttgaaaaatgttccacttacccttcagatatttgttgtaagttaattcaattcttaatactttaattttgctccaacaagggctttatgttgctggtaagagaatttatttactaaatgcactatgtataaagtgaaagatagtttacttatctgactttgatattagatggctgacattagtgcacataatgcagagtttaaccttgattcttcaacagagtccagatttaaatgtctacttagttaattagttagctgatattcttccacaattaatatattcaatttcccatcagtatatcactttaaattttatgtttttctaaggaaactttccacagaattttaaacaactgatgcatccatactcagggtgtagggagaatactttgcatttaaaaaccctgtccacctgtcaccagcacaagagaattagagcttcagtgagaatttagaaaaattatactaaagtgagatgcattttttctcattttcagcaagactcctctaagcatttactcatttactgtattcctgctctgaagatgtggatacagaattagtcactcttgtcactttatttatttattggtttttttttaaccatctgtgtacattcctttcatagggtagagttctagttctagaagttcttattttgtttttgttgtaatgtttgaatactatttaatatccggttttaatattgctggatttgctacctttggttacttgtgcagtgttaaaagtaatccactttcttgtttaatataccagatacatagcaaaagcagcttggaataattatagctgtttatttggctgtgctcagttactatattaagatcttgtactgtgtaacagtaactcttttttgcttttcagtaatttaatatgttcacttaacaaaatacgaactttgagatgcactaaagttttgtttcagcagtggctcaaaaaatttcagaaattacttttgtaattatttgcaattaattgttcttttatcttacaattgtttaagcctgtgatctttcttctcccagctaagagttcttcaataaatttaagaaatacctgg

SEQ ID NO: 327063 - DNA, 10272 bp, Homo sapiens
gcttgcttgcccggctcgctcacgggtcgttgaggccggtgacatgtctgtgagctgcggaggctgcggcccccagatctttctctttgacactttgcaataaaaaagggcagtgagattgaataggtgttttgtggattaactcttcattgattatatacaacaaaaaatagttatggcgactttcagaaacaatcacatgaagactaaagcatctgtcagaaaaagcttcagtgaagatgtgttccagtctgtaaagtctttattgcagagtcagaaggaactatgcagtgtaacagcagaggactgtttacagcaggatgagcatgccaatttaactgaggtcacatttctgggttttaatgaagagacagatgctgctcatatacaggatttagctgcagtttctttggaacttccagatattctgaattcactccacttctgcagtctaaatgaaaatgaaattatttgtatgaagaatataaataaaccattagatataagcagtgatcctctaaatcagagtcatccttctggaatgctttgtgtcatgagagtgtcacctacatcaccaagacttaggattgattttatctttagtctcctaagtaaatatgctactggtataaggtacaccttggacacattcttgcatcagaagcaccaacttgagaccactgatgaagatgatgatgatactaaccagtctgtgtcatccatagaggatgactttgtcactgcttttgagcacttagaagaggaagagacttcaaagccatacaatgatggaatgaacattactgtgctaaggagccagtgtgatgctgcttcccagacggttactggtcatcatttagaaacccatgatttaaagattctcattagctctggacagcagaagtcattggctaaaccctcaacttcctcagtgaatgtcctgggacataaagaactaccttctgtgaaaacttcagtcacaacatcaatttcagagccttggacccaaaggagtttctataggtcatctaatgcttcagataaagatagtgatttacagaaaacatttttttcgtcttctcctgcctactcatctgaatcagaatgttcaagtccaagtcctgttattttcttggatgaagagggatatcaaaaaagcttaaaagcaaaacttgagctgcctaaaattcctgtgatgaaagatgatatagaggattcagactcagaagtaagtgaattttttgatagttttgatcagtttgatgaactagaacaaactttagagacttgcctgtttaacaaagatcccgtcatagggaagtcatcgcagaggaaagggcacaaacatggaaagtcatgtatgaatcctcaaaaattcaagtttgatcgtccagctctcccagctaatgttagaaagccaactcctcgtaaaccagaatctccatatggtaacctgtgtgatgctccggattctcctcgcccagtgaaggcatcaagggaagatagtggtttatttagtcctattcgatcctctgcttttagtcctcttggaggctgtactccagctgaatgtttttgccaaacagatattggtggagataggattcatgaaaatcatgattctgtttattacacctatgaagactatgcaaaaagcatttcatgtgaagtactaggctcagttcttcgtacccaccatactaataccctatcaaatattaacagtattaaacatggagaaaataaaactgtaacttttaagcatggaaaccttgatcaaaaaaataaatctaaaaataaatccttaatgattaaagatagcattcaaaaatttgcagcagatcttgtggaaaaaagttttggcagtgcatttaaagacttacagaaaggagtctcttcatgtaccaatgctttgtaccacttagccatcaaattgacatcatctgttttgcagatggcatttgatgagctgagaaggcagcgtgcattttcactaaaagaacgtgccattagtggcctggctaactttttggtgagtgaagctttatcaaatgccttaaaagatttacagtatgtaaagaagcagatattcacaaacacagttgctaggtttgctgcagatcttgctgaagagcttgtttttgaaggcatcatggaggtgtgtcagttttcatatcctcaaacgcctgcatctccacagtgtgggtcgtttgactttgaagacaaagtagtgaagttgtatgcaaaagatttgtctgaatctgtaatacaggaagcattcattgagctatcacaagttgatgtgacctttacaacaaaggcagcagttagtgtctctacggataatatcaagtatgtgagtgcagaaagtgtagtgccatcgacacaggctgtcacgttttccccttcttttcacaatcaagcaattatggtgacaaaaccagtgcaggaatataaaaaggaatacacagtgcagcaggccttgttttgtacttctggaattgttacttctataccggtgcccttggcaggaagtgcccttctcccatatcatatttcatctactgcatgtcaggccaaggctcatctgtcatctgatgatagtaattcaaatggtgattctgcccaagtgcatattgccacaaaaaacagagaagaaaaagcagcttgtctcagaaatatttgtttaccttcagaacacaatccaggtaatcagaatgattttaaaccaactaatgacgatattgaaatgcagagttcctcaaaattaccaaatgatcctgcaattattagcaacttttctgcagcagtggtgcatacgatagtaaatgaaactttagagtcaatgacatcattggaagttacaaaaatggttgatgaacgtacagattatttaactaaatctttaaaggagaaaacccctccattttcccactgtgatcaggcagtgctgcaatgcagtgaagctagtagcaataaggacatgtttgctgaccggttatctaaatctattattaaacattccatagataagagcaaatcagtgatcccaaatatagataaaaatgcagtatacaaggaaagcttgcctgtttctggagaagaatcacagttgacaccagaaaagtctcccaaatttcctgactctcagaatcagttaactcactgctcactttcagctgcaaaggattgtgttccagaatgtaaagtttctatggttcatggatcctccctagagacactgccatcttgtccagctgtgacaggtcagaaatctgacttgaaggaatctgctaaggatcaaccactgaaaaagcataacttgaatagtacatcacttgaggccttgtcttttggacaggaaaacccctttcctcattcacatactttctcatctacagcacttacctgtgtagatggtttgcatgtggaagataaacagaaagtcagagacagaaatgtaatacctgatactcctccatcaactcctctagtaccatcccgggctagttctgaatgggatatcaagaagttaactaaaaagctcaagggagaattagccaaagagtttgcacctgctacaccaccttctactccacacaactcatctgttggtagtttgtctgagaatgaacaaaatactatagaaaaagaagagttcatgttgaaactcatgcgatctctttctgaagaagttgagagtagtgaaagtggagagctcccagaagtggatgtgaagtcggagcactcagggaagaaggttcagtttgcagaagcattagctacacacatcctttctcttgcaactgaaatggcagcttcccatttagataacaaaataattcaagaacccaaggttaaaaacccttgcttaaatgtgcaaagtcaaagaagtgtgtcgcctacttttttaaacccctcagacgaaaatttgaaaacattatgcaattttgcgggtgatctggcagcagaagtcattacagaagctgagaaaatagcaaaagtccgaaattgtatgcttttcaagcaaaagaagaacagttgttatgctgatggtgacgaagattataaagtagaagagaagttggatatagaggctgtagtgcacccaagagaagtggatccgtttattctttcattaccaccaagttcttgtatgtcaggtctgatgtataagtatcccagctgtgaaagtgtgacagatgaatatgcaggtcaccttattcagatactaaaacaggaaggtggtaatagtgagttgataatggatcagtatgccaataggcttgcctaccgatctgttaaatcaggattacaggaagcagctaagacaaccaaagtgcagtgcaactcaagaatgttccctgtgccaagttcacaagtgaaaacaaacaaggaactgttaatgttttcaaacaaagagcaccaccaagaagcagacaaaaagagacaaagtaaaagaaatgaaggttacttttgtaaaaatcaaacttgtgaaaggaccctggatccatatagaaatgaggtctcccaactgtatagtttttcaacctctctcgttcacagcataacaaaagatgctaaggaagagttgacagcctctctagttggcctaccaaaatccttaacagattcttgcttgtttgaaaaatctggatatgaagaagataatgagtgtcacgttacaccagaattgcctaagtctcttcagccttcctcacaaaatcacaggttttaccacagcactggcagtttaaatggatatggttgtggagacaatgttgttcaagctgtagaacagtatgccaaaaaagtagtggatgacactctagagctaactctaggatctacagtgttccgagtgtctgagaccacaaaatcagcagacagggtcacttatgcagaaaagttgtcacctcttacaggtcaagcttgcagatactgtgaccttaaagaactccacaattgcactggaaattcatctcagcactttttcagacagggttctctcgccagtagtaagccagcttctaatccaaaatttagcagccgctatcagaaatctaggatttttcatctcagtgtccctcagattcatgttaatcttgataagaaggcagtgcttgctgagaagatagttgctgaagccattgaaaaagctgagcgagagctgagcagtaccagcctggcagccgacagtgggatcggacaggagggtgccagctttgctgaaagccttgccacagaaaccatgacagcagctgtcacaaatgttgggcatgctgttagcagttcaaaagaaatagaagactttcagtcaaccgagtctgtcagtagccagcagatgaacctcagtattggtgatgacagcactggtagctggtccaatttaagttttgaagatgaacaccaagatgaaagcagcagttttcatcatctaagtgaaagtgatggaccagatgataaagatgaagagcatgaggacgaagtagaaggtttggggcaagatggaaagacactgctaattacgaatattgacatggagccatgcacggtagacccccagctaaggattattcttcagtggctcattgcctctgaggctgaagttgcagaactttattttcatgactctgcaaataaggagtttatgctactttcaaaacaattacaagagaaaggatggaaagtgggagacctcctgcaggctgtgcttcaatactatgaagtgatggaaaaagcttccagtgaggagagatgcaagtcgctgtttgattggctcttggaaaatgcatagagcaaaccccaaaccagtatattttagtatttgtttggggaggggaacaagccaataaagatgtttaggataaaatttgaatagtgaatattaacatcgtaagtcagttgggaggcaagtaaatatagctttctgagcgctttgtgttatcactcggtgtatatagttcatacttttgtaatctgtcaaaatactaccttcatttattcttctatacacatgtgtagtgtgtcaagaccctaagaacatgtatttgaaggaaggtctaaccagggggttttcaggggcattgtctgaccacattctttttgtatccaaatagtgctgctagaaactgcactgaagtggctgaggataggttccagtgatagagttataattttgctcctttgcaaacaaatggtatctaattaataactagtctgacatcagaaaataaaattgaggctgatttttaaaaatttctagtagatttttggcctttctttcctgtttttaaaaatcagtttcattttcatatttcatagatcagctattggtagctttttgatttccccaaactatttaatttcttagcagaaacattagtattttaggtttctataaacactataagtgatagtttcccccatcctttcattgacattatttgccaatgctgccagtcattctggcatgaaaggtgtgtgtgtgtgtgtgtgtgtgtgtgtgtgtgtgtgtgtgtgtgtgtgtgtaagggagtactttaaccttgccagtttgttccctcttttattttactgttttctttttagaaacccactgttaaaatttaaaaaggtgctttaaaataaaacgcctataaagattgtgcagtaagaatttttattgacaataattaaaattttttttgacaattttgggttcccaacttatcttacaagtgaaaacttaaattgtaaaacatgttgaaattttaaaaattaatgttaatatggaaatgcatttagagaagcccagtagtttttattgttggatttttgaaaaaacctctaccaagaatgtggtgttttttttttttgtttgtttgttcgttttagaaaaattgggatttccccccaccccgccccacccagataaactatatctacactgtctcgtcaagttctctgacacgatctttctgggctctacatttcctactagtttgtgtccagaaactgcaagttgacatgaatagaggacaaaggttgtgtcttgcttttgtctctctcttccctccctgcaactctctctcccctcctcccactctcttccccctcccccctcctcccactgtctctcacctcccccaccccccactctctctcatctctcgctgtgtcctgtgtatgtgtgggtgtgtgtgtatttgggtgtgtaaatgttggttcttccactactggattttgtaatctaggataaatcactttttttggggactttgattttgctccattacgttttcattttttctgagcactgactgttctgaaagctgcacaaaacgtagaaagaagacatagcgcctgccagggaataggaaatgagggcacttacacattaatgtgaattagtaattgtggtatagaaatgttttatagtgaaagattcaaatttgcttttcaagaaaaatgccaaaagctatttaaataattcgaggttacatcgtaggttttgatttttctcaatttaagatacagaaatacagcaagccttaatataaagtttcctaaagtttcttcaagtattttttaaggtggagaaatgcaggaattgtataaccagaattgttcctgcctttagcttttcagaacttgagatgtggcagcactggactgggtttttttaaatgttaggactaggaatgtttgctcttgttaattatgaattaattgattattaagtttagaatgcatttttacaagtatctaactatcaaattgtgtttagtaacttgagtgtatgcacaagtttgatcaacagcaaaatagagttctgaatttcttttaaagtgatgatatattattttgtgaaactttgtgtttgaaaatgtttatttctgtttatggtgtaatcattctgaggtgaggcttttcttatttcctttgcattttgctagagctgtgctgagttcagcatttgcttatttaaccactacataatgacagaccagttattaggtattagcatgtgtggtaataataatagtggaacttcacacttacatcaattcagtgcaggggcatagaataaaatattaaatattggcagatgtatgaaaagaagtgtgagttaaaaatattgaatattggcaggtgtgaaaacaagtgtcaaaattcctcatatagagaaaataattttgagtttagagtattatcttttaattaagtgtagtctaaacttaactttctgtaaaggcactttgtggtttttccaaagatgttctagatctatttggttgctctatagtcaaacagctcttttgaagacaactgtcttattttattacaaattggcttgacatatttatactgtaacattgtaatattgctgtgctgtacattttggcccttacgaaatacgtctttttcagaactgttaaagttttgatgtacatcgagctgaattctgtttttaccagtttcaaaaccttcaagtgatatgtggaaaaaagtgaatgagacctctgatagggggttttcagaaccttgttcacaccaaaatgtgacagttctttcatgttttcctaaaccaagttaaaattacatgtatattttggtgttaaggttgatttttaagatacttctgatttgtacaaaaggaatgtttcctttataaatcacagaagaaaatgacaatatctgttggatatttgatataatttaatggtgttataaaacctttaagaggattcatggtgaatatatgtgataacatctttatactttgaaaaatgttccacttacccttcagatatttgttgtaagttaattcaattcttaatactttaattttgctccaacaagggctttatgttgctggtaagagaatttatttactaaatgcactatgtataaagtgaaagatagtttacttatctgactttgatattagatggctgacattagtgcacataatgcagagtttaaccttgattcttcaacagagtccagatttaaatgtctacttagttaattagttagctgatattcttccacaattaatatattcaatttcccatcagtatatcactttaaattttatgtttttctaaggaaactttccacagaattttaaacaactgatgcatccatactcagggtgtagggagaatactttgcatttaaaaaccctgtccacctgtcaccagcacaagagaattagagcttcagtgagaatttagaaaaattatactaaagtgagatgcattttttctcattttcagcaagactcctctaagcatttactcatttactgtattcctgctctgaagatgtggatacagaattagtcactcttgtcactttatttatttattggtttttttttaaccatctgtgtacattcctttcatagggtagagttctagttctagaagttcttattttgtttttgttgtaatgtttgaatactatttaatatccggttttaatattgctggatttgctacctttggttacttgtgcagtgttaaaagtaatccactttcttgtttaatataccagatacatagcaaaagcagcttggaataattatagctgtttatttggctgtgctcagttactatattaagatcttgtactgtgtaacagtaactcttttttgcttttcagtaatttaatatgttcacttaacaaaatacgaactttgagatgcactaaagttttgtttcagcagtggctcaaaaaatttcagaaattacttttgtaattatttgcaattaattgttcttttatcttacaattgtttaagcctgtgatctttcttctcccagctaagagttcttcaataaatttaagaaatacctggaaaaaaaaacaaaaacaaaaaaaaaaaaaaaaaaaaataagaagggagacaggggaaggaggagagagaaaagagagaagagaaagaagggaaaacaagaaagaacgcgggaggcgagaaaaaaaggagggggcgtccagaacatcaaaatgaaagcagaatgttgcgaaacacaaacaagaacgaaggggggagagagacacagggaacgagattaaaaacgagcggcggtgccgagaaagtcacacgacaagcgaaaagagcaagataggagacactaagcacagcagcaggacaaccagcgaaggacgacgacaaaaaaagaagggacaacaaccagggaggaagaaggaaaaacacggagacaccgacactcagcccgccgcccgaacaggaaagaagagtgcaactcgagagaggcaaat

SEQ ID NO: 327064 - DNA, 5939 bp, Homo sapiens
gcttgcttgcccggctcgctcacgggtcgttgaggccggtgacatgtctgtgagctgcggaggctgcggcccccagatctttctctttgacactttgcaataaaaaagggcagtgagattgaataggtgttttgtggattaactcttcattgattatatacaacaaaaaatagttatggcgactttcagaaacaatcacatgaagactaaagcatctgtcagaaaaagcttcagtgaagatgtgttccagtctgtaaagtctttattgcagagtcagaaggaactatgcagtgtaacagcagaggactgtttacagcaggatgagcatgccaatttaactgaggtcacatttctgggttttaatgaagagacagatgctgctcatatacaggatttagctgcagtttctttggaacttccagatattctgaattcactccacttctgcagtctaaatgaaaatgaaattatttgtatgaagaatataaataaaccattagatataagcagtgatcctctaaatcagagtcatccttctggaatgctttgtgtcatgagagtgtcacctacatcaccaagacttaggattgattttatctttagtctcctaagtaaatatgctactggtataaggtacaccttggacacattcttgcatcagaagcaccaacttgagaccactgatgaagatgatgatgatactaaccagtctgtgtcatccatagaggatgactttgtcactgcttttgagcacttagaagaggaagagacttcaaagccatacaatgatggaatgaacattactgtgctaaggagccagtgtgatgctgcttcccagacggttactggtcatcatttagaaacccatgatttaaagattctcattagctctggacagcagaagtcattggctaaaccctcaacttcctcagtgaatgtcctgggacataaagaactaccttctgtgaaaacttcagtcacaacatcaatttcagagccttggacccaaaggagtttctataggtcatctaatgcttcagataaagatagtgatttacagaaaacatttttttcgtcttctcctgcctactcatctgaatcagaatgttcaagtccaagtcctgttattttcttggatgaagagggatatcaaaaaagcttaaaagcaaaacttgagctgcctaaaattcctgtgatgaaagatgatatagaggattcagactcagaagtaagtgaattttttgatagttttgatcagtttgatgaactagaacaaactttagagacttgcctgtttaacaaagatcccgtcatagggaagtcatcgcagaggaaagggcacaaacatggaaagtcatgtatgaatcctcaaaaattcaagtttgatcgtccagctctcccagctaatgttagaaagccaactcctcgtaaaccagaatctccatatggtaacctgtgtgatgctccggattctcctcgcccagtgaaggcatcaagggaagatagtggtttatttagtcctattcgatcctctgcttttagtcctcttggaggctgtactccagctgaatgtttttgccaaacagatattggtggagataggattcatgaaaatcatgattctgtttattacacctatgaagactatgcaaaaagcatttcatgtgaagtactaggctcagttcttcgtacccaccatactaataccctatcaaatattaacagtattaaacatggagaaaataaaactgtaacttttaagcatggaaaccttgatcaaaaaaataaatctaaaaataaatccttaatgattaaagatagcattcaaaaatttgcagcagatcttgtggaaaaaagttttggcagtgcatttaaagacttacagaaaggagtctcttcatgtaccaatgctttgtaccacttagccatcaaattgacatcatctgttttgcagatggcatttgatgagctgagaaggcagcgtgcattttcactaaaagaacgtgccattagtggcctggctaactttttggtgagtgaagctttatcaaatgccttaaaagatttacagtatgtaaagaagcagatattcacaaacacagttgctaggtttgctgcagatcttgctgaagagcttgtttttgaaggcatcatggaggtgtgtcagttttcatatcctcaaacgcctgcatctccacagtgtgggtcgtttgactttgaagacaaagtagtgaagttgtatgcaaaagatttgtctgaatctgtaatacaggaagcattcattgagctatcacaagttgatgtgacctttacaacaaaggcagcagttagtgtctctacggataatatcaagtatgtgagtgcagaaagtgtagtgccatcgacacaggctgtcacgttttccccttcttttcacaatcaagcaattatggtgacaaaaccagtgcaggaatataaaaaggaatacacagtgcagcaggccttgttttgtacttctggaattgttacttctataccggtgcccttggcaggaagtgcccttctcccatatcatatttcatctactgcatgtcaggccaaggctcatctgtcatctgatgatagtaattcaaatggtgattctgcccaagtgcatattgccacaaaaaacagagaagaaaaagcagcttgtctcagaaatatttgtttaccttcagaacacaatccaggtaatcagaatgattttaaaccaactaatgacgatattgaaatgcagagttcctcaaaattaccaaatgatcctgcaattattagcaacttttctgcagcagtggtgcatacgatagtaaatgaaactttagagtcaatgacatcattggaagttacaaaaatggttgatgaacgtacagattatttaactaaatctttaaaggagaaaacccctccattttcccactgtgatcaggcagtgctgcaatgcagtgaagctagtagcaataaggacatgtttgctgaccggttatctaaatctattattaaacattccatagataagagcaaatcagtgatcccaaatatagataaaaatgcagtatacaaggaaagcttgcctgtttctggagaagaatcacagttgacaccagaaaagtctcccaaatttcctgactctcagaatcagttaactcactgctcactttcagctgcaaaggattgtgttccagaatgtaaagtttctatggttcatggatcctccctagagacactgccatcttgtccagctgtgacaggtcagaaatctgacttgaaggaatctgctaaggatcaaccactgaaaaagcataacttgaatagtacatcacttgaggccttgtcttttggacaggaaaacccctttcctcattcacatactttctcatctacagcacttacctgtgtagatggtttgcatgtggaagataaacagaaagtcagagacagaaatgtaatacctgatactcctccatcaactcctctagtaccatcccgggctagttctgaatgggatatcaagaagttaactaaaaagctcaagggagaattagccaaagagtttgcacctgctacaccaccttctactccacacaactcatctgttggtagtttgtctgagaatgaacaaaatactatagaaaaagaagagttcatgttgaaactcatgcgatctctttctgaagaagttgagagtagtgaaagtggagagctcccagaagtggatgtgaagtcggagcactcagggaagaaggttcagtttgcagaagcattagctacacacatcctttctcttgcaactgaaatggcagcttcccatttagataacaaaataattcaagaacccaaggttaaaaacccttgcttaaatgtgcaaagtcaaagaagtgtgtcgcctacttttttaaacccctcagacgaaaatttgaaaacattatgcaattttgcgggtgatctggcagcagaagtcattacagaagctgagaaaatagcaaaagtccgaaattgtatgcttttcaagcaaaagaagaacagttgttatgctgatggtgacgaagattataaagtagaagagaagttggatatagaggctgtagtgcacccaagagaagtggatccgtttattctttcattaccaccaagttcttgtatgtcaggtctgatgtataagtatcccagctgtgaaagtgtgacagatgaatatgcaggtcaccttattcagatactaaaacaggaaggtggtaatagtgagttgataatggatcagtatgccaataggcttgcctaccgatctgttaaatcaggattacaggaagcagctaagacaaccaaagtgcagtgcaactcaagaatgttccctgtgccaagttcacaagtgaaaacaaacaaggaactgttaatgttttcaaacaaagagcaccaccaagaagcagacaaaaagagacaaagtaaaagaaatgaaggttacttttgtaaaaatcaaacttgtgaaaggaccctgtggaccatcagttgaacttagcccctggaaatggcaaactaggtgtgggagggaaggcaactcttggaaaagggaatgaggtagcataaggaaaggaaatggcttttcacctgatagaacacttcatctcgaagagttttgttcgatgcttggattaacctggaaatattaatatttttgtaaagtatattttgtcatagtttattatggtgctatataaaccaccaatatttcttaaaatctaggtccaaaaagacagtgtttaaaactggtagaagcaagtgggggcaatgtcacaaatcatgatttggcccttttctataactttatctagaaaaggatactaacatttagtttcttctctcattttgagaaacacaggcttctatgatttcagtggggttgacagtgttgcctaggaaatcctggcgttaaaatgggagattgaggtgtgggtagaggctttaagcattaagaggacttgtagtcagttgaacaactctgtgctgaatattatctaatttgatgagaaaaaggagtcgtcttaccggtttctgtccttggttctgtcctccttagcattatttattaatgatgtggaatactcatttgtggatgattcaacacaggctgaaaaaagaatctcattaacagaacaaaggttaaaaagaccaaatcaagctgaggttaaaataattatgtttaacatggataaatgcatttaggctcagaaaattaatgattaatatttgaacttaagtggggagcaaacctggcttgatggcattttgtcagaaaaagacctgtgtttccattgaccaaagttgtaatgtgacttaatgtaatgctgcgtggcattaaggttctggcacagagaaaaagcggggctcatccaggattggtggtgtgctcgttgcatatacagtgtccagggtctcacctccagagatgaagatttatgaagtcagtgaagggtcctgagaatctgcatgcttgataagcatcacagatgatttcagtgcaggtgattcagagacctcacttgaaaatatattgatttacaagatatgttgcatctgttgatgacaattgatatctatactgttcttttctgctacagagatcaaggtaggagataaagacttcagctacttgggaggctaaggcaggagaattgcttgaacctgggaggcagagattgcagtgagctgagattgtgccactgtactccatcctgggcgacagagacagactccgtcaaaaaaaaaaaaaaaagactgtgacaatttgaaaacaccttgccagtttcattataagcaggaagttcagtggagggcaacaactaaaaaacacaccaatttcagattttcaaaagtgtttaggaggattatataattatttgatcagaaaagaactgggtggatagtctgtg

SEQ ID NO: 327065 - DNA, 737 bp, Homo sapiens
aaaaacatgtgagctccttgagggtaatccctctctccctggtagccctagtactgccttcaggcagatatccacaaaagcaccttgcacagaaacatctttgagctattttaagaggcagcattattttactgacaaatgttcagaattgagctctctgacttgcccccagcccaacctctatggattgaccattctcctcagagagactgtgtatgcctgtgcaggcacacatgttgaggggaagacaggaagacctaccctcccccaggccctggcttctcttcagacagtgccattcacactgagcctcacaggcaagtactgcctggtgtaacttggggagtgatggggcctgctgaccagaatcactcctccaaaagcttcacacacaagcctgagtttccagtcatcaccagcagcaccttcagtctttgagagccttcttaatgaacacacatatttacctggatcaagacctgtgttatctggcaaggttgcccatttaaaatgagtgactggaaagttcgttatctggtcaaccctctactgcccccctattgtcacccctttgggattagaatcctgaaagaatgatgagaagaaaggctacatatggagagacctgagaaaccccgaatctttcttgagaggaggaaatcagacacctgcacagtccagcagcctgatcccaggagccagggagcagggagcagaggagagttccagggaccaga

SEQ ID NO: 327066 - DNA, 584 bp, Homo sapiens
cctaaggaaaaaccttagaggtcttctcggcgagtgggttccccaagcgtactttgacctcagagcctttagctccactgaaatcaaatgcagaatcctcgtatgggacacagagagaaaaacagagctgcagtgtttgaaaggactgtcccccacccccgccacttctgccctgcctccctctcctctgctgcgccgctgcggggctcggtcgaatcccccaggggtgctcagagcccttatctgaccctggccctcgtctgccacagaaaccttcacaatccagcttttgctcacacatctgtttctagaagctacggttgctgaaaacaatctttcctttgccaggagaaaagactttctgtaacttcccccgttcctcctagaactgtcttttgcctttctcagacggccacacacacttgaagctttcatgcttccactggtccttgcttctctgaactgcgtgttccaccctctcttccgagagagttcacacaggtcacacgacatcacctccggtcccaactgccctggtcactgtccccagatgcgcttagtccacagagtcccctgctgaagcc

SEQ ID NO: 327067 - DNA, 1739 bp, Homo sapiens
ccgcggtcccacggcgcctggttgcccccagccccctccctcctcccaccttcactgtgtcccacccttcctagctttgtgcccggggtgctgagcccttccccgtcagccgggccgcgggaggagggagccgtcaccgaggagctgccgctcgctgccccgggcaggggcacaggcttcatccagtgaatactagagggatcgaacagttgcaaccaaggcaatgtcttactacctcagctcagaaaaccacctggacccagggcccatctacatgcgagaaaatgggcagctgcacatggtcaatctggctctggatggtgtcaggagtagcctgcagaagccaaggcctttcagactgttccccaaaggcttttctgtggagctttgcatgaacagggaagacgacactgcacggaaagagaagactgatcatttcatcttcacatacacccgagaggggaatcttcggtactccgccaaatccctcttcagccttgtcctgggtttcatctccgacaatgtggatcacattgattcccttattggctttcctgagcagattgctgaaaagctgttctctgctgctgaagccagacagaaattcactgagccaggtgcagggctgagggctttacagaaattcactgaggcctatggaagtttggtgctttgctccctgtgtttgcgaaacaggtatctcgtgatttcagaaaagcttgaggagattaagtctttccgggagctgacctgcctggatctttcctgttgcaagcttggagatgagcatgaacttctagaacatctcaccaatgaagccctgtctagtgtaactcagctccacctgaaggataattgtttatctgatgctggggtgcggaagatgacagcaccagttcgagtgatgaaaagaggccttgagaatctaacattattagacttatcatgtaaccctgagatcacagatgcaggcattggatacctcttttcttttaggaaactaaactgcttagatatctctgggacagggctcaaggacatcaaaaccgtcaagcacaagctccagacccacataggccttgttcactccaaagtgcctttgaaggaatttgatcatagtaactgcaagacagagggctgggctgaccagatcgttctgcagtgggagcgtgtgactgcggaagctgtgaagccacgggagacctcggagcctagagcagcagctcagcgcttctatgggaagcggtctcgagcagaagccccactgaagtgtcccctggcagacacccacatgaactcttccgagaaactccagttctataaagagaaagccccagattgccatgggccagtgttgaaacacgaagctatctcaagccaggagtcaaagaagagcaagaagagaccttttgaggagtcagagacagaacagaataactcttcacaaccttcaaagcagaaatatgtatgtcttgctgtggaagactgggacttgttaaattcctattgattagtagatacaagttgacctttctctggcccccagctctagtgtttgagtaaaggagactgaggatgatttactttttgtttgaatttacctatggcattagcatagtaagcagatatttctacttttgtggtgtgggaggggaatgctatggaagtatgtaataatttctaatgtatattttcaatacatagtaattttttcaaataaacatttttgctgtccttaa

SEQ ID NO: 327068 - DNA, 1825 bp, Homo sapiens
ccgcggtcccacggcgcctggttgcccccagccccctccctcctcccaccttcactgtgtcccacccttcctagctttgtgcccggggtgctgagcccttccccgtcagccgggccgcgggaggagggagccgtcaccgaggagctgccgctcgctgccccgggcaggggcacaggttgatgtcatatttttagtcttgagaaacagcatcatgccaaggaaagagcttgagctttggagtaatgcggccctgagattgaattctggctctgccacttattagctctgttctagattgcaaccaaggcaatgtcttactacctcagctcagaaaaccacctggacccagggcccatctacatgcgagaaaatgggcagctgcacatggtcaatctggctctggatggtgtcaggagtagcctgcagaagccaaggcctttcagactgttccccaaaggcttttctgtggagctttgcatgaacagggaagacgacactgcacggaaagagaagactgatcatttcatcttcacatacacccgagaggggaatcttcggtactccgccaaatccctcttcagccttgtcctgggtttcatctccgacaatgtggatcacattgattcccttattggctttcctgagcagattgctgaaaagctgttctctgctgctgaagccagacagaaattcactgagccaggtgcagggctgagggctttacagaaattcactgaggcctatggaagtttggtgctttgctccctgtgtttgcgaaacaggtatctcgtgatttcagaaaagcttgaggagattaagtctttccgggagctgacctgcctggatctttcctgttgcaagcttggagatgagcatgaacttctagaacatctcaccaatgaagccctgtctagtgtaactcagctccacctgaaggataattgtttatctgatgctggggtgcggaagatgacagcaccagttcgagtgatgaaaagaggccttgagaatctaacattattagacttatcatgtaaccctgagatcacagatgcaggcattggatacctcttttcttttaggaaactaaactgcttagatatctctgggacagggctcaaggacatcaaaaccgtcaagcacaagctccagacccacataggccttgttcactccaaagtgcctttgaaggaatttgatcatagtaactgcaagacagagggctgggctgaccagatcgttctgcagtgggagcgtgtgactgcggaagctgtgaagccacgggagacctcggagcctagagcagcagctcagcgcttctatgggaagcggtctcgagcagaagccccactgaagtgtcccctggcagacacccacatgaactcttccgagaaactccagttctataaagagaaagccccagattgccatgggccagtgttgaaacacgaagctatctcaagccaggagtcaaagaagagcaagaagagaccttttgaggagtcagagacagaacagaataactcttcacaaccttcaaagcagaaatatgtatgtcttgctgtggaagactgggacttgttaaattcctattgattagtagatacaagttgacctttctctggcccccagctctagtgtttgagtaaaggagactgaggatgatttactttttgtttgaatttacctatggcattagcatagtaagcagatatttctacttttgtggtgtgggaggggaatgctatggaagtatgtaataatttctaatgtatattttcaatacatagtaattttttcaaataaacatttttgctgtccttaa

SEQ ID NO: 327069 - DNA, 1687 bp, Homo sapiens
ccgcggtcccacggcgcctggttgcccccagccccctccctcctcccaccttcactgtgtcccacccttcctagctttgtgcccggggtgctgagcccttccccgtcagccgggccgcgggaggagggagccgtcaccgaggagctgccgctcgctgccccgggcaggggcacaggcttcatccagtgaatactagagggatcgaacagttgcaaccaaggcaatgtcttactacctcagctcagaaaaccacctggacccagggcccatctacatgcgagaaaatgggcagctgcacatggtcaatctggctctggatggtgtcaggagtagcctgcagaagccaaggcctttcagactgttccccaaaggcttttctgtggagctttgcatgaacagggaagacgacactgcacggaaagagaagactgatcatttcatcttcacatacacccgagaggggaatcttcggtactccgccaaatccctcttcagccttgtcctgggtttcatctccgacaatgtggatcacattgattcccttattggctttcctgagcagattgctgaaaagctgttctctgctgctgaagccagacagaaattcactgagccaggtgcagggctgagggctttacagaaattcactgaggcctatggaagtttggtgctttgctccctgtgtttgcgaaacaggtatctcgtgatttcagaaaagcttgaggagattaagtctttccgggagctgacctgcctggatctttcctgttgcaagcttggagatgagcatgaacttctagaacatctcaccaatgaagccctgtctagtgtaactcagctccacctgaaggataattgtttatctgatgctggggtgcggaagatgacagcaccagttcgagtgatgaaaagaggccttgagaatctaacattattagacttatcatgtaaccctgagatcacagatgcaggcattggatacctcttttcttttaggaaactaaactgcttagatatctctgggacagggctcaaggacatcaaaaccgtcaagcacaagctccagacccacataggccttgttcactccaaagtgcctttgaaggaatttgatcatagtaactgcaagacagagggctgggctgaccagatcgttctgcagtgggagcgtgtgactgcggaagctgtgaagccacgggagacctcggagcctagagcagcagctcagcgcttctatgggaagcggtctcgagcagaagccccactgaagtgtcccctggcagacacccacatgaactcttccgagaaactccagttctataaagagaaagccccagattgccatgggccagtgttgaaacacgaagctatctcaagccaggagtcaaagaagagcaagaagagaccttttgaggagtcagagacagaacagaataactcttcacaaccttcaaagcagaaatatgtatgtcttgctgtggaagactgggacttctctagtgtttgagtaaaggagactgaggatgatttactttttgtttgaatttacctatggcattagcatagtaagcagatatttctacttttgtggtgtgggaggggaatgctatggaagtatgtaataatttctaatgtatattttcaatacatagtaattttttcaaataaacatttttgctgtccttaa

SEQ ID NO: 327070 - DNA, 1671 bp, Homo sapiens
ccgcggtcccacggcgcctggttgcccccagccccctccctcctcccaccttcactgtgtcccacccttcctagctttgtgcccggggtgctgagcccgtcaccgaggagctgccgctcgctgccccgggcaggggcacagttgcaaccaaggcaatgtcttactacctcagctcagaaaaccacctggacccagggcccatctacatgcgagaaaatgggcagctgcacatggtcaatctggctctggatggtgtcaggagtagcctgcagaagccaaggcctttcagactgttccccaaaggcttttctgtggagctttgcatgaacagggaagacgacactgcacggaaagagaagactgatcatttcatcttcacatacacccgagaggggaatcttcggtactccgccaaatccctcttcagccttgtcctgggtttcatctccgacaatgtggatcacattgattcccttattggctttcctgagcagattgctgaaaagctgttctctgctgctgaagccagacagaaattcactgagccaggtgcagggctgagggctttacagaaattcactgaggcctatggaagtttggtgctttgctccctgtgtttgcgaaacaggtatctcgtgatttcagaaaagcttgaggagattaagtctttccgggagctgacctgcctggatctttcctgttgcaagcttggagatgagcatgaacttctagaacatctcaccaatgaagccctgtctagtgtaactcagctccacctgaaggataattgtttatctgatgctggggtgcggaagatgacagcaccagttcgagtgatgaaaagaggccttgagaatctaacattattagacttatcatgtaaccctgagatcacagatgcaggcattggatacctcttttcttttaggaaactaaactgcttagatatctctgggacagggctcaaggacatcaaaaccgtcaagcacaagctccagacccacataggccttgttcactccaaagtgcctttgaaggaatttgatcatagtaactgcaagacagagggctgggctgaccagatcgttctgcagtgggagcgtgtgactgcggaagctgtgaagccacgggagacctcggagcctagagcagcagctcagcgcttctatgggaagcggtctcgagcagaagccccactgaagtgtcccctggcagacacccacatgaactcttccgagaaactccagttctataaagagaaagccccagattgccatgggccagtgttgaaacacgaagctatctcaagccaggagtcaaagaagagcaagaagagaccttttgaggagtcagagacagaacagaataactcttcacaaccttcaaagcagaaatatgtatgtcttgctgtggaagactgggacttgttaaattcctattgattagtagatacaagttgacctttctctggcccccagctctagtgtttgagtaaaggagactgaggatgatttactttttgtttgaatttacctatggcattagcatagtaagcagatatttctacttttgtggtgtgggaggggaatgctatggaagtatgtaataatttctaatgtatattttcaatacatagtaattttttcaaataaacatttttgctgtccttaa

SEQ ID NO: 327071 - DNA, 1705 bp, Homo sapiens
ccgcggtcccacggcgcctggttgcccccagccccctccctcctcccaccttcactgtgtcccacccttcctagctttgtgcccggggtgctgagcccttccccgtcagccgggccgcgggaggagggagccgtcaccgaggagctgccgctcgctgccccgggcaggggcacagttgcaaccaaggcaatgtcttactacctcagctcagaaaaccacctggacccagggcccatctacatgcgagaaaatgggcagctgcacatggtcaatctggctctggatggtgtcaggagtagcctgcagaagccaaggcctttcagactgttccccaaaggcttttctgtggagctttgcatgaacagggaagacgacactgcacggaaagagaagactgatcatttcatcttcacatacacccgagaggggaatcttcggtactccgccaaatccctcttcagccttgtcctgggtttcatctccgacaatgtggatcacattgattcccttattggctttcctgagcagattgctgaaaagctgttctctgctgctgaagccagacagaaattcactgagccaggtgcagggctgagggctttacagaaattcactgaggcctatggaagtttggtgctttgctccctgtgtttgcgaaacaggtatctcgtgatttcagaaaagcttgaggagattaagtctttccgggagctgacctgcctggatctttcctgttgcaagcttggagatgagcatgaacttctagaacatctcaccaatgaagccctgtctagtgtaactcagctccacctgaaggataattgtttatctgatgctggggtgcggaagatgacagcaccagttcgagtgatgaaaagaggccttgagaatctaacattattagacttatcatgtaaccctgagatcacagatgcaggcattggatacctcttttcttttaggaaactaaactgcttagatatctctgggacagggctcaaggacatcaaaaccgtcaagcacaagctccagacccacataggccttgttcactccaaagtgcctttgaaggaatttgatcatagtaactgcaagacagagggctgggctgaccagatcgttctgcagtgggagcgtgtgactgcggaagctgtgaagccacgggagacctcggagcctagagcagcagctcagcgcttctatgggaagcggtctcgagcagaagccccactgaagtgtcccctggcagacacccacatgaactcttccgagaaactccagttctataaagagaaagccccagattgccatgggccagtgttgaaacacgaagctatctcaagccaggagtcaaagaagagcaagaagagaccttttgaggagtcagagacagaacagaataactcttcacaaccttcaaagcagaaatatgtatgtcttgctgtggaagactgggacttgttaaattcctattgattagtagatacaagttgacctttctctggcccccagctctagtgtttgagtaaaggagactgaggatgatttactttttgtttgaatttacctatggcattagcatagtaagcagatatttctacttttgtggtgtgggaggggaatgctatggaagtatgtaataatttctaatgtatattttcaatacatagtaattttttcaaataaacatttttgctgtccttaa

SEQ ID NO: 327072 - DNA, 1681 bp, Homo sapiens
ccgcggtcccacggcgcctggttgcccccagccccctccctcctcccaccttcactgtgtcccacccttcctagctttgtgcccggggtgctgagcccttccccgtcagccgggccgcgggaggagggagccgtcaccgaggagctgccgctcgctgccccgggcaggggcacaggcttcatccagtgaatactagagggatcgaacagttgcaaccaaggcaatgtcttactacctcagctcagaaaaccacctggacccagggcccatctacatgcgagaaaatgggcagctgcacatggtcaatctggctctggatggtgtcaggagtagcctgcagaagccaaggcctttcagactgttccccaaaggcttttctgtggagctttgcatgaacagggaagacgacactgcacggaaagagaagactgatcatttcatcttcacatacacccgagaggggaatcttcggtactccgccaaatccctcttcagccttgtcctgggtttcatctccgacaatgtggatcacattgattcccttattggctttcctgagcagattgctgaaaagctgttctctgctgctgaagccagacagaaattcactgagccaggtgcagggctgagggctttacagaaattcactgaggcctatggaagtttggtgctttgctccctgtgtttgcgaaacaggtatctcgtgatttcagaaaagcttgaggagattaagtctttccgggagctgacctgcctggatctttcctgttgcaagcttggagatgagcatgaacttctagaacatctcaccaatgaagccctgtctagtgtaactcagctccacctgaaggataattgtttatctgatgctggggtgcggaagatgacagcaccagttcgagtgatgaaaagaggccttgagaatctaacattattagacttatcatgtaaccctgagatcacagatgcaggcattggatacctcttttcttttaggaaactaaactgcttagatatctctgggacagggctcaagtgcctttgaaggaatttgatcatagtaactgcaagacagagggctgggctgaccagatcgttctgcagtgggagcgtgtgactgcggaagctgtgaagccacgggagacctcggagcctagagcagcagctcagcgcttctatgggaagcggtctcgagcagaagccccactgaagtgtcccctggcagacacccacatgaactcttccgagaaactccagttctataaagagaaagccccagattgccatgggccagtgttgaaacacgaagctatctcaagccaggagtcaaagaagagcaagaagagaccttttgaggagtcagagacagaacagaataactcttcacaaccttcaaagcagaaatatgtatgtcttgctgtggaagactgggacttgttaaattcctattgattagtagatacaagttgacctttctctggcccccagctctagtgtttgagtaaaggagactgaggatgatttactttttgtttgaatttacctatggcattagcatagtaagcagatatttctacttttgtggtgtgggaggggaatgctatggaagtatgtaataatttctaatgtatattttcaatacatagtaattttttcaaataaacatttttgctgtccttaa

SEQ ID NO: 327073 - DNA, 1988 bp, Homo sapiens
gaacatcccgtctccagaggtcaagagattattagcccaaagtgtagctacttgcagatagagcaggggcttttgtcctctgcttcccaactcttgccctatctttctattgtaccactccaaatatttcttatcacaatgttgctgttagtagtaacactagtaaatctgagtatttataagctcataaagcttgttacagccttaagcaaaaagcttggggccaagggcgttttaaaaaatgcacactttatgaggtgcaactgcggagaaatgaggacgcgttcttaagctttggtattcacatggtggtggtgctggtagaggctgttacatttcttccagtgaagctgttcttgcagccgccttggaattcacttcagggccagtttatgagccaccccaagtaatctgcttggagtctgagcatcataccttgtatttgaccaaaaatggtattcctgagctcagtgccacctgattcactgcacttggaaccagatgatgttgggctctttccagaagtcaaatccttcctgggaggatgaagatctgccagctctgaggattctggctgggaagaaaaagagcctcaagctttgaaggccattcccatggtagacagagctgatgtgaaaagtggccatcctgttgccccaggcacatgaccttctgaagtgaccaggctgaaagggaagcaatactcgtgtaggatctctcaccccgtcactcagggtggcgcaatcacgactcattggctcactgcagcctagacctcccagctggagcaattctcctgcctcagccttctgagtagctgggactacagttggttctaaagagtggtgagtcagaagagacgtcaggcagcaagcgacttgggccatggcctctgacctagacttctcacctccggaggtgcccgagcccactttcctggagaacctgctacggtacggactcttcctgggagccatcttccagctcatctgtgtgctggccatcatcgtacccattcccaagtcccacgaggcggaggctgaaccgtctgagcccagaagtgctgaggtgacgaggaagcccaaggctgctgttccttctgtgaacaagaggcccaagaaagagactaagaagaagcggtagaagaggaggcctgaggagctgggcgggcagggagagggtcttggggacagccctcctgggaatctacattgtgttcccccgcattccaggctcagggtctgaggaggctgtgacgccctatgaccgcagagatctagacagtcgtaacagtccccaggctccagctgggcaatccaccacttcctcttccttctgcttctgtgacggtttagagtcaagggggctgaaacacactgtgagcatagactgtattaggtttgttcagaagccgggtcagctcacagaatcacattttcttgcttagtcatgtgtccctccttgagttgccccctccttgtgggtttacactacattttggagtcattgtctaatgctgacaagcacaccctctcccattatttgtgcactacagatctcctgctgatcagtcacctttgttgctgctgtgtagacagagccaggcctcacctgtttgtttaggccaagatgccatggacatgcagcgttagtgatcccactagctgtgacagccaggcccagaaaatgcctggcgtgagagccagcagacagccaggccggggtaggcagtgcctgcttctgctccatcaggtgcaggggatttggctgaaggcgtgcatatttcctgggcacaaacttcctgagcctctgaaatgggaggctcgtcaatttcagaccaacctcttttcaacccatcatagcacgttcaaggtgtgccttttacttctacctgtacatcccccatcccttcaattctttcattccctgaccagtgagagggttcctgggggaagtatggtgaataaactgacatgcatgcttcagaa

SEQ ID NO: 327074 - DNA, 1334 bp, Homo sapiens
ccccgactagcccgacagggaactacttccgggggagcggcgcggcggcgcgggagaggatctctcaccccgtcactcagggtggcgcaatcacgactcattggctcactgcagcctagacctcccagctggagcaattctcctgcctcagccttctgagtagctgggactacagttggttctaaagagtggtgagtcagaagagacgtcaggcagcaagcgacttgggccatggcctctgacctagacttctcacctccggaggtgcccgagcccactttcctggagaacctgctacggtacggactcttcctgggagccatcttccagctcatctgtgtgctggccatcatcgtacccattcccaagtcccacgaggcggaggctgaaccgtctgagcccagaagtgctgaggtgacgaggaagcccaaggctgctgttccttctgtgaacaagaggcccaagaaagagactaagaagaagcggtagaagaggaggcctgaggagctgggcgggcagggagagggtcttggggacagccctcctgggaatctacattgtgttcccccgcattccaggctcagggtctgaggaggctgtgacgccctatgaccgcagagatctagacagtcgtaacagtccccaggctccagctgggcaatccaccacttcctcttccttctgcttctgtgacggtttagagtcaagggggctgaaacacactgtgagcatagactgtattaggtttgttcagaagccgggtcagctcacagaatcacattttcttgcttagtcatgtgtccctccttgagttgccccctccttgtgggtttacactacattttggagtcattgtctaatgctgacaagcacaccctctcccattatttgtgcactacagatctcctgctgatcagtcacctttgttgctgctgtgtagacagagccaggcctcacctgtttgtttaggccaagatgccatggacatgcagcgttagtgatcccactagctgtgacagccaggcccagaaaatgcctggcgtgagagccagcagacagccaggccggggtaggcagtgcctgcttctgctccatcaggtgcaggggatttggctgaaggcgtgcatatttcctgggcacaaacttcctgagcctctgaaatgggaggctcgtcaatttcagaccaacctcttttcaacccatcatagcacgttcaaggtgtgccttttacttctacctgtacatcccccatcccttcaattctttcattccctgaccagtgagagggttcctgggggaagtatggtgaataaactgacatgcatgcttcagaa

SEQ ID NO: 327075 - DNA, 1340 bp, Homo sapiens
ccttccctccagccctgggtaacctcaattctactttctgtctctgaattggcctattccagaggatctctcaccccgtcactcagggtggcgcaatcacgactcattggctcactgcagcctagacctcccagctggagcaattctcctgcctcagccttctgagtagctgggactacagttggttctaaagagtggtgagtcagaagagacgtcaggcagcaagcgacttgggccatggcctctgacctagacttctcacctccggaggtgcccgagcccactttcctggagaacctgctacggtacggactcttcctgggagccatcttccagctcatctgtgtgctggccatcatcgtacccattcccaagtcccacgaggcggaggctgaaccgtctgagcccagaagtgctgaggtgacgaggaagcccaaggctgctgttccttctgtgaacaagaggcccaagaaagagactaagaagaagcggtagaagaggaggcctgaggagctgggcgggcagggagagggtcttggggacagccctcctgggaatctacattgtgttcccccgcattccaggctcagggtctgaggaggctgtgacgccctatgaccgcagagatctagacagtcgtaacagtccccaggctccagctgggcaatccaccacttcctcttccttctgcttctgtgacggtttagagtcaagggggctgaaacacactgtgagcatagactgtattaggtttgttcagaagccgggtcagctcacagaatcacattttcttgcttagtcatgtgtccctccttgagttgccccctccttgtgggtttacactacattttggagtcattgtctaatgctgacaagcacaccctctcccattatttgtgcactacagatctcctgctgatcagtcacctttgttgctgctgtgtagacagagccaggcctcacctgtttgtttaggccaagatgccatggacatgcagcgttagtgatcccactagctgtgacagccaggcccagaaaatgcctggcgtgagagccagcagacagccaggccggggtaggcagtgcctgcttctgctccatcaggtgcaggggatttggctgaaggcgtgcatatttcctgggcacaaacttcctgagcctctgaaatgggaggctcgtcaatttcagaccaacctcttttcaacccatcatagcacgttcaaggtgtgccttttacttctacctgtacatcccccatcccttcaattctttcattccctgaccagtgagagggttcctgggggaagtatggtgaataaactgacatgcatgcttcagaa

SEQ ID NO: 327076 - DNA, 1188 bp, Homo sapiens
  misc_feature (9)..(9): n is a, c, g, or t
cccacgcgntcggcgcggcggcgcgggagttggttctaaagagtggtgagtcagaagagacgtcaggcagcaagcgacttgggccatggcctctgacctagacttctcacctccggaggtgcccgagcccactttcctggagaacctgctacggtacggactcttcctgggagccatcttccagctcatctgtgtgctggccatcatcgtacccattcccaagtcccacgaggcggaggctgaaccgtctgagcccagaagtgctgaggtgacgaggaagcccaaggctgctgttccttctgtgaacaagaggcccaagaaagagactaagaagaagcggtagaagaggaggcctgaggagctgggcgggcagggagagggtcttggggacagccctcctgggaatctacattgtgttcccccgcattccaggctcagggtctgaggaggctgtgacgccctatgaccgcagagatctagacagtcgtaacagtccccaggctccagctgggcaatccaccacttcctcttccttctgcttctgtgacggtttagagtcaagggggctgaaacacactgtgagcatagactgtattaggtttgttcagaagccgggtcagctcacagaatcacattttcttgcttagtcatgtgtccctccttgagttgccccctccttgtgggtttacactacattttggagtcattgtctaatgctgacaagcacaccctctcccattatttgtgcactacagatctcctgctgatcagtcacctttgttgctgctgtgtagacagagccaggcctcacctgtttgtttaggccaagatgccatggacatgcagcgttagtgatcccactagctgtgacagccaggcccagaaaatgcctggcgtgagagccagcagacagccaggccggggtaggcagtgcctgcttctgctccatcaggtgcaggggatttggctgaaggcgtgcatatttcctgggcacaaacttcctgagcctctgaaatgggaggctcgtcaatttcagaccaacctcttttcaacccatcatagcacgttcaaggtgtgccttttacttctacctgtacatcccccatcccttcaattctttcattccctgaccagtgagagggttcctgggggaagtatggtgaataaactgacatgcatgcttcagaa

SEQ ID NO: 327077 - DNA, 1259 bp, Homo sapiens
ccccgactagcccgacagggaactacttccgggggagcggcgcggcggcgcgggagttggttctaaagagtggtgagtcagaagagacgtcaggcagcaagcgacttgggccatggcctctgacctagacttctcacctccggaggtgcccgagcccactttcctggagaacctgctacggtacggactcttcctgggagccatcttccagctcatctgtgtgctggccatcatcgtacccattcccaagtcccacgaggcggagttccatgtagaggcctgattccattccagtcaggttattgggaggctgaaccgtctgagcccagaagtgctgaggtgacgaggaagcccaaggctgctgttccttctgtgaacaagaggcccaagaaagagactaagaagaagcggtagaagaggaggcctgaggagctgggcgggcagggagagggtcttggggacagccctcctgggaatctacattgtgttcccccgcattccaggctcagggtctgaggaggctgtgacgccctatgaccgcagagatctagacagtcgtaacagtccccaggctccagctgggcaatccaccacttcctcttccttctgcttctgtgacggtttagagtcaagggggctgaaacacactgtgagcatagactgtattaggtttgttcagaagccgggtcagctcacagaatcacattttcttgcttagtcatgtgtccctccttgagttgccccctccttgtgggtttacactacattttggagtcattgtctaatgctgacaagcacaccctctcccattatttgtgcactacagatctcctgctgatcagtcacctttgttgctgctgtgtagacagagccaggcctcacctgtttgtttaggccaagatgccatggacatgcagcgttagtgatcccactagctgtgacagccaggcccagaaaatgcctggcgtgagagccagcagacagccaggccggggtaggcagtgcctgcttctgctccatcaggtgcaggggatttggctgaaggcgtgcatatttcctgggcacaaacttcctgagcctctgaaatgggaggctcgtcaatttcagaccaacctcttttcaacccatcatagcacgttcaaggtgtgccttttacttctacctgtacatcccccatcccttcaattctttcattccctgaccagtgagagggttcctgggggaagtatggtgaataaactgacatgcatgcttcagaa

SEQ ID NO: 327078 - DNA, 1339 bp, Homo sapiens
  misc_feature (1280)..(1280): n is a, c, g, or t
ccccgactagcccgacagggaactacttccgggggagcggcgcggcggcgcgggagaggatctctcaccccgtcactcagggtggcgcaatcacgactcattggctcactgcagcctagacctcccagctggagcaattctcctgcctcagccttctgagtagctgggactacagttggttctaaagagtggtgagtcagaagagacgtcaggcagcaagcgacttgggccatggcctctgacctagacttctcacctccggaggtgcccgagcccactttcctggagaacctgctacggtacggactcttcctgggagccatcttccagctcatctgtgtgctggccatcatcgtacccattcccaagtcccacgaggcggaggctgaaccgtctgagcccagaagtgctgaggtgacgaggaagcccaaggctgctgttccttctgtgaacaagaggcccaagaaagagactaagaagaagcggtagaagaggaggcctgaggagctgggcgggcagggagagggtcttggggacagccctcctgggaatctacattgtgttcccccgcattccaggctcagggtctgaggaggctgtgacgccctatgaccgcagagatctagacagtcgtaacagtccccaggctccagctgggcaatccaccacttcctcttccttctgcttctgtgacggtttagagtcaagggggctgaaacacactgtgagcatagactgtattaggtttgttcagaagccgggtcagctcacagaatcacattttcttgcttagtcatgtgtccctccttgagttgccccctccttgtgggtttacactacattttggagtcattgtctaatgctgacaagcacaccctctcccattatttgtgcactacagatctcctgctgatcagtcacctttgttgctgctgtgtagacagagccaggcctcacctgtttgtttaggccaagatgccatggacatgcagcgttagtgatcccactagctgtgacagccaggcccagaaaatgcctggcgtgagagccagcagacagccaggccggggtaggcagtgcctgcttctgctccatcaggtgcaggggatttggctgaaggcgtgcatatttcctgggcacaaacttcctgagcctctgaaatgggaggctcgtcaatttcagaccaacctcttttcaacccatcatagcacgttcaaggtgtgccttttacttctacctgtacatcccccatcccttcaattctttcattccctgaccgntgtaggaaggagtttgccattaagccggcgaaggtaattgtgtgaataatctaacgcct

SEQ ID NO: 327079 - DNA, 1145 bp, Homo sapiens
ccccgactagcccgacagggaactacttccgggggagcggcgcggcggcgcgggagaggatctctcaccccgtcactcagggtggcgcaatcacgactcattggctcactgcagcctagacctcccagctggagcaattctcctgcctcagccttctgagtagctgggactacagttggttctaaagagtggtgagtcagaagagacgtcaggcagcaagcgacttgggccatggcctctgacctagacttctcacctccggaggtgcccgagcccactttcctggagaacctgctacggtacggactcttcctgggagccatcttccagctcatctgtgtgctggccatcatcgtacccattcccaagtcccacgaggcggaggctgaaccgtctgagcccagaagtgctgaggtgacgaggaagcccaaggctgctgttccttctgtgaacaagaggcccaagaaagagactaagaagaagcggtagaagaggaggcctgaggagctgggcgggcagggagagggtcttggggacagccctcctgggaatctacattgtgttcccccgcattccaggctcagggtctgaggaggctgtgacgccctatgaccgcagagatctagacagtcgtaacagtccccaggctccagctgggcaatccaccacttcctcttccttctgcttctgtgacggtttagagtcaagggggctgaaacacactgtgagcatagactgtattaggtttgttcagaagccgggtcagctcacagaatcacattttcttgcttagtcatgtgtccctccttgagttgccccctccttgtgggtttacactacattttggagtcattgtctaatgctgacaagcacaccctctcccattatttgtgcactacagatctcctgctgatcagtcacctttgttgctgctgtgtagacagagccaggcctcacctgtttgtttaggccaagatgccatggacatgcagcgttagtgatcccactagctggaagcggccagaaatgctgggtggagcagagaagcggcgggtagcgtgctgttctgtcatcgggcgggttggtcgagggtgttttctggccattctggcctgaggggtggattgaccctttaccttttgttg

SEQ ID NO: 327080 - DNA, 1024 bp, Homo sapiens
ccccgactagcccgacagggaactacttccgggggagcggcgcggcggcgcgggagaggatctctcaccccgtcactcagggtggcgcaatcacgactcattggctcactgcagcctagacctcccagctggagcaattctcctgcctcagccttctgagtagctgggactacagttggttctaaagagtggtgagtcagaagagacgtcaggcagcaagcgacttgggccatggcctctgacctagacttctcacctccggaggtgcccgagcccactttcctggagaacctgctacggtacggactcttcctgggagccatcttccagctcatctgtgtgctggccatcatcgtacccattcccaagtcccacgaggcggaggctgaaccgtctgagcccagaagtgctgaggtgacgaggaagcccaaggctgctgttccttctgtgaacaagaggcccaagaaagagactaagaagaagcggtagaagaggaggcctgaggagctgggcgggcagggagagggtcttggggacagccctcctgggaatctacattgtgttcccccgcattccaggctcagggtctgaggaggctgtgacgccctatgaccgcagagatctagacagtcgtaacagtccccaggctccagctgggcaatccaccacttcctcttccttctgcttctgtgacggtttagagtcaagggggctgaaacacactgtgagcatagactgtattaggtttgttcagaagccgggtcagctcacagaatcacattttcttgcttagtcatgtgtcctctgagtgccctcctggggttacctacttcgggtccttgctatgtgcaaagacactctccattttgggctacggatccgcggcaggccttgtgcggtggtaaagcacgccctgtgttggcacagccggcaccgggccaacgacacgcacaactgcggacacacggcggcgctcgcacggaggggggtgacccgggggatacagggctctcgggggtcgtag

SEQ ID NO: 327081 - DNA, 1389 bp, Homo sapiens
gaacatcccgtctccagaggtcaagagattattagcccaaagtgtagctacttgcagatagagcaggggcttttgtcctctgcttcccaactcttgccctatctttctattgtaccactccaaatatttcttatcacaatgttgctgttagtagtaacactagtaaatctgagtatttataagctcataaagcttgttacagccttaagcaaaaagcttggggccaagggcgttttaaaaaatgcacactttatgaggtgcaactgcggagaaatgaggacgcgttcttaagctttggtattcacatggtggtggtgctggtagaggctgttacatttcttccagtgaagctgttcttgcagccgccttggaattcacttcagggccagtttatgagccaccccaagtaatctgcttggagtctgagcatcataccttgtatttgaccaaaaatggtattcctgagctcagtgccacctgattcactgcacttggaaccagatgatgttgggctctttccagaagtcaaatccttcctgggaggatgaagatctgccagctctgaggattctggctgggaagaaaaagagcctcaagctttgaaggccattcccatggtagacagagctgatgtgaaaagtggccatcctgttgccccaggcacatgaccttctgaagtgaccaggctgaaagggaagcaatactcgtgtaggatctctcaccccgtcactcagggtggcgcaatcacgactcattggctcactgcagcctagacctcccagctggagcaattctcctgcctcagccttctgagtagctgggactacagttggttctaaagagtggtgagtcagaagagacgtcaggcagcaagcgacttgggccatggcctctgacctagacttctcacctccggaggtgcccgagcccactttcctggagaacctgctacggtacggactcttcctgggagccatcttccagctcatctgtgtgctggccatcatcgtacccattcccaagtcccacgaggcggagttccatgtagaggcctgattccattccagtcaggttattgggtacgaatacctcagagctggtgctatgtactccctactgtgtggcatcaacaagcaggtggtgtctggctgctgcacatttagagattcttggattgatcggtgggtttaggtggtatcagctgatccctccattataaaaatccggtcagtctttcacctaagcggttttagcatccattgatggtcgttgcttagatccattatttccttctgcatctgttagctggaattctttaacaaagaccttttccttatcacttgtatgattactctgaattgctcttcataatgaaaagcaggaaaaatg

SEQ ID NO: 327082 - DNA, 1466 bp, Homo sapiens
ccccgactagcccgacagggaactacttccgggggagcggcgcggcggcgcgggagaggatctctcaccccgtcactcagggtggcgcaatcacgactcattggctcactgcagcctagacctcccagctggagcaattctcctgcctcagccttctgagtagctgggactacagttggttctaaagagtggtgagtcagaagagacgtcaggcagcaagcgacttgggccatggcctctgacctagacttctcacctccggaggtgcccgagcccactttcctggagaacctgctacggtacggactcttcctgggagccatcttccagctcatctgtgtgctggccatcatcgtacccattcccaagtcccacgaggcggaggctgaaccgtctgagcccagaagtgctgaggtgacgaggaagcccaaggctgctgttccttctgtgaacaagaggcccaagaaagagactaagaagaagcggtagaagaggaggcctgaggagctgggcgggcagggagagggtcttggggacagccctcctgggaatctacattgtgttcccccgcattccaggctcagggtctgaggaggctgtgacgccctatgaccgcagagatctagacagtcgtaacagtccccaggctccagctgggcaatccaccacttcctcttccttctgcttctgtgacggtttagagtcaagggggctgaaacacactgtgagcatagactgtattaggtttgttcagaagccgggtcagctcacagaatcacattttcttgcttagtcatgtgtccctccttgagttgccccctccttgtgggtttacactacattttggagtcattgtctaatgctgacaagcacaccctctcccattatttgtgcactacagatctcctgctgatcagtcacctttgttgctgctgtgtagacagagccaggcctcacctgtttgtttaggccaagatgccatggacatgcagcgttagtgatcccactagctgtgacagccaggcccagaaaatgcctggcgtgagagccagcagacagccaggccggggtaggcagtgcctgcttctgctccatcaggtgcaggggatttggctgaaggcgtgcatatttcctgggcacaaacttcctgagcctctgaaatgggaggctcgtcaatttcagaccaacctcttttcaacccatcatagcacgttcaaggtgtgccttttacttctacctgtacatcccccatcccttcaattctttcattccctgaccagtgagagggttcctgggggaagtatggtgaataaactgacatgcatgcttcagaaaaaaagcaaatataaacaaacaatacacaaaaaaaaaaggggggccaaaaaaatcccggggggccaataggtgtcacactttctgtaaaggccctaagggggataagagagagcgggaaaagagcggggaag

SEQ ID NO: 327083 - DNA, 897 bp, Homo sapiens
ccccgactagcccgacagggaactacttccgggggagcggcgcggcggcgcgggagaggatctctcaccccgtcactcagggtggcgcaatcacgactcattggctcactgcagcctagacctcccagctggagcaattctcctgcctcagccttctgagtagctgggactacagttggttctaaagagtggtgagtcagaagagacgtcaggcagcaagcgacttgggccatggcctctgacctagacttctcacctccggaggtgcccgagcccactttcctggagaacctgctacggtacggactcttcctgggagccatcttccagctcatctgtgtgctggccatcatcgtacccattcccaagtcccacgaggcggaggctgaaccgtctgagcccagaagtgctgaggtgacgaggaagcccaaggctgctgttccttctgtgaacaagaggcccaagaaagagactaagaagaagcggtagaagaggaggcctgaggagctgggcgggcagggagagggtcttggggacagccctcctgggaatctacattgtgttcccccgcattccaggctcagggtctgaggaggctgtgacgccctatgaccgcagagatctagacagtcgtaacagtccccaggctccagctgggcaatccaccacttcctcttccttctgcttctgtgacggtttagagtcaagggggctgaaacacactgtgagcatagactgtattaggtttgttcagaagccgggtcagctcacagaatcacattttcttgcttagtcatgtgtccctccttgagttgccccctccttgtgggtgtcggtaatcgcgtggacgaagtctcttgcagaatcatgaatggacgataatagctggcatacaac

SEQ ID NO: 327084 - DNA, 1215 bp, Homo sapiens
ccccgactagcccgacagggaactacttccgggggagcggcgcggcggcgcgggagttggttctaaagagtggtgagtcagaagagacgtcaggcagcaagcgacttgggccatggcctctgacctagacttctcacctccggaggtgcccgagcccactttcctggagaacctgctacggtacggactcttcctgggagccatcttccagctcatctgtgtgctggccatcatcgtacccattcccaagtcccacgaggcggaggctgaaccgtctgagcccagaagtgctgaggtgacgaggaagcccaaggctgctgttccttctgtgaacaagaggcccaagaaagagactaagaagaagcggtagaagaggaggcctgaggagctgggcgggcagggagagggtcttggggacagccctcctgggaatctacattgtgttcccccgcattccaggctcagggtctgaggaggctgtgacgccctatgaccgcagagatctagacagtcgtaacagtccccaggctccagctgggcaatccaccacttcctcttccttctgcttctgtgacggtttagagtcaagggggctgaaacacactgtgagcatagactgtattaggtttgttcagaagccgggtcagctcacagaatcacattttcttgcttagtcatgtgtccctccttgagttgccccctccttgtgggtttacactacattttggagtcattgtctaatgctgacaagcacaccctctcccattatttgtgcactacagatctcctgctgatcagtcacctttgttgctgctgtgtagacagagccaggcctcacctgtttgtttaggccaagatgccatggacatgcagcgttagtgatcccactagctgtgacagccaggcccagaaaatgcctggcgtgagagccagcagacagccaggccggggtaggcagtgcctgcttctgctccatcaggtgcaggggatttggctgaaggcgtgcatatttcctgggcacaaacttcctgagcctctgaaatgggaggctcgtcaatttcagaccaacctcttttcaacccatcatagcacgttcaaggtgtgccttttacttctacctgtacatcccccatcccttcaattctttcattccctgaccagtgagagggttcctgggggaagtatggtgaataaactgacatgcatgcttcagaa

SEQ ID NO: 327085 - DNA, 468 bp, Homo sapiens
atttaacaaatggaaaggaatagaacactgatattttacagaattaaaccccttcattgtaagggctttgtttacatattaagtgtcaagtatttattcaggggatcttatttcattgtattttatctgttatctaggttgtccatttaccggttggacactgatactctgtcaaattcctttcaaaaatgactctttagtctgctgaaatttagcactagtactttagtgttctgatcctggaaaattcaaggtgaagctttatttgtggaccatctgatttaattattgaggattaaaaacctaaacctttgctcattctaaactcaagcttttaagcctcacagaatttacaggggtttgctttttgtttgtttgttttttcattttttactgtgcttattaaactcttggaattagttattaaagggagtaaattctcatcttgggaattttgaaaatctatgg

SEQ ID NO: 327086 - DNA, 307 bp, Homo sapiens
atttaacaaatggaaaggaatagaacactgatattttacagaattaaaccccttcattgtaagggctttgtttacatattaagtgtcaagtatttattcaggggatcttatttcattgtattttatctgttatctaggttgtccatttaccggttggacactgatactctgtcaaattcctttcaaaaatgactctttagtctgctgaaatttagcactagtactttagtgttctgatcctggaaaattcaaggtgaagggtggtatagggtgggatagggtggtatggtggtatggtggtatcagg

SEQ ID NO: 327087 - DNA, 1163 bp, Homo sapiens
aagactcaagtctggggacctcctggtcactcaggcagcagccccttctttcttgccccagtctccagttctccagtgttcacaggtgagcctaccaacagccactgctcatgatggaggccatcaagaaaaagatgcagatgctgaagttagacaaggagaatgctctggatcgggcagagcaagctgaagctgagcagaagcaggcagaagaaagaagtaaacagctggaggatgagctggcagccatgcagaagaagctgaaagggacagaggatgagctggacaagtattctgaagctttgaaggatgcccaggagaagctggaactggcagagaagaaggctgctgatgctgaggctgaggtggcctccttgaaccgtaggatccagctggttgaagaagagctggaccgtgctcaggagcgcctggccactgccctgcaaaagctggaagaagctgaaaaagctgctgatgagagtgagagaggtatgaaggttattgaaaaccgggccttaaaagatgaagaaaagatggaactccaggaaatccaactcaaagaagctaagcacattgcagaagaggcagataggaagtatgaagaggtggctcgtaagttggtgatcattgaaggagacttggaacgcacagaggaacgagctgagctggcagagtctaagtgttctgagctggaggaggagctgaagaatgtcaccaacaacctcaagtctcttgaggctcaggcggagaagtactctcaaaaagaagataaatatgaggaagaaatcaagattcttactgataaactcaaggaggcagagacccgtgctgagtttgctgagagatcggtagccaagctggaaaagacaattgatgacctggaagatgagctctatgcccagaaactgaagtacaaggccattagcgaggagctggaccacgccctcaatgacatgacctctatataattatcaccgtttctgctctgttctggatctgccccctttactcctcggggaacccaaggccccactctcgctctggattccatttgggtcagcctggctggtccccaaggcattaggatgggggagcaaaaagcaacttatgtattttcttccacccccaccccaaattaaaatgttaagctgctggaaacctca

SEQ ID NO: 327088 - DNA, 643 bp, Homo sapiens
aagactcaagtctggggacctcctggtcactcaggcagcagccccttctttcttgccccagtctccagttctccagtgttcacaggtgagcctaccaacagccactgctcatgatggaggccatcaagaaaaagatgcagatgctgaagttagacaaggagaatgctctggatcgggcagagcaagctgaagctgagcagaagcaggcagaagaaagaagtaaacagactgcctttgtgaccttgggaaagtcagtgagccacagtatgtctgctgaatttaagtagaaatggaccatgttttggaagaacccttgacttctagaggaaaagctggaggatgagctggcagccatgcagaagaagctgaaagggacagaggatgagctggacaagtattctgaagctttgaaggatgcccaggagaagctggaactggcagagaagaaggctgctgatctttcccaagtcagaaagtaccctcagagatatgcataagaacaagaaacaggagagggaaggttgtggccaggagcaagcaagaagaaaggtttctttcctcaaagctagagtcagcaaactaccacctgtgggttaaatcttgcaacagcctggttttgtaaataaagttttatcggaacaca

SEQ ID NO: 327089 - DNA, 466 bp, Homo sapiens
  misc_feature (83)..(83): n is a, c, g, or t
tgtgaagaggctggagcaagggatataccttggggaaggggattgggtccagatgaaaagggctttgagtgtggggcagcagnaggaggacgtcctccttgctgctcctccctctgacccagactccgcctgaggccagcctgcgggaagctgacctttaactgagggctgatctttaactggaaggctgctttctcctttcaccaccccctccttccctgtgtctttttcgccaaactgtctctgcctcttcccggagaatccagctgggctagaggctgagcacctttggaaacaacatttaagggaatgtgagcacaatgcataatgtctttaaaaagcatgttgtgatgtacacattttgtaattaccttttttgttgttttgtagcaaccatttgtaaaacattccaaataattccacagtcctgaagcagcaatcgggaggaggacgggtccgagcaagc

SEQ ID NO: 327090 - DNA, 1353 bp, Homo sapiens
cacagcatcaaggatgtgcacgcccggctgcaagccctggagcaggaggagcaggaggtgagaggaggctgcaacgccgagcggaggaggcaggaaccggagcgcgagcagtagctgggtgggcaccatggctgggatcaccatgtccctgcatttcatgacattgggtggcagctccctgtcccccaccgagggcaaaggctctgggctccaaggccacatcatcgagaacccacaatacttcagtgatgcctgtgttcaccacatcaagcgccgggacatcgtgctcaagtgggagctgggggagggcgcctttgggaaggtcttccttgctgagtgccacaacctcctgcctgagcaggacaagatgctggtggctgtcaaggcactgaaggaggcgtccgagagtgctcggcaggacttccaacgtgaggctgagctgctcaccatgctgcagcaccagcacatcgtgcgcttcttcggcgtctgcaccgagggccgccccctgctcatggtcttcgagtatatgcggcacggggacctcaaccgcttcctccgatcccatggacccgatgccaagctgctggctggtggggaggatgtggctccaggccccctgggtctggggcagctgctggccgtggctagccaggtcgctgcggggatggtgtacctggcgggtctgcattttgtgcaccgggacctggccacacgcaactgtctagtgggccagggactggtggtcaagattggtgattttggcatgagcagggatatctacagcaccgactattaccgtgtgggaggccgcaccatgctgcccattcgctggatgccgcccgagagcatcctgtaccgtaagttcaccaccgagagcgacgtgtggagcttcggcgtggtgctctgggagatcttcacctacggcaagcagccctggtaccagctctccaacacggaggcaatcgactgcatcacgcagggacgtgagttggagcggccacgtgcctgcccaccagaggtctacgccatcatgcggggctgctggcagcgggagcccagcaacgccacagcatcaaggatgtgcacgcccggctgcaagccctggcctaggcacctcctgtctacctggatgtcctgggctagggggccggcccaggggctgggagtggttagccggaatactggggcctgccctcagcatcccccatagctcccagcagccccagggtgatctcgaagtatctaattcgccctcagcatgtgggaagggacaggtgggggctgggagtagaggatgttcctgcttctctaggcaaggtcccgtcgtagcaattatatttattatgggaattc

SEQ ID NO: 327091 - DNA, 607 bp, Homo sapiens
gttgagtgctgtctcatctcttcatggaatgctccattcttttccacttacttggcatctttcatctcttctttcctagttgcttcactgcctctccacagggtctccttcctttgggtgatttgggggactgtttgggttgggcatttgttcccacctccaccccaggtagcagttatgacttgttcctggtagtggatttctctcaagtgctttattagtattcaaacatttttgagcccaggaaggtctagctcctgacacgttctatggtagagggaggagggttgatgcttgctcaggttacttgggaacatctcttccccagtatgccttccaactctctctacatataggttcaattcacgtctatgtgtctctctccctttttttattctcttccttttcccttttcctctcctgtggtatttaaaatattcacaacctcaagtctcttgaggctcaggcggagaaggtaggggctggtttgtgaaagtgacaggctttggggcctgggcccagccctgcccttgatgaaagactggagacacgcattccatatataatccagtgaggcgtgtcctcttcctacctccttaccatgtat

SEQ ID NO: 327092 - DNA, 2142 bp, Homo sapiens
acccccacacacatacccaaacaacacaaattgcatgatgaggccgtgcgttatatggacgagggcacgccgagcggaggaggcaggaaccggagcgcgagcagtagctgggtgggcaccatggctgggatcaccaccatcgaggcggtgaagcgcaagatccaggttctgcagcagcaggcagatgatgcagaggagcgagctgagcgcctccagcgagaagttgagggagaaaggcgggcccgggaacaggctgaggctgaggtggcctccttgaaccgtaggatccagctggttgaagaagagctggaccgtgctcaggagcgcctggccactgccctgcaaaagctggaagaagctgaaaaagctgctgatgagagtgagagaggtatgaaggttattgaaaaccgggccttaaaagatgaagaaaagatggaactccaggaaatccaactcaaagaagctaagcacattgcagaagaggcagataggaagtatgaagaggtggctcgtaagttggtgatcattgaaggagacttggaacgcacagaggaacgagctgagctggcagagtcccgttgccgagagatggatgagcagattagactgatggaccagaacctgaagtgtctgagtgctgctgaagaaaagtactctcaaaaagaagataaatatgaggaagaaatcaagattcttactgataaactcaaggaggcagagacccgtgctgagtttgctgagagatcggtagccaagctggaaaagacaattgatgacctggaagataaactgaaatgcaccaaagaggagcacctctgtacacaaaggatgctggaccagaccctgcttgacctgaatgagatgtagaacgccccagtcccaccctgctgctgctcctccctctgacccagactccgcctgaggccagcctgcgggaagctgacctttaactgagggctgatctttaactggaaggctgctttctcctttcaccaccccctccttccctgtgtctttttcgccaaactgtctctgcctcttcccggagaatccagctgggctagaggctgagcacctttggaaacaacatttaagggaatgtgagcacaatgcataatgtctttaaaaagcatgttgtgatgtacacattttgtaattaccttttttgttgttttgtagcaaccatttgtaaaacattccaaataattccacagtcctgaagcagcaatcgaatccctttctcacttttggaaggtgacttttcaccttaatgcatattcccctctccatagaggagaggaaaaggtgtaggcctgccttaccgagagccaaacagagcccagggagactccgctgtgggaaacctcattgttctgtacaaagtactagctaaaccagaaaggtgattccaggaggagttagccaaacaacaacaaaaacaaaaaatgtgctgttcaagttttcagctttaagatatctttggataatgttatttctattttttatttttttcattagaagttaccaaattaagatggtaagacctctgagaccaaaattttgtcccatctctaccccctcacaactgcttacagaatggatcatgtcccccttatgttgaggtgaccacttaattgctttcctgcctccttgaaagaaagaaagaaagaagactgtgtttttgccactgatttagccatgtgaaactcatctcattacccttttctgggtttgaagctgctgtctctagaagtgccatctcaattgtgctttgtatcagtcagtgctggagaaatcttgaatagcttatgtacaaaactttttaaattttatattattttgaaactttgctttgggtttgtggcaccctggccaccccatctggctgtgacagcctctgcagtccgtgggctggcagtttgttgatcttttaagtttccttccctacccagtccccattttctggtaaggtttctaggaggtctgttaggtgtacatcctgcagcttattggcttaaaatgtactctccttttatgtggtctctttggggccgattgggagaaagagaaatcaatagtgcaactgttttgatactgaatattgacaagtgtctttttgaaataaagaaccagtccctccaa

SEQ ID NO: 327093 - DNA, 2320 bp, Homo sapiens
tccagacacaccaaatatcggcataagtacgaggctcggtgtttatatcggacgagggtgagaggaggctgcaacgccgagcggaggaggcaggaaccggagcgcgagcagtagctgggtgggcaccatggctgggatcaccaccatcgaggcggtgaagcgcaagatccaggttctgcagcagcaggcagatgatgcagaggagcgagctgagcgcctccagcgagaagttgagggagaaaggcgggcccgggaacaggctgaggctgaggtggcctccttgaaccgtaggatccagctggttgaagaagagctggaccgtgctcaggagcgcctggccactgccctgcaaaagctggaagaagctgaaaaagctgctgatgagagtgagagaggtatgaaggttattgaaaaccgggccttaaaagatgaagaaaagatggaactccaggaaatccaactcaaagaagctaagcacattgcagaagaggcagataggaagtatgaagaggtggctcgtaagttggtgatcattgaaggagacttggaacgcacagaggaacgagctgagctggcagagtcccgttgccgagagatggatgagcagattagactgatggaccagaacctgaagtgtctgagtgctgctgaagaaaagtactctcaaaaagaagataaatatgaggaagaaatcaagattcttactgataaactcaaggaggcagagacccgtgctgagtttgctgagagatcggtagccaagctggaaaagacaattgatgacctggaagataaactgaaatgcaccaaagaggagcacctctgtacacaaaggatgctggaccagaccctgcttgacctgaatgagatgtagaacgccccagtcccaccctgctgctgctcctccctctgacccagactccgcctgaggccagcctgcgggaagctgacctttaactgagggctgatctttaactggaaggctgctttctcctttcaccaccccctccttccctgtgtctttttcgccaaactgtctctgcctcttcccggagaatccagctgggctagaggctgagcacctttggaaacaacatttaagggaatgtgagcacaatgcataatgtctttaaaaagcatgttgtgatgtacacattttgtaattaccttttttgttgttttgtagcaaccatttgtaaaacattccaaataattccacagtcctgaagcagcaatcgaatccctttctcacttttggaaggtgacttttcaccttaatgcatattcccctctccatagaggagaggaaaaggtgtaggcctgccttaccgagagccaaacagagcccagggagactccgctgtgggaaacctcattgttctgtacaaagtactagctaaaccagaaaggtgattccaggaggagttagccaaacaacaacaaaaacaaaaaatgtgctgttcaagttttcagctttaagatatctttggataatgttatttctattttttatttttttcattagaagttaccaaattaagatggtaagacctctgagaccaaaattttgtcccatctctaccccctcacaactgcttacagaatggatcatgtcccccttatgttgaggtgaccacttaattgctttcctgcctccttgaaagaaagaaagaaagaagactgtgtttttgccactgatttagccatgtgaaactcatctcattacccttttctgggtttgaagctgctgtctctagaagtgccatctcaattgtgctttgtatcagtcagtgctggagaaatcttgaatagcttatgtacaaaactttttaaattttatattattttgaaactttgctttgggtttgtggcaccctggccaccccatctggctgtgacagcctctgcagtccgtgggctggcagtttgttgatcttttaagtttccttccctacccagtccccattttctggtaaggtttctaggaggtctgttaggtgtacatcctgcagcttattggcttaaaatgtactctccttttatgtggtctctttggggccgattgggagaaagagaaatcaatagtgcaactgttttgatactgaatattgacaagtgtctttttgaaataaagaaccagtccctccaaaaaaaaaagaaaaaagaaaaaaaaaagtttgcccaaagtgggcggatacaattgtgaccggcggaaattagtatataatcgacgggaatcggaccggcctgaagggccagtttcctaaggggccgataaagctgggaacagggaagcgttcggaggaatgtaccgcgcatt

SEQ ID NO: 327094 - DNA, 2569 bp, Homo sapiens
tccagacacaccaaatatcggcataagtacgaggctcggtgtttatatcggacgagggtgagaggaggctgcaacgccgagcggaggaggcaggaaccggagcgcgagcagtagctgggtgggcaccatggctgggatcaccaccatcgaggcggtgaagcgcaagatccaggttctgcagcagcaggcagatgatgcagaggagcgagctgagcgcctccagcgagaagttgagggagaaaggcgggcccgggaacaggctgaggctgaggtggcctccttgaaccgtaggatccagctggttgaagaagagctggaccgtgctcaggagcgcctggccactgccctgcaaaagctggaagaagctgaaaaagctgctgatgagagtgagagaggtatgaaggttattgaaaaccgggccttaaaagatgaagaaaagatggaactccaggaaatccaactcaaagaagctaagcacattgcagaagaggcagataggaagtatgaagaggtggctcgtaagttggtgatcattgaaggagacttggaacgcacagaggaacgagctgagctggcagagtcccgttgccgagagatggatgagcagattagactgatggaccagaacctgaagtgtctgagtgctgctgaagaaaagtactctcaaaaagaagataaatatgaggaagaaatcaagattcttactgataaactcaaggaggcagagacccgtgctgagtttgctgagagatcggtagccaagctggaaaagacaattgatgacctggaagataaactgaaatgcaccaaagaggagcacctctgtacacaaaggatgctggaccagaccctgcttgacctgaatgagatgtagaacgccccagtcccaccctgctgctgctcctccctctgacccagactccgcctgaggccagcctgcgggaagctgacctttaactgagggctgatctttaactggaaggctgctttctcctttcaccaccccctccttccctgtgtctttttcgccaaactgtctctgcctcttcccggagaatccagctgggctagaggctgagcacctttggaaacaacatttaagggaatgtgagcacaatgcataatgtctttaaaaagcatgttgtgatgtacacattttgtaattaccttttttgttgttttgtagcaaccatttgtaaaacattccaaataattccacagtcctgaagcagcaatcgaatccctttctcacttttggaaggtgacttttcaccttaatgcatattcccctctccatagaggagaggaaaaggtgtaggcctgccttaccgagagccaaacagagcccagggagactccgctgtgggaaacctcattgttctgtacaaagtactagctaaaccagaaaggtgattccaggaggagttagccaaacaacaacaaaaacaaaaaatgtgctgttcaagttttcagctttaagatatctttggataatgttatttctattttttatttttttcattagaagttaccaaattaagatggtaagacctctgagaccaaaattttgtcccatctctaccccctcacaactgcttacagaatggatcatgtcccccttatgttgaggtgaccacttaattgctttcctgcctccttgaaagaaagaaagaaagaagactgtgtttttgccactgatttagccatgtgaaactcatctcattacccttttctgggtttgaagctgctgtctctagaagtgccatctcaattgtgctttgtatcagtcagtgctggagaaatcttgaatagcttatgtacaaaactttttaaattttatattattttgaaactttgctttgggtttgtggcaccctggccaccccatctggctgtgacagcctctgcagtccgtgggctggcagtttgttgatcttttaagtttccttccctacccagtccccattttctggtaaggtttctaggaggtctgttaggtgtacatcctgcagcttattggcttaaaatgtactctccttttatgtggtctctttggggccgattgggagaaagagaaatcaatagtgcaactgttttgatactgaatattgacaagtgtctttttgaaataaagaaccagtccctccaaaaaaaaaaacatactaaacaaaaagaacaaaataaaacaagtaacaggcaaaaaagaaacaaggggcgggcgacacacaatatcgccgagggggcgcaccatcagacacgcccccttgtctgcaaaaggagccacacaaaacgggcagcacatcacacgcacgaccacggcaccatccaaaccacgcgagcagagaagaaaaagcggcgcacacggacgatctcgagaggcagagagaacacacacagcggagcgaggggaccaacaatcgggcacgagacacacaccacgagaaaaactaggaggaccccgagggacaagaaataaaaaactgagcgtcgccaccagggtagtagcaaacacagcctaatgaccgcgtgcacacaacatccccgaggacgtgaccccgcaaactcttcc

SEQ ID NO: 327095 - DNA, 2181 bp, Homo sapiens
tccagacacaccaaatatcggcataagtacgaggctcggtgtttatatcggacgagggtgagaggaggctgcaacgccgagcggaggaggcaggaaccggagcgcgagcagtagctgggtgggcaccatggctgggatcaccaccatcgaggcggtgaagcgcaagatccaggttctgcagcagcaggcagatgatgcagaggagcgagctgagcgcctccagcgagaagttgagggagaaaggcgggcccgggaacaggctgaggctgaggtggcctccttgaaccgtaggatccagctggttgaagaagagctggaccgtgctcaggagcgcctggccactgccctgcaaaagctggaagaagctgaaaaagctgctgatgagagtgagagaggtatgaaggttattgaaaaccgggccttaaaagatgaagaaaagatggaactccaggaaatccaactcaaagaagctaagcacattgcagaagaggcagataggaagtatgaagaggtggctcgtaagttggtgatcattgaaggagacttggaacgcacagaggaacgagctgagctggcagagtcccgttgccgagagatggatgagcagattagactgatggaccagaacctgaagtgtctgagtgctgctgaagaaaagtactctcaaaaagaagataaatatgaggaagaaatcaagattcttactgataaactcaaggaggcagagacccgtgctgagtttgctgagagatcggtagccaagctggaaaagacaattgatgacctggaagataaactgaaatgcaccaaagaggagcacctctgtacacaaaggatgctggaccagaccctgcttgacctgaatgagatgtagaacgccccagtcccaccctgctgctgctcctccctctgacccagactccgcctgaggccagcctgcgggaagctgacctttaactgagggctgatctttaactggaaggctgctttctcctttcaccaccccctccttccctgtgtctttttcgccaaactgtctctgcctcttcccggagaatccagctgggctagaggctgagcacctttggaaacaacatttaagggaatgtgagcacaatgcataatgtctttaaaaagcatgttgtgatgtacacattttgtaattaccttttttgttgttttgtagcaaccatttgtaaaacattccaaataattccacagtcctgaagcagcaatcgaatccctttctcacttttggaaggtgacttttcaccttaatgcatattcccctctccatagaggagaggaaaaggtgtaggcctgccttaccgagagccaaacagagcccagggagactccgctgtgggaaacctcattgttctgtacaaagtactagctaaaccagaaaggtgattccaggaggagttagccaaacaacaacaaaaacaaaaaatgtgctgttcaagttttcagctttaagatatctttggataatgttatttctattttttatttttttcattagaagttaccaaattaagatggtaagacctctgagaccaaaattttgtcccatctctaccccctcacaactgcttacagaatggatcatgtcccccttatgttgaggtgaccacttaattgctttcctgcctccttgaaagaaagaaagaaagaagactgtgtttttgccactgatttagccatgtgaaactcatctcattacccttttctgggtttgaagctgctgtctctagaagtgccatctcaattgtgctttgtatcagtcagtgctggagaaatcttgaatagcttatgtacaaaactttttaaattttatattattttgaaactttgctttgggtttgtggcaccctggccaccccatctggctgtgacagcctctgcagtccgtgggctggcagtttgttgatcttttaagtttccttccctacccagtccccattttctggtaaggtttctaggaggtctgttaggtgtacatcctgcagcttattggcttaaaatgtactctccttttatgtggtctctttggggccgattgggagaaagagaaatcaatagtgcaactgttttgatactgaatattgacaagtgtctttttgaaataaagaaccagtccctccaattgtttgttgtctgttggttgtttgttgtttt

SEQ ID NO: 327096 - DNA, 3167 bp, Homo sapiens
tccagacacaccaaatatcggcataagtacgaggctcggtgtttatatcggacgagggtgagaggaggctgcaacgccgagcggaggaggcaggaaccggagcgcgagcagtagctgggtgggcaccatggctgggatcaccaccatcgaggcggtgaagcgcaagatccaggttctgcagcagcaggcagatgatgcagaggagcgagctgagcgcctccagcgagaagttgagggagaaaggcgggcccgggaacaggctgaggctgaggtggcctccttgaaccgtaggatccagctggttgaagaagagctggaccgtgctcaggagcgcctggccactgccctgcaaaagctggaagaagctgaaaaagctgctgatgagagtgagagaggtatgaaggttattgaaaaccgggccttaaaagatgaagaaaagatggaactccaggaaatccaactcaaagaagctaagcacattgcagaagaggcagataggaagtatgaagaggtggctcgtaagttggtgatcattgaaggagacttggaacgcacagaggaacgagctgagctggcagagtcccgttgccgagagatggatgagcagattagactgatggaccagaacctgaagtgtctgagtgctgctgaagaaaagtactctcaaaaagaagataaatatgaggaagaaatcaagattcttactgataaactcaaggaggcagagacccgtgctgagtttgctgagagatcggtagccaagctggaaaagacaattgatgacctggaagataaactgaaatgcaccaaagaggagcacctctgtacacaaaggatgctggaccagaccctgcttgacctgaatgagatgtagaacgccccagtcccaccctgctgctgctcctccctctgacccagactccgcctgaggccagcctgcgggaagctgacctttaactgagggctgatctttaactggaaggctgctttctcctttcaccaccccctccttccctgtgtctttttcgccaaactgtctctgcctcttcccggagaatccagctgggctagaggctgagcacctttggaaacaacatttaagggaatgtgagcacaatgcataatgtctttaaaaagcatgttgtgatgtacacattttgtaattaccttttttgttgttttgtagcaaccatttgtaaaacattccaaataattccacagtcctgaagcagcaatcgaatccctttctcacttttggaaggtgacttttcaccttaatgcatattcccctctccatagaggagaggaaaaggtgtaggcctgccttaccgagagccaaacagagcccagggagactccgctgtgggaaacctcattgttctgtacaaagtactagctaaaccagaaaggtgattccaggaggagttagccaaacaacaacaaaaacaaaaaatgtgctgttcaagttttcagctttaagatatctttggataatgttatttctattttttatttttttcattagaagttaccaaattaagatggtaagacctctgagaccaaaattttgtcccatctctaccccctcacaactgcttacagaatggatcatgtcccccttatgttgaggtgaccacttaattgctttcctgcctccttgaaagaaagaaagaaagaagactgtgtttttgccactgatttagccatgtgaaactcatctcattacccttttctgggtttgaagctgctgtctctagaagtgccatctcaattgtgctttgtatcagtcagtgctggagaaatcttgaatagcttatgtacaaaactttttaaattttatattattttgaaactttgctttgggtttgtggcaccctggccaccccatctggctgtgacagcctctgcagtccgtgggctggcagtttgttgatcttttaagtttccttccctacccagtccccattttctggtaaggtttctaggaggtctgttaggtgtacatcctgcagcttattggcttaaaatgtactctccttttatgtggtctctttggggccgattgggagaaagagaaatcaatagtgcaactgttttgatactgaatattgacaagtgtctttttgaaataaagaaccagtccctccaaaaaaaaaaaaaaaaaaaaaaaaaaaaaaaaaaaaaaaaaaaaaaaaaactcgagggggggcccggtaccaggtaatctactgcctgcgctgtctggtgggccgcgacatcccactcaaccagggctgcctggcgccagtgcgcgtggtcattccccgaggctccatcctggacccgtcgcccgaggcggcggtggtgggcggcaacgtgctcacgtcgcagcgcgtggtggatgtcatcctgggggcctttggggcctgcgccgcctcccaggtgcgggggcggggtgggcgcagctcgggggcggactgggtgggcaggctggagtaggagcgggagggcgaggtggggacgccctgccccagcccagcgcagcgaccaggtgccctcaccagggctgcatgaacaacgtgaccctgggcaacgcccacatgggctactacgagacggtggcgggcggcgcgggcgcgggtcccagctggcacgggcgcagcggtgtgcacagccacatgaccaacacacgcatcaccgaccctgagatcctggagagccggtacccggtcatcctgcgccgcttcgagctgcggcggggctcggggggcagaggccgcttccgaggcggcgacggcgtcacccgcgagctgctctttcgtgaggaggcgctgctgtcagtgctgaccgagcgccgcgccttccggccatacgggctccacgggggcgagcctggcgcccgcggcctaaacctgctgatccgcaaaaacggccggacggtgaatctgggcggcaagacgtcggtgaccgtgtaccccggggatgtgttctgtctccacacgcccggcggcggtggctatggggacccggaggaccccgccccaccgccggggtcgcccccgcaagcactggcctttcccgagcacggcagcgtctatgagtatcgccgggcccagaaggccgtgtgaggatcccgcaataaaaatgccttaagtctcccggttctggggacgcagctacggcgcctt

SEQ ID NO: 327097 - DNA, 2350 bp, Homo sapiens
tccagacacaccaaatatcggcataagtacgaggctcggtgtttatatcggacgagggtgagaggaggctgcaacgccgagcggaggaggcaggaaccggagcgcgagcagtagctgggtgggcaccatggctgggatcaccaccatcgaggcggtgaagcgcaagatccaggttctgcagcagcaggcagatgatgcagaggagcgagctgagcgcctccagcgagaagttgagggagaaaggcgggcccgggaacaggctgaggctgaggtggcctccttgaaccgtaggatccagctggttgaagaagagctggaccgtgctcaggagcgcctggccactgccctgcaaaagctggaagaagctgaaaaagctgctgatgagagtgagagaggtatgaaggttattgaaaaccgggccttaaaagatgaagaaaagatggaactccaggaaatccaactcaaagaagctaagcacattgcagaagaggcagataggaagtatgaagaggtggctcgtaagttggtgatcattgaaggagacttggaacgcacagaggaacgagctgagctggcagagtcccgttgccgagagatggatgagcagattagactgatggaccagaacctgaagtgtctgagtgctgctgaagaaaagtactctcaaaaagaagataaatatgaggaagaaatcaagattcttactgataaactcaaggaggcagagacccgtgctgagtttgctgagagatcggtagccaagctggaaaagacaattgatgacctggaagataaactgaaatgcaccaaagaggagcacctctgtacacaaaggatgctggaccagaccctgcttgacctgaatgagatgtagaacgccccagtcccaccctgctgctgctcctccctctgacccagactccgcctgaggccagcctgcgggaagctgacctttaactgagggctgatctttaactggaaggctgctttctcctttcaccaccccctccttccctgtgtctttttcgccaaactgtctctgcctcttcccggagaatccagctgggctagaggctgagcacctttggaaacaacatttaagggaatgtgagcacaatgcataatgtctttaaaaagcatgttgtgatgtacacattttgtaattaccttttttgttgttttgtagcaaccatttgtaaaacattccaaataattccacagtcctgaagcagcaatcgaatccctttctcacttttggaaggtgacttttcaccttaatgcatattcccctctccatagaggagaggaaaaggtgtaggcctgccttaccgagagccaaacagagcccagggagactccgctgtgggaaacctcattgttctgtacaaagtactagctaaaccagaaaggtgattccaggaggagttagccaaacaacaacaaaaacaaaaaatgtgctgttcaagttttcagctttaagatatctttggataatgttatttctattttttatttttttcattagaagttaccaaattaagatggtaagacctctgagaccaaaattttgtcccatctctaccccctcacaactgcttacagaatggatcatgtcccccttatgttgaggtgaccacttaattgctttcctgcctccttgaaagaaagaaagaaagaagactgtgtttttgccactgatttagccatgtgaaactcatctcattacccttttctgggtttgaagctgctgtctctagaagtgccatctcaattgtgctttgtatcagtcagtgctggagaaatcttgaatagcttatgtacaaaactttttaaattttatattattttgaaactttgctttgggtttgtggcaccctggccaccccatctggctgtgacagcctctgcagtccgtgggctggcagtttgttgatcttttaagtttccttccctacccagtccccattttctggtaaggtttctaggaggtctgttaggtgtacatcctgcagcttattggcttaaaatgtactctccttttatgtggtctctttggggccgattgggagaaagagaaatcaatagtgcaactgttttgatactgaatattgacaagtgtctttttgaaataaagaaccagtccctccaaaaacaaaacgaaaaaaaatatataaaaaagaaaaaaaagaaaaaagaaaaaaaaaagtttgcccaaagtgggcggatacaattgtgaccggcggaaattagtatataatcgacgggaatcggaccggcctgaagggccagtttcctaaggggccgataaagctgggaacagggaagcgttcggaggaatgtaccgcgcatt

SEQ ID NO: 327098 - DNA, 1972 bp, Homo sapiens
tccagacacaccaaatatcggcataagtacgaggctcggtgtttatatcggacgagggtgagaggaggctgcaacgccgagcggaggaggcaggaaccggagcgcgagcagtagctgggtgggcaccatggctgggatcaccaccatcgaggcggtgaagcgcaagatccaggttctgcagcagcaggcagatgatgcagaggagcgagctgagcgcctccagcgagaagttgagggagaaaggcgggcccgggaacaggctgaggctgaggtggcctccttgaaccgtaggatccagctggttgaagaagagctggaccgtgctcaggagcgcctggccactgccctgcaaaagctggaagaagctgaaaaagctgctgatgagagtgagagaggtatgaaggttattgaaaaccgggccttaaaagatgaagaaaagatggaactccaggaaatccaactcaaagaagctaagcacattgcagaagaggcagataggaagtatgaagaggtggctcgtaagttggtgatcattgaaggagacttggaacgcacagaggaacgagctgagctggcagagtcccgttgccgagagatggatgagcagattagactgatggaccagaacctgaagtgtctgagtgctgctgaagaaaagtactctcaaaaagaagataaatatgaggaagaaatcaagattcttactgataaactcaaggaggcagagacccgtgctgagtttgctgagagatcggtagccaagctggaaaagacaattgatgacctggaagataaactgaaatgcaccaaagaggagcacctctgtacacaaaggatgctggaccagaccctgcttgacctgaatgagatgtagaacgccccagtcccaccctgctgctgctcctccctctgacccagactccgcctgaggccagcctgcgggaagctgacctttaactgagggctgatctttaactggaaggctgctttctcctttcaccaccccctccttccctgtgtctttttcgccaaactgtctctgcctcttcccggagaatccagctgggctagaggctgagcacctttggaaacaacatttaagggaatgtgagcacaatgcataatgtctttaaaaagcatgttgtgatgtacacattttgtaattaccttttttgttgttttgtagcaaccatttgtaaaacattccaaataattccacagtcctgaagcagcaatcgaatccctttctcacttttggaaggtgacttttcaccttaatgcatattcccctctccatagaggagaggaaaaggtgtaggcctgccttaccgagagccaaacagagcccagggagactccgctgtgggaaacctcattgttctgtacaaagtactagctaaaccagaaaggtgattccaggaggagttagccaaacaacaacaaaaacaaaaaatgtgctgttcaagttttcagctttaagatatctttggataatgttatttctattttttatttttttcattagaagttaccaaattaagatggtaagacctctgagaccaaaattttgtcccatctctaccccctcacaactgcttacagaatggatcatgtcccccttatgttgaggtgaccacttaattgctttcctgcctccttgaaagaaagaaagaaagaagactgtgtttttgccactgatttagccatgtgaaactcatctcattacccttttctgggtttgaagctgctgtctctagaagtgccatctcaattgtgctttgtatcagtcagtgctggagaaatcttgaatagcttatgtacgtactagctaaaaccagaaaggtgattccaggaggagtgagacagagaacaaccaggaaccaaaccaattgtgctgtttcaacgttctcagctttacgatatcttgggaatacgggtatctctataggtgatcttccccatccagaagtca

SEQ ID NO: 327099 - DNA, 1683 bp, Homo sapiens
tccagacacaccaaatatcggcataagtacgaggctcggtgtttatatcggacgagggtgagaggaggctgcaacgccgagcggaggaggcaggaaccggagcgcgagcagtagctgggtgggcaccatggctgggatcaccaccatcgaggcggtgaagcgcaagatccaggttctgcagcagcaggcagatgatgcagaggagcgagctgagcgcctccagcgagaagttgagggagaaaggcgggcccgggaacaggctgaggctgaggtggcctccttgaaccgtaggatccagctggttgaagaagagctggaccgtgctcaggagcgcctggccactgccctgcaaaagctggaagaagctgaaaaagctgctgatgagagtgagagaggtatgaaggttattgaaaaccgggccttaaaagatgaagaaaagatggaactccaggaaatccaactcaaagaagctaagcacattgcagaagaggcagataggaagtatgaagaggtggctcgtaagttggtgatcattgaaggagacttggaacgcacagaggaacgagctgagctggcagagtcccgttgccgagagatggatgagcagattagactgatggaccagaacctgaagtgtctgagtgctgctgaagaaaagtactctcaaaaagaagataaatatgaggaagaaatcaagattcttactgataaactcaaggaggcagagacccgtgctgagtttgctgagagatcggtagccaagctggaaaagacaattgatgacctggaagataaactgaaatgcaccaaagaggagcacctctgtacacaaaggatgctggaccagaccctgcttgacctgaatgagatgtagaacgccccagtcccaccctgctgctgctcctccctctgacccagactccgcctgaggccagcctgcgggaagctgacctttaactgagggctgatctttaactggaaggctgctttctcctttcaccaccccctccttccctgtgtctttttcgccaaactgtctctgcctcttcccggagaatccagctgggctagaggctgagcacctttggaaacaacatttaagggaatgtgagcacaatgcataatgtctttaaaaagcatgttgtgatgtacacattttgtaattaccttttttgttgttttgtagcaaccatttgtaaaacattccaaataattccacagtcctgaagcagcaatcgaatccctttctcacttttggaaggtgacttttcaccttaatgcatattcccctctccatagaggagaggaaaaggtgtaggcctgccttaccgagagccaaacagagcccagggagactccgctgtgggaaacctcattgttctgtacaaagtactagctaaaccagaaaggtgattccaggaggagttagccaaacaacaacaaaaacaaaaaatgtgctgttcaagttttcagctttaagatatctttggataatgttatttctattttttatttttttcattagaagttaccaaattaagatggtaagacctctgagaccaaaattttgtcccatctctaccccctcacaactgcttacagaatggatcatgtcccccttatgttgaggtgaccacttaattgctttcctgcctcctatgtcgttttcgggatcctctagat

SEQ ID NO: 327100 - DNA, 2115 bp, Homo sapiens
tccagacacaccaaatatcggcataagtacgaggctcggtgtttatatcggacgagggtgagaggaggctgcaacgccgagcggaggaggcaggaaccggagcgcgagcagtagctgggtgggcaccatggctgggatcaccaccatcgaggcggtgaagcgcaagatccaggttctgcagcagcaggcagatgatgcagaggagcgagctgagcgcctccagcgagaagttgagggagaaaggcgggcccgggaacaggctgaggctgaggtggcctccttgaaccgtaggatccagctggttgaagaagagctggaccgtgctcaggagcgcctggccactgccctgcaaaagctggaagaagctgaaaaagctgctgatgagagtgagagaggtatgaaggttattgaaaaccgggccttaaaagatgaagaaaagatggaactccaggaaatccaactcaaagaagctaagcacattgcagaagaggcagataggaagtatgaagaggtggctcgtaagttggtgatcattgaaggagacttggaacgcacagaggaacgagctgagctggcagagtcccgttgccgagagatggatgagcagattagactgatggaccagaacctgaagtgtctgagtgctgctgaagaaaagtactctcaaaaagaagataaatatgaggaagaaatcaagattcttactgataaactcaaggaggcagagacccgtgctgagtttgctgagagatcggtagccaagctggaaaagacaattgatgacctggaagataaactgaaatgcaccaaagaggagcacctctgtacacaaaggatgctggaccagaccctgcttgaccttgctgctcctccctctgacccagactccgcctgaggccagcctgcgggaagctgacctttaactgagggctgatctttaactggaaggctgctttctcctttcaccaccccctccttccctgtgtctttttcgccaaactgtctctgcctcttcccggagaatccagctgggctagaggctgagcacctttggaaacaacatttaagggaatgtgagcacaatgcataatgtctttaaaaagcatgttgtgatgtacacattttgtaattaccttttttgttgttttgtagcaaccatttgtaaaacattccaaataattccacagtcctgaagcagcaatcgaatccctttctcacttttggaaggtgacttttcaccttaatgcatattcccctctccatagaggagaggaaaaggtgtaggcctgccttaccgagagccaaacagagcccagggagactccgctgtgggaaacctcattgttctgtacaaagtactagctaaaccagaaaggtgattccaggaggagttagccaaacaacaacaaaaacaaaaaatgtgctgttcaagttttcagctttaagatatctttggataatgttatttctattttttatttttttcattagaagttaccaaattaagatggtaagacctctgagaccaaaattttgtcccatctctaccccctcacaactgcttacagaatggatcatgtcccccttatgttgaggtgaccacttaattgctttcctgcctccttgaaagaaagaaagaaagaagactgtgtttttgccactgatttagccatgtgaaactcatctcattacccttttctgggtttgaagctgctgtctctagaagtgccatctcaattgtgctttgtatcagtcagtgctggagaaatcttgaatagcttatgtacaaaactttttaaattttatattattttgaaactttgctttgggtttgtggcaccctggccaccccatctggctgtgacagcctctgcagtccgtgggctggcagtttgttgatcttttaagtttccttccctacccagtccccattttctggtaaggtttctaggaggtctgttaggtgtacatcctgcagcttattggcttaaaatgtactctccttttatgtggtctctttggggccgattgggagaaagagaaatcaatagtgcaactgttttgatactgaatattgacaagtgtctttttgaaataaagaaccagtccctccaa

SEQ ID NO: 327101 - DNA, 2228 bp, Homo sapiens
tccagacacaccaaatatcggcataagtacgaggctcggtgtttatatcggacgagggtgagaggaggctgcaacgccgagcggaggaggcaggaaccggagcgcgagcagtagctgggtgggcaccatggctgggatcaccaccatcgaggcggtgaagcgcaagatccaggttctgcagcagcaggcagatgatgcagaggagcgagctgagcgcctccagcgagaagttgagggagaaaggcgggcccgggaacaggctgaggctgaggtggcctccttgaaccgtaggatccagctggttgaagaagagctggaccgtgctcaggagcgcctggccactgccctgcaaaagctggaagaagctgaaaaagctgctgatgagagtgagagaggtatgaaggttattgaaaaccgggccttaaaagatgaagaaaagatggaactccaggaaatccaactcaaagaagctaagcacattgcagaagaggcagataggaagtatgaagaggtggctcgtaagttggtgatcattgaaggagacttggaacgcacagaggaacgagctgagctggcagagtcccgttgccgagagatggatgagcagattagactgatggaccagaacctgaagtgtctgagtgctgctgaagaaaagtactctcaaaaagaagataaatatgaggaagaaatcaagattcttactgataaactcaaggaggcagagacccgtgctgagtttgctgagagatcggtagccaagctggaaaagacaattgatgacctggaagatgagctctatgcccagaaactgaagtacaaggccattagcgaggagctggaccacgccctcaatgacatgacctctatataaactgaaatgcaccaaagaggagcacctctgtacacaaaggatgctggaccagaccctgcttgacctgaatgagatgtagaacgccccagtcccaccctgctgctgctcctccctctgacccagactccgcctgaggccagcctgcgggaagctgacctttaactgagggctgatctttaactggaaggctgctttctcctttcaccaccccctccttccctgtgtctttttcgccaaactgtctctgcctcttcccggagaatccagctgggctagaggctgagcacctttggaaacaacatttaagggaatgtgagcacaatgcataatgtctttaaaaagcatgttgtgatgtacacattttgtaattaccttttttgttgttttgtagcaaccatttgtaaaacattccaaataattccacagtcctgaagcagcaatcgaatccctttctcacttttggaaggtgacttttcaccttaatgcatattcccctctccatagaggagaggaaaaggtgtaggcctgccttaccgagagccaaacagagcccagggagactccgctgtgggaaacctcattgttctgtacaaagtactagctaaaccagaaaggtgattccaggaggagttagccaaacaacaacaaaaacaaaaaatgtgctgttcaagttttcagctttaagatatctttggataatgttatttctattttttatttttttcattagaagttaccaaattaagatggtaagacctctgagaccaaaattttgtcccatctctaccccctcacaactgcttacagaatggatcatgtcccccttatgttgaggtgaccacttaattgctttcctgcctccttgaaagaaagaaagaaagaagactgtgtttttgccactgatttagccatgtgaaactcatctcattacccttttctgggtttgaagctgctgtctctagaagtgccatctcaattgtgctttgtatcagtcagtgctggagaaatcttgaatagcttatgtacaaaactttttaaattttatattattttgaaactttgctttgggtttgtggcaccctggccaccccatctggctgtgacagcctctgcagtccgtgggctggcagtttgttgatcttttaagtttccttccctacccagtccccattttctggtaaggtttctaggaggtctgttaggtgtacatcctgcagcttattggcttaaaatgtactctccttttatgtggtctctttggggccgattgggagaaagagaaatcaatagtgcaactgttttgatactgaatattgacaagtgtctttttgaaataaagaaccagtccctccaa

SEQ ID NO: 327102 - DNA, 2015 bp, Homo sapiens
tccagacacaccaaatatcggcataagtacgaggctcggtgtttatatcggacgagggtgagaggaggctgcaacgccgagcggaggaggcaggaaccggagcgcgagcagtagctgggtgggcaccatggctgggatcaccaccatcgaggcggtgaagcgcaagatccaggttctgcagcagcaggcagatgatgcagaggagcgagctgagcgcctccagcgagaagttgagggagaaaggcgggcccgggaacagaggtatgaaggttattgaaaaccgggccttaaaagatgaagaaaagatggaactccaggaaatccaactcaaagaagctaagcacattgcagaagaggcagataggaagtatgaagaggtggctcgtaagttggtgatcattgaaggagacttggaacgcacagaggaacgagctgagctggcagagtcccgttgccgagagatggatgagcagattagactgatggaccagaacctgaagtgtctgagtgctgctgaagaaaagtactctcaaaaagaagataaatatgaggaagaaatcaagattcttactgataaactcaaggaggcagagacccgtgctgagtttgctgagagatcggtagccaagctggaaaagacaattgatgacctggaagataaactgaaatgcaccaaagaggagcacctctgtacacaaaggatgctggaccagaccctgcttgacctgaatgagatgtagaacgccccagtcccaccctgctgctgctcctccctctgacccagactccgcctgaggccagcctgcgggaagctgacctttaactgagggctgatctttaactggaaggctgctttctcctttcaccaccccctccttccctgtgtctttttcgccaaactgtctctgcctcttcccggagaatccagctgggctagaggctgagcacctttggaaacaacatttaagggaatgtgagcacaatgcataatgtctttaaaaagcatgttgtgatgtacacattttgtaattaccttttttgttgttttgtagcaaccatttgtaaaacattccaaataattccacagtcctgaagcagcaatcgaatccctttctcacttttggaaggtgacttttcaccttaatgcatattcccctctccatagaggagaggaaaaggtgtaggcctgccttaccgagagccaaacagagcccagggagactccgctgtgggaaacctcattgttctgtacaaagtactagctaaaccagaaaggtgattccaggaggagttagccaaacaacaacaaaaacaaaaaatgtgctgttcaagttttcagctttaagatatctttggataatgttatttctattttttatttttttcattagaagttaccaaattaagatggtaagacctctgagaccaaaattttgtcccatctctaccccctcacaactgcttacagaatggatcatgtcccccttatgttgaggtgaccacttaattgctttcctgcctccttgaaagaaagaaagaaagaagactgtgtttttgccactgatttagccatgtgaaactcatctcattacccttttctgggtttgaagctgctgtctctagaagtgccatctcaattgtgctttgtatcagtcagtgctggagaaatcttgaatagcttatgtacaaaactttttaaattttatattattttgaaactttgctttgggtttgtggcaccctggccaccccatctggctgtgacagcctctgcagtccgtgggctggcagtttgttgatcttttaagtttccttccctacccagtccccattttctggtaaggtttctaggaggtctgttaggtgtacatcctgcagcttattggcttaaaatgtactctccttttatgtggtctctttggggccgattgggagaaagagaaatcaatagtgcaactgttttgatactgaatattgacaagtgtctttttgaaataaagaaccagtccctccaa

SEQ ID NO: 327103 - DNA, 1471 bp, Homo sapiens
tccagacacaccaaatatcggcataagtacgaggctcggtgtttatatcggacgagggtgagaggaggctgcaacgccgagcggaggaggcaggaaccggagcgcgagcagtagctgggtgggcaccatggctgggatcaccaccatcgaggcggtgaagcgcaagatccaggttctgcagcagcaggcagatgatgcagaggagcgagctgagcgcctccagcgagaagttgagggagaaaggcgggcccgggaacaggctgaggctgaggtggcctccttgaaccgtaggatccagctggttgaagaagagctggaccgtgctcaggagcgcctggccactgccctgcaaaagctggaagaagctgaaaaagctgctgatgagagtgagagaggtatgaaggttattgaaaaccgggccttaaaagatgaagaaaagatggaactccaggaaatccaactcaaagaagctaagcacattgcagaagaggcagataggaagtatgaagaggtggctcgtaagttggtgatcattgaaggagacttggaacgcacagaggaacgagctgagctggcagagtcccgttgccgagagatggatgagcagattagactgatggaccagaacctgaagtgtctgagtgctgctgaagaaaagtactctcaaaaagaagataaatatgaggaagaaatcaagattcttactgataaactcaaggaggcagagacccgtgctgagtttgctgagagatcggtagccaagctggaaaagacaattgatgacctggaagataaactgaaatgcaccaaagaggagcacctctgtacacaaaggatgctggaccagaccctgcttgacctgaatgagatgtagaacgccccagtcccaccctgctgctgctcctccctctgacccagactccgcctgaggccagcctgcgggaagctgacctttaactgagggctgatctttaactggaaggctgctttctcctttcaccaccccctccttccctgtgtctttttcgccaaactgtctctgcctcttcccggagaatccagctgggctagaggctgagcacctttggaaacaacatttaagggaatgtgagcacaatgcataatgtctttaaaaagcatgttgtgatgtacacattttgtaattaccttttttgttgttttgtagcaaccatttgtaaaacattccaaataattccacagtcctgaagcagcaatcgaatccctttctcacttttggaaggtgacttttcaccttaatgcatattcccctctccatagaggagaggaaaaggtgtaggcctgccttaccgagagccaaacagagcccagggagactccgctgtgggaaacctcattgttctgtacaaagtactagctaaaccagaaaggtgattccaggaggagttagccaaacaacaacaaaaacaaaatacaaaaaataaaaacatgt

SEQ ID NO: 327104 - DNA, 1950 bp, Homo sapiens
tccagacacaccaaatatcggcataagtacgaggctcggtgtttatatcggacgagggtgagaggaggctgcaacgccgagcggaggaggcaggaaccggagcgcgagcagtagctgggtgggcaccatggctgggatcaccaccatcgaggcggtgaagcgcaagatccaggttctgcagcagcaggcagatgatgcagaggagcgagctgagcgcctccagcgagaagttgaggaaagatggaactccaggaaatccaactcaaagaagctaagcacattgcagaagaggcagataggaagtatgaagaggtggctcgtaagttggtgatcattgaaggagacttggaacgcacagaggaacgagctgagctggcagagtcccgttgccgagagatggatgagcagattagactgatggaccagaacctgaagtgtctgagtgctgctgaagaaaagtactctcaaaaagaagataaatatgaggaagaaatcaagattcttactgataaactcaaggaggcagagacccgtgctgagtttgctgagagatcggtagccaagctggaaaagacaattgatgacctggaagataaactgaaatgcaccaaagaggagcacctctgtacacaaaggatgctggaccagaccctgcttgacctgaatgagatgtagaacgccccagtcccaccctgctgctgctcctccctctgacccagactccgcctgaggccagcctgcgggaagctgacctttaactgagggctgatctttaactggaaggctgctttctcctttcaccaccccctccttccctgtgtctttttcgccaaactgtctctgcctcttcccggagaatccagctgggctagaggctgagcacctttggaaacaacatttaagggaatgtgagcacaatgcataatgtctttaaaaagcatgttgtgatgtacacattttgtaattaccttttttgttgttttgtagcaaccatttgtaaaacattccaaataattccacagtcctgaagcagcaatcgaatccctttctcacttttggaaggtgacttttcaccttaatgcatattcccctctccatagaggagaggaaaaggtgtaggcctgccttaccgagagccaaacagagcccagggagactccgctgtgggaaacctcattgttctgtacaaagtactagctaaaccagaaaggtgattccaggaggagttagccaaacaacaacaaaaacaaaaaatgtgctgttcaagttttcagctttaagatatctttggataatgttatttctattttttatttttttcattagaagttaccaaattaagatggtaagacctctgagaccaaaattttgtcccatctctaccccctcacaactgcttacagaatggatcatgtcccccttatgttgaggtgaccacttaattgctttcctgcctccttgaaagaaagaaagaaagaagactgtgtttttgccactgatttagccatgtgaaactcatctcattacccttttctgggtttgaagctgctgtctctagaagtgccatctcaattgtgctttgtatcagtcagtgctggagaaatcttgaatagcttatgtacaaaactttttaaattttatattattttgaaactttgctttgggtttgtggcaccctggccaccccatctggctgtgacagcctctgcagtccgtgggctggcagtttgttgatcttttaagtttccttccctacccagtccccattttctggtaaggtttctaggaggtctgttaggtgtacatcctgcagcttattggcttaaaatgtactctccttttatgtggtctctttggggccgattgggagaaagagaaatcaatagtgcaactgttttgatactgaatattgacaagtgtctttttgaaataaagaaccagtccctccaa

SEQ ID NO: 327105 - DNA, 2149 bp, Homo sapiens
tccagacacaccaaatatcggcataagtacgaggctcggtgtttatatcggacgagggtgagaggaggctgcaacgccgagcggaggaggcaggaaccggagcgcgagcagtagctgggtgggcaccatggctgggatcaccaccatcgaggcggtgaagcgcaagatccaggttctgcagcagcaggcagatgatgcagaggagcgagctgagcgcctccagcgagaagttgagggagaaaggcgggcccgggaacaggctgaggctgaggtggcctccttgaaccgtaggatccagctggttgaagaagagctggaccgtgctcaggagcgcctggccactgccctgcaaaagctggaagaagctgaaaaagctgctgatgagagtgagagaggtatgaaggttattgaaaaccgggccttaaaagatgaagaaaagatggaactccaggaaatccaactcaaagaagctaagcacattgcagaagaggcagataggaagtatgaagaggtggctcgtaagttggtgatcattgaaggagacttggaacgcacagaggaacgagctgagctggcagagtctaagtgttctgagctggaggaggagctgaagaatgtcaccaacaacctcaagtctcttgaggctcaggcggagaagtactctcaaaaagaagataaatatgaggaagaaatcaagattcttactgataaactcaaggaggcagagacccgtgctgagtttgctgagagatcggtagccaagctggaaaagacaattgatgacctggaagataaactgaaatgcaccaaagaggagcacctctgtacacaaaggatgctggaccagaccctgcttgacctgaatgagatgtagaacgccccagtcccaccctgctgctgctcctccctctgacccagactccgcctgaggccagcctgcgggaagctgacctttaactgagggctgatctttaactggaaggctgctttctcctttcaccaccccctccttccctgtgtctttttcgccaaactgtctctgcctcttcccggagaatccagctgggctagaggctgagcacctttggaaacaacatttaagggaatgtgagcacaatgcataatgtctttaaaaagcatgttgtgatgtacacattttgtaattaccttttttgttgttttgtagcaaccatttgtaaaacattccaaataattccacagtcctgaagcagcaatcgaatccctttctcacttttggaaggtgacttttcaccttaatgcatattcccctctccatagaggagaggaaaaggtgtaggcctgccttaccgagagccaaacagagcccagggagactccgctgtgggaaacctcattgttctgtacaaagtactagctaaaccagaaaggtgattccaggaggagttagccaaacaacaacaaaaacaaaaaatgtgctgttcaagttttcagctttaagatatctttggataatgttatttctattttttatttttttcattagaagttaccaaattaagatggtaagacctctgagaccaaaattttgtcccatctctaccccctcacaactgcttacagaatggatcatgtcccccttatgttgaggtgaccacttaattgctttcctgcctccttgaaagaaagaaagaaagaagactgtgtttttgccactgatttagccatgtgaaactcatctcattacccttttctgggtttgaagctgctgtctctagaagtgccatctcaattgtgctttgtatcagtcagtgctggagaaatcttgaatagcttatgtacaaaactttttaaattttatattattttgaaactttgctttgggtttgtggcaccctggccaccccatctggctgtgacagcctctgcagtccgtgggctggcagtttgttgatcttttaagtttccttccctacccagtccccattttctggtaaggtttctaggaggtctgttaggtgtacatcctgcagcttattggcttaaaatgtactctccttttatgtggtctctttggggccgattgggagaaagagaaatcaatagtgcaactgttttgatactgaatattgacaagtgtctttttgaaataaagaaccagtccctccaa

SEQ ID NO: 327106 - DNA, 2073 bp, Homo sapiens
tccagacacaccaaatatcggcataagtacgaggctcggtgtttatatcggacgagggtgagaggaggctgcaacgccgagcggaggaggcaggaaccggagcgcgagcagtagctgggtgggcaccatggctgggatcaccaccatcgaggcggtgaagcgcaagatccaggttctgcagcagcaggcagatgatgcagaggagcgagctgagcgcctccagcgagaagttgagggagaaaggcgggcccgggaacaggctgaggctgaggtggcctccttgaaccgtaggatccagctggttgaagaagagctggaccgtgctcaggagcgcctggccactgccctgcaaaagctggaagaagctgaaaaagctgctgatgagagtgagagaggtatgaaggttattgaaaaccgggccttaaaagatgaagaaaagatggaactccaggaaatccaactcaaagaagctaagcacattgcagaagaggcagataggaagtatgaagaggtggctcgtaagttggtgatcattgaaggagacttggaacgcacagaggaacgagctgagctggcagagtctactctcaaaaagaagataaatatgaggaagaaatcaagattcttactgataaactcaaggaggcagagacccgtgctgagtttgctgagagatcggtagccaagctggaaaagacaattgatgacctggaagataaactgaaatgcaccaaagaggagcacctctgtacacaaaggatgctggaccagaccctgcttgacctgaatgagatgtagaacgccccagtcccaccctgctgctgctcctccctctgacccagactccgcctgaggccagcctgcgggaagctgacctttaactgagggctgatctttaactggaaggctgctttctcctttcaccaccccctccttccctgtgtctttttcgccaaactgtctctgcctcttcccggagaatccagctgggctagaggctgagcacctttggaaacaacatttaagggaatgtgagcacaatgcataatgtctttaaaaagcatgttgtgatgtacacattttgtaattaccttttttgttgttttgtagcaaccatttgtaaaacattccaaataattccacagtcctgaagcagcaatcgaatccctttctcacttttggaaggtgacttttcaccttaatgcatattcccctctccatagaggagaggaaaaggtgtaggcctgccttaccgagagccaaacagagcccagggagactccgctgtgggaaacctcattgttctgtacaaagtactagctaaaccagaaaggtgattccaggaggagttagccaaacaacaacaaaaacaaaaaatgtgctgttcaagttttcagctttaagatatctttggataatgttatttctattttttatttttttcattagaagttaccaaattaagatggtaagacctctgagaccaaaattttgtcccatctctaccccctcacaactgcttacagaatggatcatgtcccccttatgttgaggtgaccacttaattgctttcctgcctccttgaaagaaagaaagaaagaagactgtgtttttgccactgatttagccatgtgaaactcatctcattacccttttctgggtttgaagctgctgtctctagaagtgccatctcaattgtgctttgtatcagtcagtgctggagaaatcttgaatagcttatgtacaaaactttttaaattttatattattttgaaactttgctttgggtttgtggcaccctggccaccccatctggctgtgacagcctctgcagtccgtgggctggcagtttgttgatcttttaagtttccttccctacccagtccccattttctggtaaggtttctaggaggtctgttaggtgtacatcctgcagcttattggcttaaaatgtactctccttttatgtggtctctttggggccgattgggagaaagagaaatcaatagtgcaactgttttgatactgaatattgacaagtgtctttttgaaataaagaaccagtccctccaa

SEQ ID NO: 327107 - DNA, 1696 bp, Homo sapiens
  misc_feature (7)..(7): n is a, c, g, or t
ggagtanggatatcgtcgaccaggcgctcgagaagaggcagataggaagtatgaagaggtggctcgtaagttggtgatcattgaaggagacttggaacgcacagaggaacgagctgagctggcagagtcccgttgccgagagatggatgagcagattagactgatggaccagaacctgaagtgtctgagtgctgctgaagaaaagtactctcaaaaagaagataaatatgaggaagaaatcaagattcttactgataaactcaaggaggcagagacccgtgctgagtttgctgagagatcggtagccaagctggaaaagacaattgatgacctggaagataaactgaaatgcaccaaagaggagcacctctgtacacaaaggatgctggaccagaccctgcttgacctgaatgagatgtagaacgccccagtcccaccctgctgctgctcctccctctgacccagactccgcctgaggccagcctgcgggaagctgacctttaactgagggctgatctttaactggaaggctgctttctcctttcaccaccccctccttccctgtgtctttttcgccaaactgtctctgcctcttcccggagaatccagctgggctagaggctgagcacctttggaaacaacatttaagggaatgtgagcacaatgcataatgtctttaaaaagcatgttgtgatgtacacattttgtaattaccttttttgttgttttgtagcaaccatttgtaaaacattccaaataattccacagtcctgaagcagcaatcgaatccctttctcacttttggaaggtgacttttcaccttaatgcatattcccctctccatagaggagaggaaaaggtgtaggcctgccttaccgagagccaaacagagcccagggagactccgctgtgggaaacctcattgttctgtacaaagtactagctaaaccagaaaggtgattccaggaggagttagccaaacaacaacaaaaacaaaaaatgtgctgttcaagttttcagctttaagatatctttggataatgttatttctattttttatttttttcattagaagttaccaaattaagatggtaagacctctgagaccaaaattttgtcccatctctaccccctcacaactgcttacagaatggatcatgtcccccttatgttgaggtgaccacttaattgctttcctgcctccttgaaagaaagaaagaaagaagactgtgtttttgccactgatttagccatgtgaaactcatctcattacccttttctgggtttgaagctgctgtctctagaagtgccatctcaattgtgctttgtatcagtcagtgctggagaaatcttgaatagcttatgtacaaaactttttaaattttatattattttgaaactttgctttgggtttgtggcaccctggccaccccatctggctgtgacagcctctgcagtccgtgggctggcagtttgttgatcttttaagtttccttccctacccagtccccattttctggtaaggtttctaggaggtctgttaggtgtacatcctgcagcttattggcttaaaatgtactctccttttatgtggtctctttggggccgattgggagaaagagaaatcaatagtgcaactgttttgatactgaatattgacaagtgtctttttgaaataaagaaccagtccctccaa

SEQ ID NO: 327108 - DNA, 2228 bp, Homo sapiens
tccagacacaccaaatatcggcataagtacgaggctcggtgtttatatcggacgagggtgagaggaggctgcaacgccgagcggaggaggcaggaaccggagcgcgagcagtagctgggtgggcaccatggctgggatcaccaccatcgaggcggtgaagcgcaagatccaggttctgcagcagcaggcagatgatgcagaggagcgagctgagcgcctccagcgagaagttgagggagaaaggcgggcccgggaacaggctgaggctgaggtggcctccttgaaccgtaggatccagctggttgaagaagagctggaccgtgctcaggagcgcctggccactgccctgcaaaagctggaagaagctgaaaaagctgctgatgagagtgagagaggtatgaaggttattgaaaaccgggccttaaaagatgaagaaaagatggaactccaggaaatccaactcaaagaagctaagcacattgcagaagaggcagataggaagtatgaagaggtggctcgtaagttggtgatcattgaaggagacttggaacgcacagaggaacgagctgagctggcagagtctaagtgttctgagctggaggaggagctgaagaatgtcaccaacaacctcaagtctcttgaggctcaggcggagaagtactctcaaaaagaagataaatatgaggaagaaatcaagattcttactgataaactcaaggaggcagagacccgtgctgagtttgctgagagatcggtagccaagctggaaaagacaattgatgacctggaagatgagctctatgcccagaaactgaagtacaaggccattagcgaggagctggaccacgccctcaatgacatgacctctatataaactgaaatgcaccaaagaggagcacctctgtacacaaaggatgctggaccagaccctgcttgacctgaatgagatgtagaacgccccagtcccaccctgctgctgctcctccctctgacccagactccgcctgaggccagcctgcgggaagctgacctttaactgagggctgatctttaactggaaggctgctttctcctttcaccaccccctccttccctgtgtctttttcgccaaactgtctctgcctcttcccggagaatccagctgggctagaggctgagcacctttggaaacaacatttaagggaatgtgagcacaatgcataatgtctttaaaaagcatgttgtgatgtacacattttgtaattaccttttttgttgttttgtagcaaccatttgtaaaacattccaaataattccacagtcctgaagcagcaatcgaatccctttctcacttttggaaggtgacttttcaccttaatgcatattcccctctccatagaggagaggaaaaggtgtaggcctgccttaccgagagccaaacagagcccagggagactccgctgtgggaaacctcattgttctgtacaaagtactagctaaaccagaaaggtgattccaggaggagttagccaaacaacaacaaaaacaaaaaatgtgctgttcaagttttcagctttaagatatctttggataatgttatttctattttttatttttttcattagaagttaccaaattaagatggtaagacctctgagaccaaaattttgtcccatctctaccccctcacaactgcttacagaatggatcatgtcccccttatgttgaggtgaccacttaattgctttcctgcctccttgaaagaaagaaagaaagaagactgtgtttttgccactgatttagccatgtgaaactcatctcattacccttttctgggtttgaagctgctgtctctagaagtgccatctcaattgtgctttgtatcagtcagtgctggagaaatcttgaatagcttatgtacaaaactttttaaattttatattattttgaaactttgctttgggtttgtggcaccctggccaccccatctggctgtgacagcctctgcagtccgtgggctggcagtttgttgatcttttaagtttccttccctacccagtccccattttctggtaaggtttctaggaggtctgttaggtgtacatcctgcagcttattggcttaaaatgtactctccttttatgtggtctctttggggccgattgggagaaagagaaatcaatagtgcaactgttttgatactgaatattgacaagtgtctttttgaaataaagaaccagtccctccaa

SEQ ID NO: 327109 - DNA, 1557 bp, Homo sapiens
gagtgctgagattaggctggctgagagagctgaaagcaccacaacctaagctctgagctagcgggatactctcaaaaagaagataaatatgaggaagaaatcaagattcttactgataaactcaaggaggcagagacccgtgctgagtttgctgagagatcggtagccaagctggaaaagacaattgatgacctggaagataaactgaaatgcaccaaagaggagcacctctgtacacaaaggatgctggaccagaccctgcttgacctgaatgagatgtagaacgccccagtcccaccctgctgctgctcctccctctgacccagactccgcctgaggccagcctgcgggaagctgacctttaactgagggctgatctttaactggaaggctgctttctcctttcaccaccccctccttccctgtgtctttttcgccaaactgtctctgcctcttcccggagaatccagctgggctagaggctgagcacctttggaaacaacatttaagggaatgtgagcacaatgcataatgtctttaaaaagcatgttgtgatgtacacattttgtaattaccttttttgttgttttgtagcaaccatttgtaaaacattccaaataattccacagtcctgaagcagcaatcgaatccctttctcacttttggaaggtgacttttcaccttaatgcatattcccctctccatagaggagaggaaaaggtgtaggcctgccttaccgagagccaaacagagcccagggagactccgctgtgggaaacctcattgttctgtacaaagtactagctaaaccagaaaggtgattccaggaggagttagccaaacaacaacaaaaacaaaaaatgtgctgttcaagttttcagctttaagatatctttggataatgttatttctattttttatttttttcattagaagttaccaaattaagatggtaagacctctgagaccaaaattttgtcccatctctaccccctcacaactgcttacagaatggatcatgtcccccttatgttgaggtgaccacttaattgctttcctgcctccttgaaagaaagaaagaaagaagactgtgtttttgccactgatttagccatgtgaaactcatctcattacccttttctgggtttgaagctgctgtctctagaagtgccatctcaattgtgctttgtatcagtcagtgctggagaaatcttgaatagcttatgtacaaaactttttaaattttatattattttgaaactttgctttgggtttgtggcaccctggccaccccatctggctgtgacagcctctgcagtccgtgggctggcagtttgttgatcttttaagtttccttccctacccagtccccattttctggtaaggtttctaggaggtctgttaggtgtacatcctgcagcttattggcttaaaatgtactctccttttatgtggtctctttggggccgattgggagaaagagaaatcaatagtgcaactgttttgatactgaatattgacaagtgtctttttgaaataaagaaccagtccctccaa

SEQ ID NO: 327110 - DNA, 1262 bp, Homo sapiens
tccagacacaccaaatatcggcataagtacgaggctcggtgtttatatcggacgagggtgagaggaggctgcaacgccgagcggaggaggcaggaaccggagcgcgagcagtagctgggtgggcaccatggctgggatcaccaccatcgaggcggtgaagcgcaagatccaggttctgcagcagcaggcagatgatgcagaggagcgagctgagcgcctccagcgagaagttgagggagaaaggcgggcccgggaacaggctgaggctgaggtggcctccttgaaccgtaggatccagctggttgaagaagagctggaccgtgctcaggagcgcctggccactgccctgcaaaagctggaagaagctgaaaaagctgctgatgagagtgagagaggtatgaaggttattgaaaaccgggccttaaaagatgaagaaaagatggaactccaggaaatccaactcaaagaagctaagcacattgcagaagaggcagataggaagtatgaagaggtggctcgtaagttggtgatcattgaaggagacttggaacgcacagaggaacgagctgagctggcagagtcccgttgccgagagatggatgagcagattagactgatggaccagaacctgaagtgtctgagtgctgctgaagaaaagtactctcaaaaagaagataaatatgaggaagaaatcaagattcttactgataaactcaaggaggcagagacccgtgctgagtttgctgagagatcggtagccaagctggaaaagacaattgatgacctggaagataaactgaaatgcaccaaagaggagcacctctgtacacaaaggatgctggaccagaccctgcttgacctgaatgagatgtagaacgccccagtcccaccctgctgctgctcctccctctgacccagactccgcctgaggccagcctgcgggaagctgacctttaactgagggctgatctttaactggaaggctgctttctcctttcaccaccccctccttccctgtgtctttttcgccaaactgtctctgcctcttcccggagaatccagctgggctagaggctgagcacctttggaaacaacatttaagggaatgtgagcacaatgcataatgtctttaaaaagcatgttgtgatgtacacattttgtaattaccttttttgttgttttgtagcaaccatttgtaaaacattccaaataattccacagtcctgaagcagcaatcgggaggaggacgggtccgagcaagc

SEQ ID NO: 327111 - DNA, 1412 bp, Homo sapiens
caccggcccggagctggcaccactcccgcgacgcaagcgacagacagaacactcataaactgaaatgcaccaaagaggagcacctctgtacacaaaggatgctggaccagaccctgcttgacctgaatgagatgtagaacgccccagtcccaccctgctgctgctcctccctctgacccagactccgcctgaggccagcctgcgggaagctgacctttaactgagggctgatctttaactggaaggctgctttctcctttcaccaccccctccttccctgtgtctttttcgccaaactgtctctgcctcttcccggagaatccagctgggctagaggctgagcacctttggaaacaacatttaagggaatgtgagcacaatgcataatgtctttaaaaagcatgttgtgatgtacacattttgtaattaccttttttgttgttttgtagcaaccatttgtaaaacattccaaataattccacagtcctgaagcagcaatcgaatccctttctcacttttggaaggtgacttttcaccttaatgcatattcccctctccatagaggagaggaaaaggtgtaggcctgccttaccgagagccaaacagagcccagggagactccgctgtgggaaacctcattgttctgtacaaagtactagctaaaccagaaaggtgattccaggaggagttagccaaacaacaacaaaaacaaaaaatgtgctgttcaagttttcagctttaagatatctttggataatgttatttctattttttatttttttcattagaagttaccaaattaagatggtaagacctctgagaccaaaattttgtcccatctctaccccctcacaactgcttacagaatggatcatgtcccccttatgttgaggtgaccacttaattgctttcctgcctccttgaaagaaagaaagaaagaagactgtgtttttgccactgatttagccatgtgaaactcatctcattacccttttctgggtttgaagctgctgtctctagaagtgccatctcaattgtgctttgtatcagtcagtgctggagaaatcttgaatagcttatgtacaaaactttttaaattttatattattttgaaactttgctttgggtttgtggcaccctggccaccccatctggctgtgacagcctctgcagtccgtgggctggcagtttgttgatcttttaagtttccttccctacccagtccccattttctggtaaggtttctaggaggtctgttaggtgtacatcctgcagcttattggcttaaaatgtactctccttttatgtggtctctttggggccgattgggagaaagagaaatcaatagtgcaactgttttgatactgaatattgacaagtgtctttttgaaataaagaaccagtccctccaa

SEQ ID NO: 327112 - DNA, 1054 bp, Homo sapiens
tccagacacaccaaatatcggcataagtacgaggctcggtgtttatatcggacgagggtgagaggaggctgcaacgccgagcggaggaggcaggaaccggagcgcgagcagtagctgggtgggcaccatggctgggatcaccaccatcgaggcggtgaagcgcaagatccaggttctgcagcagcaggcagatgatgcagaggagcgagctgagcgcctccagcgagaagttgagggagaaaggcgggcccgggaacaggctgaggctgaggtggcctccttgaaccgtaggatccagctggttgaagaagagctggaccgtgctcaggagcgcctggccactgccctgcaaaagctggaagaagctgaaaaagctgctgatgagagtgagagaggtatgaaggttattgaaaaccgggccttaaaagatgaagaaaagatggaactccaggaaatccaactcaaagaagctaagcacattgcagaagaggcagataggaagtatgaagaggtggctcgtaagttggtgatcattgaaggagacttggaacgcacagaggaacgagctgagctggcagagtcccgttgccgagagatggatgagcagattagactgatggaccagaacctgaagtgtctgagtgctgctgaagaaaagtactctcaaaaagaagataaatatgaggaagaaatcaagattcttactgataaactcaaggaggcagagacccgtgctgagtttgctgagagatcggtagccaagctggaaaagacaattgatgacctggaagataaactgaaatgcaccaaagaggagcacctctgtacacaaaggatgctggaccagaccctgcttgacctgaatgagatgtagaacgccccagtcccaccctgctgctgctcctccctctgacccagactccgcctgaggccagcctgcgggaagctgacctttaactgagggctgatctttaactggaaggctgctttctcctttcaccaccccctcctttcgcagtctctaatcgaattcccgcgtgccgcatgggggccg

SEQ ID NO: 327113 - DNA, 1052 bp, Homo sapiens
  misc_feature (1038)..(1038): n is a, c, g, or t
  misc_feature (1041)..(1041): n is a, c, g, or t
tccagacacaccaaatatcggcataagtacgaggctcggtgtttatatcggacgagggtgagaggaggctgcaacgccgagcggaggaggcaggaaccggagcgcgagcagtagctgggtgggcaccatggctgggatcaccaccatcgaggcggtgaagcgcaagatccaggttctgcagcagcaggcagatgatgcagaggagcgagctgagcgcctccagcgagaagttgagggagaaaggcgggcccgggaacaggctgaggctgaggtggcctccttgaaccgtaggatccagctggttgaagaagagctggaccgtgctcaggagcgcctggccactgccctgcaaaagctggaagaagctgaaaaagctgctgatgagagtgagagaggtatgaaggttattgaaaaccgggccttaaaagatgaagaaaagatggaactccaggaaatccaactcaaagaagctaagcacattgcagaagaggcagataggaagtatgaagaggtggctcgtaagttggtgatcattgaaggagacttggaacgcacagaggaacgagctgagctggcagagtcccgttgccgagagatggatgagcagattagactgatggaccagaacctgaagtgtctgagtgctgctgaagaaaagtactctcaaaaagaagataaatatgaggaagaaatcaagattcttactgataaactcaaggaggcagagacccgtgctgagtttgctgagagatcggtagccaagctggaaaagacaattgatgacctggaagataaactgaaatgcaccaaagaggagcacctctgtacacaaaggatgctggaccagaccctgcttgacctgaatgagatgtagaacgccccagtcccaccctgctgctgctcctccctctgacccagactccgcctgaggccagcctgcgggaagctgacctttaactgagggctgatctttaactggaaggctgctttctcctttcaccaccccctccttgtgcctctgcctccttgtgcctctgnggntcctctagtca

SEQ ID NO: 327114 - DNA, 2001 bp, Homo sapiens
tccagacacaccaaatatcggcataagtacgaggctcggtgtttatatcggacgagggtgagaggaggctgcaacgccgagcggaggaggcaggaaccggagcgcgagcagtagctgggtgggcaccatggctgggatcaccaccatcgaggcggtgaagcgcaagatccaggttctgcagcagcaggcagatgatgcagaggagcgagctgagcgcctccagcgagaagttgagggagaaaggcgggcccgggaacaggctgaggctgaggtggcctccttgaaccgtaggatccagctggttgaagaagagctggaccgtgctcaggagcgcctggccactgccctgcaaaagctggaagaagctgaaaaagctgctgatgagagtgagagaggtatgaaggttattgaaaaccgggccttaaaagatgaagaaaagatggaactccaggaaatccaactcaaagaagctaagcacattgcagaagaggcagataggaagtatgaagaggtggctcgtaagttggtgatcattgaaggagacttggaacgcacagaggaacgagctgagctggcagagtctaagtgttctgagctggaggaggagctgaagaatgtcaccaacaacctcaagtctcttgaggctcaggcggagaagtactctcaaaaagaagataaatatgaggaagaaatcaagattcttactgataaactcaaggaggcagagacccgtgctgagtttgctgagagatcggtagccaagctggaaaagacaattgatgacctggaagataaactgaaatgcaccaaagaggagcacctctgtacacaaaggatgctggaccagaccctgcttgacctgaatgagatgtagaacgccccagtcccaccctgcctcttcccggagaatccagctgggctagaggctgagcacctttggaaacaacatttaagggaatgtgagcacaatgcataatgtctttaaaaagcatgttgtgatgtacacattttgtaattaccttttttgttgttttgtagcaaccatttgtaaaacattccaaataattccacagtcctgaagcagcaatcgaatccctttctcacttttggaaggtgacttttcaccttaatgcatattcccctctccatagaggagaggaaaaggtgtaggcctgccttaccgagagccaaacagagcccagggagactccgctgtgggaaacctcattgttctgtacaaagtactagctaaaccagaaaggtgattccaggaggagttagccaaacaacaacaaaaacaaaaaatgtgctgttcaagttttcagctttaagatatctttggataatgttatttctattttttatttttttcattagaagttaccaaattaagatggtaagacctctgagaccaaaattttgtcccatctctaccccctcacaactgcttacagaatggatcatgtcccccttatgttgaggtgaccacttaattgctttcctgcctccttgaaagaaagaaagaaagaagactgtgtttttgccactgatttagccatgtgaaactcatctcattacccttttctgggtttgaagctgctgtctctagaagtgccatctcaattgtgctttgtatcagtcagtgctggagaaatcttgaatagcttatgtacaaaactttttaaattttatattattttgaaactttgctttgggtttgtggcaccctggccaccccatctggctgtgacagcctctgcagtccgtgggctggcagtttgttgatcttttaagtttccttccctacccagtccccattttctggtaaggtttctaggaggtctgttaggtgtacatcctgcagcttattggcttaaaatgtactctccttttatgtggtctctttggggccgattgggagaaagagaaatcaatagtgcaactgttttgatactgaatattgacaagtgtctttttgaaataaagaaccagtccctccaa

SEQ ID NO: 327115 - DNA, 1693 bp, Homo sapiens
tccagacacaccaaatatcggcataagtacgaggctcggtgtttatatcggacgagggtgagaggaggctgcaacgccgagcggaggaggcaggaaccggagcgcgagcagtagctgggtgggcaccatggctgggatcaccaccatcgaggcggtgaagcgcaagatccaggttctgcagcagcaggcagatgatgcagaggagcgagctgagcgcctccagcgagaagttgagggagaaaggcgggcccgggaacaggctgaggctgaggtggcctccttgaaccgtaggatccagctggttgaagaagagctggaccgtgctcaggagcgcctggccactgccctgcaaaagctggaagaagctgaaaaagctgctgatgagagtgagagaggtatgaaggttattgaaaaccgggccttaaaagatgaagaaaagatggaactccaggaaatccaactcaaagaagctaagcacattgcagaagaggcagataggaagtatgaagagatctttaactggaaggctgctttctcctttcaccaccccctccttccctgtgtctttttcgccaaactgtctctgcctcttcccggagaatccagctgggctagaggctgagcacctttggaaacaacatttaagggaatgtgagcacaatgcataatgtctttaaaaagcatgttgtgatgtacacattttgtaattaccttttttgttgttttgtagcaaccatttgtaaaacattccaaataattccacagtcctgaagcagcaatcgaatccctttctcacttttggaaggtgacttttcaccttaatgcatattcccctctccatagaggagaggaaaaggtgtaggcctgccttaccgagagccaaacagagcccagggagactccgctgtgggaaacctcattgttctgtacaaagtactagctaaaccagaaaggtgattccaggaggagttagccaaacaacaacaaaaacaaaaaatgtgctgttcaagttttcagctttaagatatctttggataatgttatttctattttttatttttttcattagaagttaccaaattaagatggtaagacctctgagaccaaaattttgtcccatctctaccccctcacaactgcttacagaatggatcatgtcccccttatgttgaggtgaccacttaattgctttcctgcctccttgaaagaaagaaagaaagaagactgtgtttttgccactgatttagccatgtgaaactcatctcattacccttttctgggtttgaagctgctgtctctagaagtgccatctcaattgtgctttgtatcagtcagtgctggagaaatcttgaatagcttatgtacaaaactttttaaattttatattattttgaaactttgctttgggtttgtggcaccctggccaccccatctggctgtgacagcctctgcagtccgtgggctggcagtttgttgatcttttaagtttccttccctacccagtccccattttctggtaaggtttctaggaggtctgttaggtgtacatcctgcagcttattggcttaaaatgtactctccttttatgtggtctctttggggccgattgggagaaagagaaatcaatagtgcaactgttttgatactgaatattgacaagtgtctttttgaaataaagaaccagtccctccaa

SEQ ID NO: 327116 - DNA, 1211 bp, Homo sapiens
  misc_feature (73)..(73): n is a, c, g, or t
cttgtaacatgaggggacttggactttctttagaggctgggaaaagcgccttggcatatatctccattttacncccctgtgtctttttcgccaaactgtctctgcctcttcccggagaatccagctgggctagaggctgagcacctttggaaacaacatttaagggaatgtgagcacaatgcataatgtctttaaaaagcatgttgtgatgtacacattttgtaattaccttttttgttgttttgtagcaaccatttgtaaaacattccaaataattccacagtcctgaagcagcaatcgaatccctttctcacttttggaaggtgacttttcaccttaatgcatattcccctctccatagaggagaggaaaaggtgtaggcctgccttaccgagagccaaacagagcccagggagactccgctgtgggaaacctcattgttctgtacaaagtactagctaaaccagaaaggtgattccaggaggagttagccaaacaacaacaaaaacaaaaaatgtgctgttcaagttttcagctttaagatatctttggataatgttatttctattttttatttttttcattagaagttaccaaattaagatggtaagacctctgagaccaaaattttgtcccatctctaccccctcacaactgcttacagaatggatcatgtcccccttatgttgaggtgaccacttaattgctttcctgcctccttgaaagaaagaaagaaagaagactgtgtttttgccactgatttagccatgtgaaactcatctcattacccttttctgggtttgaagctgctgtctctagaagtgccatctcaattgtgctttgtatcagtcagtgctggagaaatcttgaatagcttatgtacaaaactttttaaattttatattattttgaaactttgctttgggtttgtggcaccctggccaccccatctggctgtgacagcctctgcagtccgtgggctggcagtttgttgatcttttaagtttccttccctacccagtccccattttctggtaaggtttctaggaggtctgttaggtgtacatcctgcagcttattggcttaaaatgtactctccttttatgtggtctctttggggccgattgggagaaagagaaatcaatagtgcaactgttttgatactgaatattgacaagtgtctttttgaaataaagaaccagtccctccaa

SEQ ID NO: 327117 - DNA, 1121 bp, Homo sapiens
tccagacacaccaaatatcggcataagtacgaggctcggtgtttatatcggacgagggtgagaggaggctgcaacgccgagcggaggaggcaggaaccggagcgcgagcagtagctgggtgggcaccatggctgggatcaccaccatcgaggcggtgaagcgcaagatccaggttctgcagcagcaggcagatgatgcagaggagcgagctgagcgcctccagcgagaagttgagggagaaaggcgggcccgggaacaggctgaggctgaggtggcctccttgaaccgtaggatccagctggttgaagaagagctggaccgtgctcaggagcgcctggccactgccctgcaaaagctggaagaagctgaaaaagctgctgatgagagtgagagaggtatgaaggttattgaaaaccgggccttaaaagatgaagaaaagatggaactccaggaaatccaactcaaagaagctaagcacattgcagaagaggcagataggaagtatgaagaggtggctcgtaagttggtgatcattgaaggagacttggaacgcacagaggaacgagctgagctggcagagtcccgttgccgagagatggatgagcagattagactgatggaccagaacctgaagtgtctgagtgctgctgaagaaaagtactctcaaaaagaagataaatatgaggaagaaatcaagattcttactgataaactcaaggaggcagagacccgtgctgagtttgctgagagatcggtagccaagctggaaaagacaattgatgacctggaagataaactgaaatgcaccaaagaggagcacctctgtacacaaaggatgctggaccagaccctgcttgacctatctttaactggaaggctgctttctcctttcaccaccccctccttcttttaagtttccttccctacccagtccccattttctggtaaggtttctaggaggtctgttaggtgtacatcctgcagcttattggcttaaaatgtactctccttttatgtggtctctttggggccgattgggagaaagagaaatcaatagtgcaactgttttgatactgaatattgacaagtgtctttttgaaataaagaaccagtccctccaa

SEQ ID NO: 327118 - DNA, 1511 bp, Homo sapiens
tccagacacaccaaatatcggcataagtacgaggctcggtgtttatatcggacgagggtgagaggaggctgcaacgccgagcggaggaggcaggaaccggagcgcgagcagtagctgggtgggcaccatggctgggatcaccaccatcgaggcggtgaagcgcaagatccaggttctgcagcagcaggcagatgatgcagaggagcgagctgagcgcctccagcgagaagttgagggagaaaggcgggcccgggaacaggctgaggctgaggtggcctccttgaaccgtaggatccagctggttgaagaagagctggaccgtgctcaggagcgcctggccactgccctgcaaaagctggaagaagctgaaaaagctgctgatgagagtgagagaggtatgaaggttattgaaaaccgggccttaaaagatgaagaaaagatggaactccaggaaatccaactcaaagaagctaagcacattgcagaagaggcagataggaagtatgaagaggtggctcgtaagttggtgatcattgaaggagacttggaacgcacagaggaacgagctgagctggcagagtcccgttgccgagagatggatgagcagattagactgatggaccagaacctgaagtgtctgagtgctgctgaagaaaagtactctcaaaaagaagataaatatgaggaagaaatcaagattcttactgataaactcaaggaggcagagacccgtgctgagtttgctgagagatcggtagccaagctggaaaagacaattgatgacctggaagatgagctctatgcccagaaactgaagtacaaggccattagcgaggagctggaccacgccctcaatgacatgacctctatagcgtctctacagccaacttgagcgaaaccgcctgctttctaatgagctgaagctaacgctgcatgatctgtgtgactgatgggcagggctcaatgatgcccattaaactgagcttactgctcacaccactgacctggaccccaacaaaaagctgattgtctttttaaaagttattattttgcccactgatttagccatgtgaaactcatctcattacccttttctgggtttgaagctgctgtctctagaagtgccatctcaattgtgctttgtatcagtcagtgctggagaaatcttgaatagcttatgtacaaaactttttaaattttatattattttgaaactttgctttgggtttgtggcaccctggccaccccatctggctgtgacagcctctgcagtccgtgggctggcagtttgttgatcttttaagtttccttccctacccagtccccattttctggtaaggtttctaggaggtctgttaggtgtacatcctgcagcttattggcttaaaatgtactctccttttatgtggtctctttggggccgattgggagaaagagaaatcaatagtgcaactgttttgatactgaatattgacaagtgtctttttgaaataaagaaccagtccctccaa

SEQ ID NO: 327119 - DNA, 1432 bp, Homo sapiens
tccagacacaccaaatatcggcataagtacgaggctcggtgtttatatcggacgagggtgagaggaggctgcaacgccgagcggaggaggcaggaaccggagcgcgagcagtagctgggtgggcaccatggctgggatcaccaccatcgaggcggtgaagcgcaagatccaggttctgcagcagcaggcagatgatgcagaggagcgagctgagcgcctccagcgagaagttgagggagaaaggcgggcccgggaacaggctgaggctgaggtggcctccttgaaccgtaggatccagctggttgaagaagagctggaccgtgctcaggagcgcctggccactgccctgcaaaagctggaagaagctgaaaaagctgctgatgagagtgagagaggtatgaaggttattgaaaaccgggccttaaaagatgaagaaaagatggaactccaggaaatccaactcaaagaagctaagcacattgcagaagaggcagataggaagtatgaagaggtggctcgtaagttggtgatcattgaaggagacttggaacgcacagaggaacgagctgagctggcagagtcccgttgccgagagatggatgagcagattagactgatggaccagaacctgaagtgtctgagtgctgctgaagaaaagtactctcaaaaagaagataaatatgaggaagaaatcaagattcttactgataaactcaaggaggcagagacccgtgctgagtttgctgagagatcggtagccaagctggaaaagacaattgatgacctggaagagcgtctctacagccaacttgagcgaaaccgcctgctttctaatgagctgaagctaacgctgcatgatctgtgtgactgatgggcagggctcaatgatgcccattaaactgagcttactgctcacaccactgacctggaccccaacaaaaagctgattgtctttttaaaagttattattttgcccactgatttagccatgtgaaactcatctcattacccttttctgggtttgaagctgctgtctctagaagtgccatctcaattgtgctttgtatcagtcagtgctggagaaatcttgaatagcttatgtacaaaactttttaaattttatattattttgaaactttgctttgggtttgtggcaccctggccaccccatctggctgtgacagcctctgcagtccgtgggctggcagtttgttgatcttttaagtttccttccctacccagtccccattttctggtaaggtttctaggaggtctgttaggtgtacatcctgcagcttattggcttaaaatgtactctccttttatgtggtctctttggggccgattgggagaaagagaaatcaatagtgcaactgttttgatactgaatattgacaagtgtctttttgaaataaagaaccagtccctccaa

SEQ ID NO: 327120 - DNA, 1069 bp, Homo sapiens
tccagacacaccaaatatcggcataagtacgaggctcggtgtttatatcggacgagggtgagaggaggctgcaacgccgagcggaggaggcaggaaccggagcgcgagcagtagctgggtgggcaccatggctgggatcaccaccatcgaggcggtgaagcgcaagatccaggttctgcagcagcaggcagatgatgcagaggagcgagctgagcgcctccagcgagaagttgagggagaaaggcgggcccgggaacaggctgaggctgaggtggcctccttgaaccgtaggatccagctggttgaagaagagctggaccgtgctcaggagcgcctggccactgccctgcaaaagctggaagaagctgaaaaagctgctgatgagagtgagagaggtatgaaggttattgaaaaccgggccttaaaagatgaagaaaagatggaactccaggaaatccaactcaaagaagctaagcacattgcagaagaggcagataggaagtatgaagaggtggctcgtaagttggtgatcattgaaggagacttggaacgcacagaggaacgagctgagctggcagagtcccgttgccgagagatggatgagcagattagactgatggaccagaacctgaagtgtctgagtgctgctgaagaaaagtactctcaaaaagaagataaatatgaggaagaaatcaagattcttactgataaactcaaggaggcagagacccgtgctgagtttgctgagagatcggtagccaagctggaaaagacaattgatgacctggaagatgagctctatgcccagaaactgaagtacaaggccattagcgaggagctggaccacgccctcaatgacatgacctctatataattatcaccgtttctgctctgttctggatctgccccctttactcctcggggaacccaaggccccactctcgctctggattccatttgggtcagcctggctggtccccaaggcattaggatgggggagcaaaaagcaacttatgtattttcttccacccccaccccaaattaaaatgttaagctgctggaaacctca

SEQ ID NO: 327121 - DNA, 2196 bp, Homo sapiens
tccagacacaccaaatatcggcataagtacgaggctcggtgtttatatcggacgagggtgagaggaggctgcaacgccgagcggaggaggcaggaaccggagcgcgagcagtagctgggtgggcaccatggctgggatcaccaccatcgaggcggtgaagcgcaagatccaggttctgcagcagcaggcagatgatgcagaggagcgagctgagcgcctccagcgagaagttgagggagaaaggcgggcccgggaacaggctgaggctgaggtggcctccttgaaccgtaggatccagctggttgaagaagagctggaccgtgctcaggagcgcctggccactgccctgcaaaagctggaagaagctgaaaaagctgctgatgagagtgagagaggtatgaaggttattgaaaaccgggccttaaaagatgaagaaaagatggaactccaggaaatccaactcaaagaagctaagcacattgcagaagaggcagataggaagtatgaagaggtggctcgtaagttggtgatcattgaaggagacttggaacgcacagaggaacgagctgagctggcagagtcccgttgccgagagatggatgagcagattagactgatggaccagaacctgaagtgtctgagtgctgctgaagaaaagtactctcaaaaagaagataaatatgaggaagaaatcaagattcttactgataaactcaaggaggcagagacccgtgctgagtttgctgagagatcggtagccaagctggaaaagacaattgatgacctggaagacactaacagcacatctggagacccggtggagaagaaggacgaaacaccttttggggtctcggtggctgtgggcctggccgtctttgcctgcctcttcctttctacgctgctccttgtgctcaacaaatgtggacggagaaacaagtttgggatcaaccgcccggctgtgctggctccagaggatgggctggccatgtccctgcatttcatgacattgggtggcagctccctgtcccccaccgagggcaaaggctctgggctccaaggccacatcatcgagaacccacaatacttcagtgatgcctgtgttcaccacatcaagcgccgggacatcgtgctcaagtgggagctgggggagggcgcctttgggaaggtcttccttgctgagtgccacaacctcctgcctgagcaggacaagatgctggtggctgtcaaggcactgaaggaggcgtccgagagtgctcggcaggacttccaacgtgaggctgagctgctcaccatgctgcagcaccagcacatcgtgcgcttcttcggcgtctgcaccgagggccgccccctgctcatggtcttcgagtatatgcggcacggggacctcaaccgcttcctccgatcccatggacccgatgccaagctgctggctggtggggaggatgtggctccaggccccctgggtctggggcagctgctggccgtggctagccaggtcgctgcggggatggtgtacctggcgggtctgcattttgtgcaccgggacctggccacacgcaactgtctagtgggccagggactggtggtcaagattggtgattttggcatgagcagggatatctacagcaccgactattaccgtgtgggaggccgcaccatgctgcccattcgctggatgccgcccgagagcatcctgtaccgtaagttcaccaccgagagcgacgtgtggagcttcggcgtggtgctctgggagatcttcacctacggcaagcagccctggtaccagctctccaacacggaggcaatcgactgcatcacgcagggacgtgagttggagcggccacgtgcctgcccaccagaggtctacgccatcatgcggggctgctggcagcgggagcccagcaacgccacagcatcaaggatgtgcacgcccggctgcaagccctggcctaggcacctcctgtctacctggatgtcctgggctagggggccggcccaggggctgggagtggttagccggaatactggggcctgccctcagcatcccccatagctcccagcagccccagggtgatctcgaagtatctaattcgccctcagcatgtgggaagggacaggtgggggctgggagtagaggatgttcctgcttctctaggcaaggtcccgtcgtagcaattatatttattatgggaattc

SEQ ID NO: 327122 - DNA, 1227 bp, Homo sapiens
tccagacacaccaaatatcggcataagtacgaggctcggtgtttatatcggacgagggtgagaggaggctgcaacgccgagcggaggaggcaggaaccggagcgcgagcagtagctgggtgggcaccatggctgggatcaccaccatcgaggcggtgaagcgcaagatccaggttctgcagcagcaggcagatgatgcagaggagcgagctgagcgcctccagcgagaagttgagggagaaaggcgggcccgggaacaggctgaggctgaggtggcctccttgaaccgtaggatccagctggttgaagaagagctggaccgtgctcaggagcgcctggccactgccctgcaaaagctggaagaagctgaaaaagctgctgatgagagtgagagaggtatgaaggttattgaaaaccgggccttaaaagatgaagaaaagatggaactccaggaaatccaactcaaagaagctaagcacattgcagaagaggcagataggaagtatgaagaggtggctcgtaagttggtgatcattgaaggagacttggaacgcacagaggaacgagctgagctggcagagtcccgttgccgagagatggatgagcagattagactgatggaccagaacctgaagtgtctgagtgctgctgaagaaaagtactctcaaaaagaagataaatatgaggaagaaatcaagattcttactgataaactcaaggaggcagagacccgtgctgagtttgctgagagatcggtagccaagctggaaaagacaattgatgacctggaagagcgtctctacagccaacttgagcgaaaccgcctgctttctaatgagctgaagctaacgctgcatgatctgtgtgactgatgggcagggctcaatgatgcccattaaactgagcttactgctcacaccactgacctggaccccaacaaaaagctgattgtctttttaaaagttattattttgccctgagcaaattgcattttaattggggcagttagaatgttgatttcctaacagcattgtgaagttgaccattgtgaagtttctgtccctttagaagagattatgggtgaagaagggaggggcctgagagattatagtgagaaaacttgcgagaattttgttttccacccttatttgctgctctttcacttgggcactgactgtaggatatgttcccttgcatggatgtttttaacaataaaaggactgacttg

SEQ ID NO: 327123 - DNA, 1410 bp, Homo sapiens
tccagacacaccaaatatcggcataagtacgaggctcggtgtttatatcggacgagggtgagaggaggctgcaacgccgagcggaggaggcaggaaccggagcgcgagcagtagctgggtgggcaccatggctgggatcaccaccatcgaggcggtgaagcgcaagatccaggttctgcagcagcaggcagatgatgcagaggagcgagctgagcgcctccagcgagaagttgagggagaaaggcgggcccgggaacaggctgaggctgaggtggcctccttgaaccgtaggatccagctggttgaagaagagctggaccgtgctcaggagcgcctggccactgccctgcaaaagctggaagaagctgaaaaagctgctgatgagagtgagagaggtatgaaggttattgaaaaccgggccttaaaagatgaagaaaagatggaactccaggaaatccaactcaaagaagctaagcacattgcagaagaggcagataggaagtatgaagaggtggctcgtaagttggtgatcattgaaggagacttggaacgcacagaggaacgagctgagctggcagagtcccgttgccgagagatggatgagcagattagactgatggaccagaacctgaagtgtctgagtgctgctgaagaaaagtactctcaaaaagaagataaatatgaggaagaaatcaagattcttactgataaactcaaggaggcagagacccgtgctgagtttgctgagagatcggtagccaagctggaaaagacaattgatgacctggaagatgagctctatgcccagaaactgaagtacaaggccattagcgaggagctggaccacgccctcaatgacatgacctctatataattatcaccgtttctgctctgttctggatctgccccctttactcctcggggaacccaaggccccactctcgctctggattccatttgggtcagcctggctggtccccaaggcattaggatgggggagcaaaaagcaacttatgtattttcttccacccccaccccaaattaaaatgttaagctgctggaaacctcatgccaccctgcatttgtgtcattgacaaagctgttgctgtccctaagaaggagccttgggggtgtgatgtggggaagagctattgtaggctccccctcctctgacttatgtaatcaaagccacttttgtgtgtgtctattttttcttgacatttaaactcagctgatctgattctaccagagtgatggatttagtacaggttactcaggatagtaattttagttatactcctcaagctgaacaagattaaattccttatttccaggttcttaaatcatcctgcctgcagtgtttccattctctcttcaggtattcctcctttggtgtggtgtcattgagaa

SEQ ID NO: 327124 - DNA, 1527 bp, Homo sapiens
tccagacacaccaaatatcggcataagtacgaggctcggtgtttatatcggacgagggtgagaggaggctgcaacgccgagcggaggaggcaggaaccggagcgcgagcagtagctgggtgggcaccatggctgggatcaccaccatcgaggcggtgaagcgcaagatccaggttctgcagcagcaggcagatgatgcagaggagcgagctgagcgcctccagcgagaagttgagggagaaaggcgggcccgggaacaggctgaggctgaggtggcctccttgaaccgtaggatccagctggttgaagaagagctggaccgtgctcaggagcgcctggccactgccctgcaaaagctggaagaagctgaaaaagctgctgatgagagtgagagaggtatgaaggttattgaaaaccgggccttaaaagatgaagaaaagatggaactccaggaaatccaactcaaagaagctaagcacattgcagaagaggcagataggaagtatgaagaggtggctcgtaagttggtgatcattgaaggagacttggaacgcacagaggaacgagctgagctggcagagtcccgttgccgagagatggatgagcagattagactgatggaccagaacctgaagtgtctgagtgctgctgaagaaaagtactctcaaaaagaagataaatatgaggaagaaatcaagattcttactgataaactcaaggaggcagagacccgtgctgagtttgctgagagatcggtagccaagctggaaaagacaattgatgacctggaagatgagctctatgcccagaaactgaagtacaaggccattagcgaggagctggaccacgccctcaatgacatgacctctatagcgtctctacagccaacttgagcgaaaccgcctgctttctaatgagctgaagctaacgctgcatgatctgtgtgactgatgggcagggctcaatgatgcccattaaactgagcttactgctcacaccactgacctggaccccaacaaaaagctgattgtctttttaaaagttattattttgccctgagcaaattgcattttaattggggcagttagaatgttgatttcctaacagcattgtgaagttgaccattgtgaagtttctgtccctttagaagagattatgggtgaagaagggaggggcctgagagattatagtgagaaaacttgcgagaattttgttttccacccttatttgctgctctttcacttgggcactgactgtaggatatgttcccttgcatggatgtttttaacaataaaaggactgacttgacaagttgttgtaactgcttcatcggcaggcccaggaatgggtccttctgactgggtggaaaaaagggaagtgaaagaaaagttgtgggatatgaatatgggtctgtgttgccatcaccttctctgagttgaagatttgagtattttcctcacctctttagagcagtcagagtggtttgcttgctagacagattagattctccttaatgttcagctgctga

SEQ ID NO: 327125 - DNA, 1306 bp, Homo sapiens
tccagacacaccaaatatcggcataagtacgaggctcggtgtttatatcggacgagggtgagaggaggctgcaacgccgagcggaggaggcaggaaccggagcgcgagcagtagctgggtgggcaccatggctgggatcaccaccatcgaggcggtgaagcgcaagatccaggttctgcagcagcaggcagatgatgcagaggagcgagctgagcgcctccagcgagaagttgagggagaaaggcgggcccgggaacaggctgaggctgaggtggcctccttgaaccgtaggatccagctggttgaagaagagctggaccgtgctcaggagcgcctggccactgccctgcaaaagctggaagaagctgaaaaagctgctgatgagagtgagagaggtatgaaggttattgaaaaccgggccttaaaagatgaagaaaagatggaactccaggaaatccaactcaaagaagctaagcacattgcagaagaggcagataggaagtatgaagaggtggctcgtaagttggtgatcattgaaggagacttggaacgcacagaggaacgagctgagctggcagagtcccgttgccgagagatggatgagcagattagactgatggaccagaacctgaagtgtctgagtgctgctgaagaaaagtactctcaaaaagaagataaatatgaggaagaaatcaagattcttactgataaactcaaggaggcagagacccgtgctgagtttgctgagagatcggtagccaagctggaaaagacaattgatgacctggaagatgagctctatgcccagaaactgaagtacaaggccattagcgaggagctggaccacgccctcaatgacatgacctctatagcgtctctacagccaacttgagcgaaaccgcctgctttctaatgagctgaagctaacgctgcatgatctgtgtgactgatgggcagggctcaatgatgcccattaaactgagcttactgctcacaccactgacctggaccccaacaaaaagctgattgtctttttaaaagttattattttgccctgagcaaattgcattttaattggggcagttagaatgttgatttcctaacagcattgtgaagttgaccattgtgaagtttctgtccctttagaagagattatgggtgaagaagggaggggcctgagagattatagtgagaaaacttgcgagaattttgttttccacccttatttgctgctctttcacttgggcactgactgtaggatatgttcccttgcatggatgtttttaacaataaaaggactgacttg

SEQ ID NO: 327126 - DNA, 1448 bp, Homo sapiens
tccagacacaccaaatatcggcataagtacgaggctcggtgtttatatcggacgagggtgagaggaggctgcaacgccgagcggaggaggcaggaaccggagcgcgagcagtagctgggtgggcaccatggctgggatcaccaccatcgaggcggtgaagcgcaagatccaggttctgcagcagcaggcagatgatgcagaggagcgagctgagcgcctccagcgagaagttgagggagaaaggcgggcccgggaacaggctgaggctgaggtggcctccttgaaccgtaggatccagctggttgaagaagagctggaccgtgctcaggagcgcctggccactgccctgcaaaagctggaagaagctgaaaaagctgctgatgagagtgagagaggtatgaaggttattgaaaaccgggccttaaaagatgaagaaaagatggaactccaggaaatccaactcaaagaagctaagcacattgcagaagaggcagataggaagtatgaagaggtggctcgtaagttggtgatcattgaaggagacttggaacgcacagaggaacgagctgagctggcagagtcccgttgccgagagatggatgagcagattagactgatggaccagaacctgaagtgtctgagtgctgctgaagaaaagtactctcaaaaagaagataaatatgaggaagaaatcaagattcttactgataaactcaaggaggcagagacccgtgctgagtttgctgagagatcggtagccaagctggaaaagacaattgatgacctggaagagcgtctctacagccaacttgagcgaaaccgcctgctttctaatgagctgaagctaacgctgcatgatctgtgtgactgatgggcagggctcaatgatgcccattaaactgagcttactgctcacaccactgacctggaccccaacaaaaagctgattgtctttttaaaagttattattttgccctgagcaaattgcattttaattggggcagttagaatgttgatttcctaacagcattgtgaagttgaccattgtgaagtttctgtccctttagaagagattatgggtgaagaagggaggggcctgagagattatagtgagaaaacttgcgagaattttgttttccacccttatttgctgctctttcacttgggcactgactgtaggatatgttcccttgcatggatgtttttaacaataaaaggactgacttgacaagttgttgtaactgcttcatcggcaggcccaggaatgggtccttctgactgggtggaaaaaagggaagtgaaagaaaagttgtgggatatgaatatgggtctgtgttgccatcaccttctctgagttgaagatttgagtattttcctcacctctttagagcagtcagagtggtttgcttgctagacagattagattctccttaatgttcagctgctga

SEQ ID NO: 327127 - DNA, 1176 bp, Homo sapiens
tccagacacaccaaatatcggcataagtacgaggctcggtgtttatatcggacgagggtgagaggaggctgcaacgccgagcggaggaggcaggaaccggagcgcgagcagtagctgggtgggcaccatggctgggatcaccaccatcgaggcggtgaagcgcaagatccaggttctgcagcagcaggcagatgatgcagaggagcgagctgagcgcctccagcgagaagttgagggagaaaggcgggcccgggaacaggctgaggctgaggtggcctccttgaaccgtaggatccagctggttgaagaagagctggaccgtgctcaggagcgcctggccactgccctgcaaaagctggaagaagctgaaaaagctgctgatgagagtgagagaggtatgaaggttattgaaaaccgggccttaaaagatgaagaaaagatggaactccaggaaatccaactcaaagaagctaagcacattgcagaagaggcagataggaagtatgaagaggtggctcgtaagttggtgatcattgaaggagacttggaacgcacagaggaacgagctgagctggcagagtcccgttgccgagagatggatgagcagattagactgatggaccagaacctgaagtgtctgagtgctgctgaagaaaaggtactaaccattaagcccacagcaagttgaaagaaagaaagaaagaagactgtgtttttgccactgatttagccatgtgaaactcatctcattacccttttctgggtttgaagctgctgtctctagaagtgccatctcaattgtgctttgtatcagtcagtgctggagaaatcttgaatagcttatgtacaaaactttttaaattttatattattttgaaactttgctttgggtttgtggcaccctggccaccccatctggctgtgacagcctctgcagtccgtgggctggcagtttgttgatcttttaagtttccttccctacccagtccccattttctggtaaggtttctaggaggtctgttaggtgtacatcctgcagcttattggcttaaaatgtactctccttttatgtggtctctttggggccgattgggagaaagagaaatcaatagtgcaactgttttgatactgaatattgacaagtgtctttttgaaataaagaaccagtccctccaa

SEQ ID NO: 327128 - DNA, 1079 bp, Homo sapiens
  misc_feature (845)..(845): n is a, c, g, or t
tccagacacaccaaatatcggcataagtacgaggctcggtgtttatatcggacgagggtgagaggaggctgcaacgccgagcggaggaggcaggaaccggagcgcgagcagtagctgggtgggcaccatggctgggatcaccaccatcgaggcggtgaagcgcaagatccaggttctgcagcagcaggcagatgatgcagaggagcgagctgagcgcctccagcgagaagttgagggagaaaggcgggcccgggaacaggctgaggctgaggtggcctccttgaaccgtaggatccagctggttgaagaagagctggaccgtgctcaggagcgcctggccactgccctgcaaaagctggaagaagctgaaaaagctgctgatgagagtgagagaggtatgaaggttattgaaaaccgggccttaaaagatgaagaaaagatggaactccaggaaatccaactcaaagaagctaagcacattgcagaagaggcagataggaagtatgaagaggtggctcgtaagttggtgatcattgaaggagacttggaacgcacagaggaacgagctgagctggcagagtcccgttgccgagagatggatgagcagattagactgatggaccagaacctgaagtgtctgagtgctgctgaagaaaagtactctcaaaaagaagataaatatgaggaagaaatcaagattcttactgataaactcaaggaggcagagacccgtgctgagtttgctgagagatcggtagccaagctggaaaagacaattgatgacctggaagataactgaattggcaagaagggcctctggtacaaggtggggacagactgtttgnctgaattgactcggtaaacggcccaagatcaaacccgtgtggatggactctcctctggccagattcgcgctggaggccagttgggtgaactggcctaaagagaggggggactaccacgggaaggggagcgcctttcacaagccctctttccacgggtatacgaccaaggtgtagcctcccggaacccacgggagacgagaccagagacgacacagagagagcagcgcgattatc

SEQ ID NO: 327129 - DNA, 879 bp, Homo sapiens
tccagacacaccaaatatcggcataagtacgaggctcggtgtttatatcggacgagggtgagaggaggctgcaacgccgagcggaggaggcaggaaccggagcgcgagcagtagctgggtgggcaccatggctgggatcaccaccatcgaggcggtgaagcgcaagatccaggttctgcagcagcaggcagatgatgcagaggagcgagctgagcgcctccagcgagaagttgagggagaaaggcgggcccgggaacaggctgaggctgaggtggcctccttgaaccgtaggatccagctggttgaagaagagctggaccgtgctcaggagcgcctggccactgccctgcaaaagctggaagaagctgaaaaagctgctgatgagagtgagagaggtatgaaggttattgaaaaccgggccttaaaagatgaagaaaagatggaactccaggaaatccaactcaaagaagctaagcacattgcagaagaggcagataggaagtatgaagaggtggctcgtaagttggtgatcattgaaggagacttggaacgcacagaggaacgagctgagctggcagagtcccgttgccgagagatggatgagcagattagactgatggaccagaacctgaagtgtctgagtgctgctgaagaaaagtactctcaaaaagaagataaatatgaggaagaaatcaagattcttactgataaactcaaggaggcagagacccgtgctgagtttgctgagagatcggtagccaagctggaaaagacaattgatgacctggaagtgtaccgccggaagcaccaggagctgcaagccatgcagatggagctgcagagccctgagtacaagctgagcaagctccgcacctcgac

SEQ ID NO: 327130 - DNA, 776 bp, Homo sapiens
  misc_feature (29)..(29): n is a, c, g, or t
  misc_feature (36)..(36): n is a, c, g, or t
  misc_feature (66)..(66): n is a, c, g, or t
gggatgtacgatacatttcccagaacagntagccanattcgattcagtcggaccgcggaaacgatntgcacaccaaaaaatgtgctgttcaagttttcagctttaagatatctttggataatgttatttctattttttatttttttcattagaagttaccaaattaagatggtaagacctctgagaccaaaattttgtcccatctctaccccctcacaactgcttacagaatggatcatgtcccccttatgttgaggtgaccacttaattgctttcctgcctccttgaaagaaagaaagaaagaagactgtgtttttgccactgatttagccatgtgaaactcatctcattacccttttctgggtttgaagctgctgtctctagaagtgccatctcaattgtgctttgtatcagtcagtgctggagaaatcttgaatagcttatgtacaaaactttttaaattttatattattttgaaactttgctttgggtttgtggcaccctggccaccccatctggctgtgacagcctctgcagtccgtgggctggcagtttgttgatcttttaagtttccttccctacccagtccccattttctggtaaggtttctaggaggtctgttaggtgtacatcctgcagcttattggcttaaaatgtactctccttttatgtggtctctttggggccgattgggagaaagagaaatcaatagtgcaactgttttgatactgaatattgacaagtgtctttttgaaataaagaaccagtccctccaa

SEQ ID NO: 327131 - DNA, 962 bp, Homo sapiens
tccagacacaccaaatatcggcataagtacgaggctcggtgtttatatcggacgagggtgagaggaggctgcaacgccgagcggaggaggcaggaaccggagcgcgagcagtagctgggtgggcaccatggctgggatcaccaccatcgaggcggtgaagcgcaagatccaggttctgcagcagcaggcagatgatgcagaggagcgagctgagcgcctccagcgagaagttgagggagaaaggcgggcccgggaacaggctgaggctgaggtggcctccttgaaccgtaggatccagctggttgaagaagagctggaccgtgctcaggagcgcctggccactgccctgcaaaagctggaagaagctgaaaaagctgctgatgagagtgagagaggtatgaaggttattgaaaaccgggccttaaaagatgaagaaaagatggaactccaggaaatccaactcaaagaagttgaaagaaagaaagaaagaagactgtgtttttgccactgatttagccatgtgaaactcatctcattacccttttctgggtttgaagctgctgtctctagaagtgccatctcaattgtgctttgtatcagtcagtgctggagaaatcttgaatagcttatgtacaaaactttttaaattttatattattttgaaactttgctttgggtttgtggcaccctggccaccccatctggctgtgacagcctctgcagtccgtgggctggcagtttgttgatcttttaagtttccttccctacccagtccccattttctggtaaggtttctaggaggtctgttaggtgtacatcctgcagcttattggcttaaaatgtactctccttttatgtggtctctttggggccgattgggagaaagagaaatcaatagtgcaactgttttgatactgaatattgacaagtgtctttttgaaataaagaaccagtccctccaa

SEQ ID NO: 327132 - DNA, 1069 bp, Homo sapiens
tccagacacaccaaatatcggcataagtacgaggctcggtgtttatatcggacgagggtgagaggaggctgcaacgccgagcggaggaggcaggaaccggagcgcgagcagtagctgggtgggcaccatggctgggatcaccaccatcgaggcggtgaagcgcaagatccaggttctgcagcagcaggcagatgatgcagaggagcgagctgagcgcctccagcgagaagttgagggagaaaggcgggcccgggaacaggctgaggctgaggtggcctccttgaaccgtaggatccagctggttgaagaagagctggaccgtgctcaggagcgcctggccactgccctgcaaaagctggaagaagctgaaaaagctgctgatgagagtgagagaggtatgaaggttattgaaaaccgggccttaaaagatgaagaaaagatggaactccaggaaatccaactcaaagaagctaagcacattgcagaagaggcagataggaagtatgaagaggtggctcgtaagttggtgatcattgaaggagacttggaacgcacagaggaacgagctgagctggcagagtctaagtgttctgagctggaggaggagctgaagaatgtcaccaacaacctcaagtctcttgaggctcaggcggagaagtactctcaaaaagaagataaatatgaggaagaaatcaagattcttactgataaactcaaggaggcagagacccgtgctgagtttgctgagagatcggtagccaagctggaaaagacaattgatgacctggaagatgagctctatgcccagaaactgaagtacaaggccattagcgaggagctggaccacgccctcaatgacatgacctctatataattatcaccgtttctgctctgttctggatctgccccctttactcctcggggaacccaaggccccactctcgctctggattccatttgggtcagcctggctggtccccaaggcattaggatgggggagcaaaaagcaacttatgtattttcttccacccccaccccaaattaaaatgttaagctgctggaaacctca

SEQ ID NO: 327133 - DNA, 807 bp, Homo sapiens
  misc_feature (748)..(748): n is a, c, g, or t
tccagacacaccaaatatcggcataagtacgaggctcggtgtttatatcggacgagggtgagaggaggctgcaacgccgagcggaggaggcaggaaccggagcgcgagcagtagctgggtgggcaccatggctgggatcaccaccatcgaggcggtgaagcgcaagatccaggttctgcagcagcaggcagatgatgcagaggagcgagctgagcgcctccagcgagaagttgagggagaaaggcgggcccgggaacaggctgaggctgaggtggcctccttgaaccgtaggatccagctggttgaagaagagctggaccgtgctcaggagcgcctggccactgccctgcaaaagctggaagaagctgaaaaagctgctgatgagagtgagagaggtatgaaggttattgaaaaccgggccttaaaagatgaagaaaagatggaactccaggaaatccaactcaaagaagctaagcacattgcagaagaggcagataggaagtatgaagaggtggctcgtaagttggtgatcattgaaggagacttggaacgcacagaggaacgagctgagctggcagagtcccgttgccgagagatggatgagcagattagactgatggaccagaacctgaagtgtctgagtgctgctgaagaaaagtactctcaaaaagaagataaatatgaggaagaaatcaagaatcggtgccgattcttatagaaacgcctcttgcattcatcactgatgtgntcagcaaagacagtcttgaaggtccggagcctcgaggggtttccacgtagcccacagca

SEQ ID NO: 327134 - DNA, 1410 bp, Homo sapiens
tccagacacaccaaatatcggcataagtacgaggctcggtgtttatatcggacgagggtgagaggaggctgcaacgccgagcggaggaggcaggaaccggagcgcgagcagtagctgggtgggcaccatggctgggatcaccaccatcgaggcggtgaagcgcaagatccaggttctgcagcagcaggcagatgatgcagaggagcgagctgagcgcctccagcgagaagttgagggagaaaggcgggcccgggaacaggctgaggctgaggtggcctccttgaaccgtaggatccagctggttgaagaagagctggaccgtgctcaggagcgcctggccactgccctgcaaaagctggaagaagctgaaaaagctgctgatgagagtgagagaggtatgaaggttattgaaaaccgggccttaaaagatgaagaaaagatggaactccaggaaatccaactcaaagaagctaagcacattgcagaagaggcagataggaagtatgaagaggtggctcgtaagttggtgatcattgaaggagacttggaacgcacagaggaacgagctgagctggcagagtctaagtgttctgagctggaggaggagctgaagaatgtcaccaacaacctcaagtctcttgaggctcaggcggagaagtactctcaaaaagaagataaatatgaggaagaaatcaagattcttactgataaactcaaggaggcagagacccgtgctgagtttgctgagagatcggtagccaagctggaaaagacaattgatgacctggaagatgagctctatgcccagaaactgaagtacaaggccattagcgaggagctggaccacgccctcaatgacatgacctctatataattatcaccgtttctgctctgttctggatctgccccctttactcctcggggaacccaaggccccactctcgctctggattccatttgggtcagcctggctggtccccaaggcattaggatgggggagcaaaaagcaacttatgtattttcttccacccccaccccaaattaaaatgttaagctgctggaaacctcatgccaccctgcatttgtgtcattgacaaagctgttgctgtccctaagaaggagccttgggggtgtgatgtggggaagagctattgtaggctccccctcctctgacttatgtaatcaaagccacttttgtgtgtgtctattttttcttgacatttaaactcagctgatctgattctaccagagtgatggatttagtacaggttactcaggatagtaattttagttatactcctcaagctgaacaagattaaattccttatttccaggttcttaaatcatcctgcctgcagtgtttccattctctcttcaggtattcctcctttggtgtggtgtcattgagaa

SEQ ID NO: 327135 - DNA, 1448 bp, Homo sapiens
tccagacacaccaaatatcggcataagtacgaggctcggtgtttatatcggacgagggtgagaggaggctgcaacgccgagcggaggaggcaggaaccggagcgcgagcagtagctgggtgggcaccatggctgggatcaccaccatcgaggcggtgaagcgcaagatccaggttctgcagcagcaggcagatgatgcagaggagcgagctgagcgcctccagcgagaagttgagggagaaaggcgggcccgggaacaggctgaggctgaggtggcctccttgaaccgtaggatccagctggttgaagaagagctggaccgtgctcaggagcgcctggccactgccctgcaaaagctggaagaagctgaaaaagctgctgatgagagtgagagaggtatgaaggttattgaaaaccgggccttaaaagatgaagaaaagatggaactccaggaaatccaactcaaagaagctaagcacattgcagaagaggcagataggaagtatgaagaggtggctcgtaagttggtgatcattgaaggagacttggaacgcacagaggaacgagctgagctggcagagtctaagtgttctgagctggaggaggagctgaagaatgtcaccaacaacctcaagtctcttgaggctcaggcggagaagtactctcaaaaagaagataaatatgaggaagaaatcaagattcttactgataaactcaaggaggcagagacccgtgctgagtttgctgagagatcggtagccaagctggaaaagacaattgatgacctggaagagcgtctctacagccaacttgagcgaaaccgcctgctttctaatgagctgaagctaacgctgcatgatctgtgtgactgatgggcagggctcaatgatgcccattaaactgagcttactgctcacaccactgacctggaccccaacaaaaagctgattgtctttttaaaagttattattttgccctgagcaaattgcattttaattggggcagttagaatgttgatttcctaacagcattgtgaagttgaccattgtgaagtttctgtccctttagaagagattatgggtgaagaagggaggggcctgagagattatagtgagaaaacttgcgagaattttgttttccacccttatttgctgctctttcacttgggcactgactgtaggatatgttcccttgcatggatgtttttaacaataaaaggactgacttgacaagttgttgtaactgcttcatcggcaggcccaggaatgggtccttctgactgggtggaaaaaagggaagtgaaagaaaagttgtgggatatgaatatgggtctgtgttgccatcaccttctctgagttgaagatttgagtattttcctcacctctttagagcagtcagagtggtttgcttgctagacagattagattctccttaatgttcagctgctga

SEQ ID NO: 327136 - DNA, 1375 bp, Homo sapiens
tccagacacaccaaatatcggcataagtacgaggctcggtgtttatatcggacgagggtgagaggaggctgcaacgccgagcggaggaggcaggaaccggagcgcgagcagtagctgggtgggcaccatggctgggatcaccaccatcgaggcggtgaagcgcaagatccaggttctgcagcagcaggcagatgatgcagaggagcgagctgagcgcctccagcgagaagttgagggagaaaggcgggcccgggaacaggctgaggctgaggtggcctccttgaaccgtaggatccagctggttgaagaagagctggaccgtgctcaggagcgcctggccactgccctgcaaaagctggaagaagctgaaaaagctgctgatgagagtgagagaggtatgaaggttattgaaaaccgggccttaaaagatgaagaaaagatggaactccaggaaatccaactcaaagaagctaagcacattgcagaagaggcagataggaagtatgaagaggtggctcgtaagttggtgatcattgaaggagacttggaacgcacagaggaacgagctgagctggcagagtctaagtgttctgagctggaggaggagctgaagaatgtcaccaacaacctcaagtctcttgaggctcaggcggagaagtactctcaaaaagaagataaatatgaggaagaaatcaagattcttactgataaactcaaggaggcagagacccgtgctgagtttgctgagagatcggtagccaagctggaaaagacaattgatgacctggaagatggtggatccaaagtaactggatacatcgttgaatataaagaagaaggaaaagaagaatgggaaaagggtaacgataacgaagtgagaggaacaaagcttgttgtgacaggattaaaggaaggagcattctacaaatttagagttagagcagtcaacattgtggcattggagaacctggagaggtcacagatgtcattgaaatgaaggacagactgtgtcacctgaccttcagttagattgccagtgttcagaacatagaatctgtttgtccatgcctggaggggtgatcccgaatcatgtgctaatgtgtctggaaagcctcctccaaaccgtccccctggaccatggaatgaaagaccttaactccaaagaagcaccattgagacccaagcattagtcattccaggcattcaagaaattggcagaggaagcatcaggggtcaatctcttcttgccaaaaatgtaagccggggaaagaacgaagaccactttgtgtctcgtttagatgtccacgcgcacgggaacctctctgtctcacactaacacggtcctcgacggcatgtttcccaaaatgagcgccac

SEQ ID NO: 327137 - DNA, 785 bp, Homo sapiens
tccagacacaccaaatatcggcataagtacgaggctcggtgtttatatcggacgagggtgagaggaggctgcaacgccgagcggaggaggcaggaaccggagcgcgagcagtagctgggtgggcaccatggctgggatcaccaccatcgaggcggtgaagcgcaagatccaggttctgcagcagcaggcagatgatgcagaggagcgagctgagcgcctccagcgagaagttgagggagaaaggcgggcccgggaacaggctgaggctgaggtggcctccttgaaccgtaggatccagctggttgaagaagagctggaccgtgctcaggagcgcctggccactgccctgcaaaagctggaagaagctgaaaaagctgctgatgagagtgagagaggtatgaaggttattgaaaaccgggccttaaaagatgaagaaaatcttgaatagcttatgtacaaaactttttaaattttatattattttgaaactttgctttgggtttgtggcaccctggccaccccatctggctgtgacagcctctgcagtccgtgggctggcagtttgttgatcttttaagtttccttccctacccagtccccattttctggtaaggtttctaggaggtctgttaggtgtacatcctgcagcttattggcttaaaatgtactctccttttatgtggtctctttggggccgattgggagaaagagaaatcaatagtgcaactgttttgatactgaatattgacaagtgtctttttgaaataaagaaccagtccctccaa

SEQ ID NO: 327138 - DNA, 1063 bp, Homo sapiens
tccagacacaccaaatatcggcataagtacgaggctcggtgtttatatcggacgagggtgagaggaggctgcaacgccgagcggaggaggcaggaaccggagcgcgagcagtagctgggtgggcaccatggctgggatcaccaccatcgaggcggtgaagcgcaagatccaggttctgcagcagcaggcagatgatgcagaggagcgagctgagcgcctccagcgagaagttgagggagaaaggcgggcccgggaacaggctgaggctgaggtggcctccttgaaccgtaggatccagctggttgaagaagagctggaccgtgctcaggagcgcctggccactgccctgcaaaagctggaagaagctgaaaaagctgctgatgagagtgagagaggtatgaaggttattgaaaaccgggccttaaaagatgaagaaaagatggaactccaggaaatccaactcaaagaagctaagcacattgcagaagaggcagataggaagtatgaagaggtggctcgtaagttggtgatcattgaaggagacttggaacgcacagaggaacgagctgagctggcagagtcgtgagtatctagctccccaaatcttgtcattaccaatttatcccttcccctttggcttgggcactaatatgaataaattagcattccttcaaccttgttaaacagggcctagggaatgggagtcatctatagtgcttttttaggcccaagaatggttttaggcttccttattctcctgactagtgacaagtgacaaaagaggctttcttattttttgttggtagggtttacaaattgagagcaaataaggactaatacatggtgaacagttaattggaagatcctactgggtccttccacctggggtggaagacatcaaagtggctatcctgatttaagatctagtgtctggctgggtgtggtggctcaaacctgtagtcccagctacttagtatgccaaggcaggaaggttgcttgaacccaggagttggaggccagcctgggcgtcatagggagaccctgtccctaaaacaaataaatt

SEQ ID NO: 327139 - DNA, 464 bp, Homo sapiens
  misc_feature (83)..(83): n is a, c, g, or t
tgtgaagaggctggagcaagggatataccttggggaaggggattgggtccagatgaaaagggctttgagtgtggggcagcagnaggaggacgtcctccttgctgctcctccctctgacccagactccgcctgaggccagcctgcgggaagctgacctttaactgagggctgatctttaactggaaggctgctttctcctttcaccaccccctccttccctgtgtctttttcgccaaactgtctctgcctcttcccggagaatccagctgggctagaggctgagcacctttggaaacaacatttaagggaatgtgagcacaatgcataatgtctttaaaaagcatgttgtgatgtacacattttgtaattaccttttttgttgttttgtagcaaccatttgtaaaacattccaaataattccacagtcctgaagcagcaatcgggaggaggacggggatcctcta

SEQ ID NO: 327140 - DNA, 509 bp, Homo sapiens
tccagacacaccaaatatcggcataagtacgaggctcggtgtttatatcggacgagggtgagaggaggctgcaacgccgagcggaggaggcaggaaccggagcgcgagcagtagctgggtgggcaccatggctgggatcaccaccatcgaggcggtgaagcgcaagatccaggttctgcagcagcaggcagatgatgcagaggagcgagctgagcgcctccagcgagaagttgagggagaaaggcgggcccgggaacaggtacggagatggtgaggctcatgagggaggggcaggcgctggagtatccggcaagcggaataaggtcccttttgccgtggagcacggtcctctgaaggccggcgggctcggagatgaagttgggatctcggaggatgggtggggctcagcaccagtaggacaccaagcggacgagggggaaacagtgctcgggcgagcaggcttgacctttgaagaaattgagccttacggggtttggggtgtggctttc

SEQ ID NO: 327141 - DNA, 223 bp, Homo sapiens
aaaatactcattcaacccctctcccctttgttagctttcccaagtcagaaagtaccctcagagatatgcataagaacaagaaacaggagagggaaggttgtggccaggagcaagcaagaagaaaggtttctttcctcaaagctagagtcagcaaactaccacctgtgggttaaatcttgcaacagcctggttttgtaaataaagttttatcggaacacagtca

SEQ ID NO: 327142 - DNA, 378 bp, Homo sapiens
gagtatcaagaaaggaagttggtcataggagagagtagatctgaaaatgtccagtcatggttgccagagtagatattttcctaactgtggtattagacccacagtcacactttcctaatttctaatgattccctctcttcatctgcttctgaaacccttcactctgtcccctcattcctccctgtggttcctgtgcctgtccagatgagctctatgcccagaaactgaagtacaaggccattagcgaggagctggaccacgccctcaatgacatgacctctattaactatctgacagtagagtggggctgggatcttggcttgtgggtggatgggggtacaagctatgcatagtggtgtgctttggttttatcctttg

SEQ ID NO: 327143 - DNA, 597 bp, Homo sapiens
ccctctcttcatctgcttctgaaacccttcactctgtcccctcattcctccctgtggttcctgtgcctgtccagatgagctctatgcccagaaactgaagtacaaggccattagcgaggagctggaccacgccctcaatgacatgacctctattaactatctgacagtagagtggggctgggatcttggcttgtgggtggatgggggtacaagctatgcatagtggtgtgctttggttttatcctttggaaactagaatctccacccttatctttgaaacattggtgctggttatttgtttggcaaaagctttggaggcatggccgggcgcggtggctcacgcctgtaatcccagcactttgggaggccgaggcaggtggatcacgtgaggtcaggagttggagaccagcctggccaacatggtgaaaccccgtctctactaaaaatacaaaaagtagccaggcatggtggcagtgcacctgtaatcctagctactcaggaggctgagccaggagaatcgcttgaatctgggaggcagaggttacagtgagccaagatgtgccactgcatttcagcctgggcaacagagtgagaccc

SEQ ID NO: 327144 - DNA, 1924 bp, Homo sapiens
gtccaatgccccccacatccctgtgcacctgggtgccatgcaggagacggtgcagttccagattcagcacctgggggccgatctccaccctggcgacgtgctactgagcaaccatcccagtgccgggggcagccacctgccagacctgactgttatcacaccggtgaggggtgctgcccgcctgcctctgctggggcagtggtggccgatgcagctgaccgtggctctccacccgctaggtgttttggccgggtcagacgcggcctgtgttctatgtggccagccgagggcaccacgcagacatcgggggcatcacaccaggctccatgcccccccactccaccatgctgcaacaggagggtgccgtctttctgtccttcaaacttgtccaggggggcgtcttccaggaggaggcggtgacggaggccctgcgggcgccaggcaaggtccccaactgcagcggaaccagaaacctgcacgacacctggaagataaactgaaatgcaccaaagaggagcacctctgtacacaaaggatgctggaccagaccctgcttgacctgaatgagatgtagaacgccccagtcccaccctgctgctgctcctccctctgacccagactccgcctgaggccagcctgcgggaagctgacctttaactgagggctgatctttaactggaaggctgctttctcctttcaccaccccctccttccctgtgtctttttcgccaaactgtctctgcctcttcccggagaatccagctgggctagaggctgagcacctttggaaacaacatttaagggaatgtgagcacaatgcataatgtctttaaaaagcatgttgtgatgtacacattttgtaattaccttttttgttgttttgtagcaaccatttgtaaaacattcaaaaaaaaaaaaaaaaaaaaaaaaaaaaaaaaaaaaaaaaaaaaaaaactcgagggggggcccggtaccaggtaatctactgcctgcgctgtctggtgggccgcgacatcccactcaaccagggctgcctggcgccagtgcgcgtggtcattccccgaggctccatcctggacccgtcgcccgaggcggcggtggtgggcggcaacgtgctcacgtcgcagcgcgtggtggatgtcatcctgggggcctttggggcctgcgccgcctcccaggtgcgggggcggggtgggcgcagctcgggggcggactgggtgggcaggctggagtaggagcgggagggcgaggtggggacgccctgccccagcccagcgcagcgaccaggtgccctcaccagggctgcatgaacaacgtgaccctgggcaacgcccacatgggctactacgagacggtggcgggcggcgcgggcgcgggtcccagctggcacgggcgcagcggtgtgcacagccacatgaccaacacacgcatcaccgaccctgagatcctggagagccggtacccggtcatcctgcgccgcttcgagctgcggcggggctcggggggcagaggccgcttccgaggcggcgacggcgtcacccgcgagctgctctttcgtgaggaggcgctgctgtcagtgctgaccgagcgccgcgccttccggccatacgggctccacgggggcgagcctggcgcccgcggcctaaacctgctgatccgcaaaaacggccggacggtgaatctgggcggcaagacgtcggtgaccgtgtaccccggggatgtgttctgtctccacacgcccggcggcggtggctatggggacccggaggaccccgccccaccgccggggtcgcccccgcaagcactggcctttcccgagcacggcagcgtctatgagtatcgccgggcccagaaggccgtgtgaggatcccgcaataaaaatgccttaagtctcccggttctggggacgcagctacggcgcctt

SEQ ID NO: 327145 - DNA, 1070 bp, Homo sapiens
  misc_feature (836)..(836): n is a, c, g, or t
ccaccccgcacaacaaacgctcccaaatcgcgccgctatggtaattcgacggtcccgtgggtttacgccgagcggaggaggcaggaaccggagcgcgagcagtagctgggtgggcaccatggctgggatcaccaccatcgaggcggtgaagcgcaagatccaggttctgcagcagcaggcagatgatgcagaggagcgagctgagcgcctccagcgagaagttgagggagaaaggcgggcccgggaacaggctgaggctgaggtggcctccttgaaccgtaggatccagctggttgaagaagagctggaccgtgctcaggagcgcctggccactgccctgcaaaagctggaagaagctgaaaaagctgctgatgagagtgagagaggtatgaaggttattgaaaaccgggccttaaaagatgaagaaaagatggaactccaggaaatccaactcaaagaagctaagcacattgcagaagaggcagataggaagtatgaagaggtggctcgtaagttggtgatcattgaaggagacttggaacgcacagaggaacgagctgagctggcagagtcccgttgccgagagatggatgagcagattagactgatggaccagaacctgaagtgtctgagtgctgctgaagaaaagtactctcaaaaagaagataaatatgaggaagaaatcaagattcttactgataaactcaaggaggcagagacccgtgctgagtttgctgagagatcggtagccaagctggaaaagacaattgatgacctggaagataactgaattggcaagaagggcctctggtacaaggtggggacagactgtttgnctgaattgactcggtaaacggcccaagatcaaacccgtgtggatggactctcctctggccagattcgcgctggaggccagttgggtgaactggcctaaagagaggggggactaccacgggaaggggagcgcctttcacaagccctctttccacgggtatacgaccaaggtgtagcctcccggaacccacgggagacgagaccagagacgacacagagagagcagcgcgattatc

SEQ ID NO: 327146 - DNA, 2254 bp, Homo sapiens
tccagacacaccaaatatcggcataagtacgaggctcggtgtttatatcggacgagggtgagaggaggctgcaacgccgagcggaggaggcaggaaccggagcgcgagcagtagctgggtgggcaccatggctgggatcaccaccatcgaggcggtgaagcgcaagatccaggttctgcagcagcaggcagatgatgcagaggagcgagctgagcgcctccagcgagaagttgagggagaaaggcgggcccgggaacaggtacggagatggtgaggctcatgagggaggggcaggcgctggagtatccggcaagcggaataaggtcccttttgccgtggagcacggtcctctgaaggccggcgggctcggagatgaagttgggatctcggaggatgggctgaggctgaggtggcctccttgaaccgtaggatccagctggttgaagaagagctggaccgtctggaagaagctgaaaaagctgctgatgagagtgagagaggtatgaaggttattgaaaaccgggccttaaaagatgaagaaaagatggaactccaggaaatccaactcaaagaagctaagcacattgcagaagaggcagataggaagtatgaagaggtggctcgtaagttggtgatcattgaaggagacttggaacgcacagaggaacgagctgagctggcagagtcccgttgccgagagatggatgagcagattagactgatggaccagaacctgaagtgtctgagtgctgctgaagaaaagtactctcaaaaagaagataaatatgaggaagaaatcaagattcttactgataaactcaaggaggcagagacccgtgctgagtttgctgagagatcggtagccaagctggaaaagacaattgatgacctggaagataaactgaaatgcaccaaagaggagcacctctgtacacaaaggatgctggaccagaccctgcttgacctgaatgagatgtagaacgccccagtcccaccctgctgctgctcctccctctgacccagactccgcctgaggccagcctgcgggaagctgacctttaactgagggctgatctttaactggaaggctgctttctcctttcaccaccccctccttccctgtgtctttttcgccaaactgtctctgcctcttcccggagaatccagctgggctagaggctgagcacctttggaaacaacatttaagggaatgtgagcacaatgcataatgtctttaaaaagcatgttgtgatgtacacattttgtaattaccttttttgttgttttgtagcaaccatttgtaaaacattccaaataattccacagtcctgaagcagcaatcgaatccctttctcacttttggaaggtgacttttcaccttaatgcatattcccctctccatagaggagaggaaaaggtgtaggcctgccttaccgagagccaaacagagcccagggagactccgctgtgggaaacctcattgttctgtacaaagtactagctaaaccagaaaggtgattccaggaggagttagccaaacaacaacaaaaacaaaaaatgtgctgttcaagttttcagctttaagatatctttggataatgttatttctattttttatttttttcattagaagttaccaaattaagatggtaagacctctgagaccaaaattttgtcccatctctaccccctcacaactgcttacagaatggatcatgtcccccttatgttgaggtgaccacttaattgctttcctgcctccttgaaagaaagaaagaaagaagactgtgtttttgccactgatttagccatgtgaaactcatctcattacccttttctgggtttgaagctgctgtctctagaagtgccatctcaattgtgctttgtatcagtcagtgctggagaaatcttgaatagcttatgtacaaaactttttaaattttatattattttgaaactttgctttgggtttgtggcaccctggccaccccatctggctgtgacagcctctgcagtccgtgggctggcagtttgttgatcttttaagtttccttccctacccagtccccattttctggtaaggtttctaggaggtctgttaggtgtacatcctgcagcttattggcttaaaatgtactctccttttatgtggtctctttggggccgattgggagaaagagaaatcaatagtgcaactgttttgatactgaatattgacaagtgtctttttgaaataaagaaccagtccctccaa

SEQ ID NO: 327147 - DNA, 1568 bp, Homo sapiens
actccacccggtggctactcgtccacggttggctactagtccacggttggctactagtccacggttggctgaagaaatactctcaaaaagaagataaatatgaggaagaaatcaagattcttactgataaactcaaggaggcagagacccgtgctgagtttgctgagagatcggtagccaagctggaaaagacaattgatgacctggaagataaactgaaatgcaccaaagaggagcacctctgtacacaaaggatgctggaccagaccctgcttgacctgaatgagatgtagaacgccccagtcccaccctgctgctgctcctccctctgacccagactccgcctgaggccagcctgcgggaagctgacctttaactgagggctgatctttaactggaaggctgctttctcctttcaccaccccctccttccctgtgtctttttcgccaaactgtctctgcctcttcccggagaatccagctgggctagaggctgagcacctttggaaacaacatttaagggaatgtgagcacaatgcataatgtctttaaaaagcatgttgtgatgtacacattttgtaattaccttttttgttgttttgtagcaaccatttgtaaaacattccaaataattccacagtcctgaagcagcaatcgaatccctttctcacttttggaaggtgacttttcaccttaatgcatattcccctctccatagaggagaggaaaaggtgtaggcctgccttaccgagagccaaacagagcccagggagactccgctgtgggaaacctcattgttctgtacaaagtactagctaaaccagaaaggtgattccaggaggagttagccaaacaacaacaaaaacaaaaaatgtgctgttcaagttttcagctttaagatatctttggataatgttatttctattttttatttttttcattagaagttaccaaattaagatggtaagacctctgagaccaaaattttgtcccatctctaccccctcacaactgcttacagaatggatcatgtcccccttatgttgaggtgaccacttaattgctttcctgcctccttgaaagaaagaaagaaagaagactgtgtttttgccactgatttagccatgtgaaactcatctcattacccttttctgggtttgaagctgctgtctctagaagtgccatctcaattgtgctttgtatcagtcagtgctggagaaatcttgaatagcttatgtacaaaactttttaaattttatattattttgaaactttgctttgggtttgtggcaccctggccaccccatctggctgtgacagcctctgcagtccgtgggctggcagtttgttgatcttttaagtttccttccctacccagtccccattttctggtaaggtttctaggaggtctgttaggtgtacatcctgcagcttattggcttaaaatgtactctccttttatgtggtctctttggggccgattgggagaaagagaaatcaatagtgcaactgttttgatactgaatattgacaagtgtctttttgaaataaagaaccagtccctccaa

SEQ ID NO: 327148 - DNA, 1353 bp, Homo sapiens
tccagacacaccaaatatcggcataagtacgaggctcggtgtttatatcggacgagggtgagaggaggctgcaacgccgagcggaggaggcaggaaccggagcgcgagcagtagctgggtgggcaccatggctgggatcaccatgtccctgcatttcatgacattgggtggcagctccctgtcccccaccgagggcaaaggctctgggctccaaggccacatcatcgagaacccacaatacttcagtgatgcctgtgttcaccacatcaagcgccgggacatcgtgctcaagtgggagctgggggagggcgcctttgggaaggtcttccttgctgagtgccacaacctcctgcctgagcaggacaagatgctggtggctgtcaaggcactgaaggaggcgtccgagagtgctcggcaggacttccaacgtgaggctgagctgctcaccatgctgcagcaccagcacatcgtgcgcttcttcggcgtctgcaccgagggccgccccctgctcatggtcttcgagtatatgcggcacggggacctcaaccgcttcctccgatcccatggacccgatgccaagctgctggctggtggggaggatgtggctccaggccccctgggtctggggcagctgctggccgtggctagccaggtcgctgcggggatggtgtacctggcgggtctgcattttgtgcaccgggacctggccacacgcaactgtctagtgggccagggactggtggtcaagattggtgattttggcatgagcagggatatctacagcaccgactattaccgtgtgggaggccgcaccatgctgcccattcgctggatgccgcccgagagcatcctgtaccgtaagttcaccaccgagagcgacgtgtggagcttcggcgtggtgctctgggagatcttcacctacggcaagcagccctggtaccagctctccaacacggaggcaatcgactgcatcacgcagggacgtgagttggagcggccacgtgcctgcccaccagaggtctacgccatcatgcggggctgctggcagcgggagcccagcaacgccacagcatcaaggatgtgcacgcccggctgcaagccctggcctaggcacctcctgtctacctggatgtcctgggctagggggccggcccaggggctgggagtggttagccggaatactggggcctgccctcagcatcccccatagctcccagcagccccagggtgatctcgaagtatctaattcgccctcagcatgtgggaagggacaggtgggggctgggagtagaggatgttcctgcttctctaggcaaggtcccgtcgtagcaattatatttattatgggaattc

SEQ ID NO: 327149 - DNA, 1868 bp, Homo sapiens
tccagacacaccaaatatcggcataagtacgaggctcggtgtttatatcggacgagggtgagaggaggctgcaacgccgagcggaggaggcaggaaccggagcgcgagcagtagctgggtgggcaccatggctgggatcaccaccatcgaggcggtgaagcgcaagatccaggttctgcagcagcaggcagatgatgcagaggagcgagctgagcgcctccagcgagaagttgagggagaaaggcgggcccgggaacaggctgaggctgaggtggcctccttgaaccgtaggatccagctggttgaagaagagctggaccgtgctcaggagcgcctggccactgccctgcaaaagctggaagaagctgaaaaagctgctgatgagagtgagagaggtatgaaggttattgaaaaccgggccttaaaagatgaagaaaagatggaactccaggaaatccaactcaaagaagctaagcacattgcagaagaggcagataggaagtatgaagaggtggctcgtaagttggtgatcattgaaggagacttggaacgcacagaggaacgagctgagctggcagagtcccgttgccgagagatggatgagcagattagactgatggaccagaacctgaagtgtctgagtgctgctgaagaaaagtactctcaaaaagaagataaatatgaggaagaaatcaagattcttactgataaactcaaggaggcagagacccgtgctgagtttgctgagagatcggtagccaagctggaaaagacaattgatgacctggaagataaactgaaatgcaccaaagaggagcacctctgtacacaaaggatgctggaccagaccctgcttgacctgaatgagatgtagaacgccccagtcccaccctgctgctgctcctccctctgacccagactccgcctgaggccagcctgcgggaagctgacctttaactgagggctgatctttaactggaaggctgctttctcctttcaccaccccctccttccctgtgtctttttcgccaaactgtctctgcctcttcccggagaatccagctgggctagaggctgagcacctttggaaacaacatttaagggaatgtgagcacaatgcataatgtctttaaaaagcatgttgtgatgtacacattttgtaattaccttttttgttgttttgtagcaaccatttgtaaaacattccaaataattccacagtcctgaagcagcaatcgaatccctttctcacttttggaaggtgacttttcaccttaatgcatattcccctctccatagaggagaggaaaaggtgtaggcctgccttaccgagagccaaacagagcccagggagactccgctgtgggaaacctcattgttctgtacaaagtactagctaaaccagaaaggtgattccaggaggagttagccaaacaacaacaaaaacaaaaaatgtgctgttcaagttttcagctttaagatatctttggataatgttatttctattttttatttttttcattagaagttaccaaattaagatggtaagacctctgagaccaaaattttgtcccatctctaccccctcacaactgcttacagaatggatcatgtcccccttatgttgaggtgaccacttaattgctttcctgcctccttgaaagaaagaaagaaagaagactgtgtttttgccactgatttagccatgtgaaactcatctcattacccttttctgggtttgaagctgctgtctctagaagtgccatctcaattgtgctttgtatcagtcagtgctggagaaatcttgaatagcttatgtacctgtaatagtttatgctgtaatagtttatgctgtaatagtttatgct

SEQ ID NO: 327150 - DNA, 2055 bp, Homo sapiens
tccagacacaccaaatatcggcataagtacgaggctcggtgtttatatcggacgagggtgagaggaggctgcaacgccgagcggaggaggcaggaaccggagcgcgagcagtagctgggtgggcaccatggctgggatcaccaccatcgaggcggtgaagcgcaagatccaggttctgcagcagcaggcagatgatgcagaggagcgagctgagcgcctccagcgagaagttgagggagaaaggcgggcccgggaacaggctgaggctgaggtggcctccttgaaccgtaggatccagctggttgaagaagagctggaccgtgctcaggagcgcctggccactgccctgcaaaagctggaagaagctgaaaaagctgctgatgagagtgagagaggtatgaaggttattgaaaaccgggccttaaaagatgaagaaaagatggaactccaggaaatccaactcaaagaagctaagcacattgcagaagaggcagataggaagtatgaagaggtggctcgtaagttggtgatcattgaaggagacttggaacgcacagaggaacgagctgagctggcagagtcccgttgccgagagatggatgagcagattagactgatggaccagaacctgaagtgtctgagtgctgctgaagaaaagtactctcaaaaagaagataaatatgaggaagaaatcaagattcttactgataaactcaaggaggcagagacccgtgctgagtttgctgagagatcggtagccaagctggaaaagacaattgatgacctggaagataaactgaaatgcaccaaagaggagcacctctgtacacaaaggatgctggaccagaccctgcttgacctgaatgagatgtagaacgccccagtcccaccctgctgctgctcctccctctgacccagactccgcctgaggccagcctgcgggaagctgacctttaactgagggctgatctttaactggaaggctgctttctcctttcaccaccccctccttccctgtgtctttttcgccaaactgtctctgcctcttcccggagaatccagctgggctagaggctgagcacctttggaaacaacatttaagggaatgtgagcacaatgcataatgtctttaaaaagcatgttgtgatgtacacattttgtaattaccttttttgttgttttgtagcaaccatttgtaaaacattccaaataattccacagtcctgaagcagcaatcgaatccctttctcacttttggaaggtgacttttcaccttaatgcatattcccctctccatagaggagaggaaaaggtgtaggcctgccttaccgagagccaaacagagcccagggagactccgctgtgggaaacctcattgttctgtacaaagtactagctaaaccagaaaggtgattccaggaggagttagccaaacaacaacaaaaacaaaaaatgtgctgttcaagttttcagctttaagatatctttggataatgttatttctattttttatttttttcattagaagttaccaaattaagatggtaagacctctgagaccaaaattttgtcccatctctaccccctcacaactgcttacagaatggatcatgtcccccttatgttgaggtgaccacttaattgctttcctgcctccttgaaagaaagaaagaaagaagactgtgtttttgccactgatttagccatgtgaaactcatctcattacccttttctgggtttgaagctgctgtctctagaagtgccatctcaattgtgctttgtatcagtcagtgctggagaaatcttgaatagcttatgtacaaaactttttaaattttatatttgaacttgttggtgtggacctggaccattggtggaaggtttcgcgggtggagtgtggttaagtgcttctaacggccatttgggagtctggggggtgggagccgggatgggaagaccctaggggtggggggaagaaaaaagggggtaatacagttttaaacccaaaaagggggtggtagtagagttagggaggttgattatgataatatctgg

SEQ ID NO: 327151 - DNA, 2234 bp, Homo sapiens
  misc_feature (2200)..(2200): n is a, c, g, or t
  misc_feature (2202)..(2202): n is a, c, g, or t
tccagacacaccaaatatcggcataagtacgaggctcggtgtttatatcggacgagggtgagaggaggctgcaacgccgagcggaggaggcaggaaccggagcgcgagcagtagctgggtgggcaccatggctgggatcaccaccatcgaggcggtgaagcgcaagatccaggttctgcagcagcaggcagatgatgcagaggagcgagctgagcgcctccagcgagaagttgagggagaaaggcgggcccgggaacaggctgaggctgaggtggcctccttgaaccgtaggatccagctggttgaagaagagctggaccgtgctcaggagcgcctggccactgccctgcaaaagctggaagaagctgaaaaagctgctgatgagagtgagagaggtatgaaggttattgaaaaccgggccttaaaagatgaagaaaagatggaactccaggaaatccaactcaaagaagctaagcacattgcagaagaggcagataggaagtatgaagaggtggctcgtaagttggtgatcattgaaggagacttggaacgcacagaggaacgagctgagctggcagagtcccgttgccgagagatggatgagcagattagactgatggaccagaacctgaagtgtctgagtgctgctgaagaaaagtactctcaaaaagaagataaatatgaggaagaaatcaagattcttactgataaactcaaggaggcagagacccgtgctgagtttgctgagagatcggtagccaagctggaaaagacaattgatgacctggaagataaactgaaatgcaccaaagaggagcacctctgtacacaaaggatgctggaccagaccctgcttgacctgaatgagatgtagaacgccccagtcccaccctgctgctgctcctccctctgacccagactccgcctgaggccagcctgcgggaagctgacctttaactgagggctgatctttaactggaaggctgctttctcctttcaccaccccctccttccctgtgtctttttcgccaaactgtctctgcctcttcccggagaatccagctgggctagaggctgagcacctttggaaacaacatttaagggaatgtgagcacaatgcataatgtctttaaaaagcatgttgtgatgtacacattttgtaattaccttttttgttgttttgtagcaaccatttgtaaaacattccaaataattccacagtcctgaagcagcaatcgaatccctttctcacttttggaaggtgacttttcaccttaatgcatattcccctctccatagaggagaggaaaaggtgtaggcctgccttaccgagagccaaacagagcccagggagactccgctgtgggaaacctcattgttctgtacaaagtactagctaaaccagaaaggtgattccaggaggagttagccaaacaacaacaaaaacaaaaaatgtgctgttcaagttttcagctttaagatatctttggataatgttatttctattttttatttttttcattagaagttaccaaattaagatggtaagacctctgagaccaaaattttgtcccatctctaccccctcacaactgcttacagaatggatcatgtcccccttatgttgaggtgaccacttaattgctttcctgcctccttgaaagaaagaaagaaagaagactgtgtttttgccactgatttagccatgtgaaactcatctcattacccttttctgggtttgaagctgctgtctctagaagtgccatctcaattgtgctttgtatcagtcagtgctggagaaatcttgaatagcttatgtacaaaactttttaaattttatattattttgaaactttgctttgggtttgtggcaccctggccaccccatctggctgtgacagcctctgcagtccgtgggctggcagtttgttgatcttttaagtttccttccctacccagtccccattttctggtaaggtttctaggaggtctgttaggtgtacatcctgcagcttattggcttaaaatgtactctccttttatgtggtctctttggggccgattgggagaaagagaaatcaatagtgcaactgttttgatactgaatattgacaagtgtctttttgaaataaagaaccagtccctccaaaaaaaaacaaacagaacacaaacaaacacacacaaacaaaacaaaacaaananacaaagacgaaacaagacacacaaccaaaaca

SEQ ID NO: 327152 - DNA, 2290 bp, Homo sapiens
tccagacacaccaaatatcggcataagtacgaggctcggtgtttatatcggacgagggtgagaggaggctgcaacgccgagcggaggaggcaggaaccggagcgcgagcagtagctgggtgggcaccatggctgggatcaccaccatcgaggcggtgaagcgcaagatccaggttctgcagcagcaggcagatgatgcagaggagcgagctgagcgcctccagcgagaagttgagggagaaaggcgggcccgggaacaggctgaggctgaggtggcctccttgaaccgtaggatccagctggttgaagaagagctggaccgtgctcaggagcgcctggccactgccctgcaaaagctggaagaagctgaaaaagctgctgatgagagtgagagaggtatgaaggttattgaaaaccgggccttaaaagatgaagaaaagatggaactccaggaaatccaactcaaagaagctaagcacattgcagaagaggcagataggaagtatgaagaggtggctcgtaagttggtgatcattgaaggagacttggaacgcacagaggaacgagctgagctggcagagtcccgttgccgagagatggatgagcagattagactgatggaccagaacctgaagtgtctgagtgctgctgaagaaaagtactctcaaaaagaagataaatatgaggaagaaatcaagattcttactgataaactcaaggaggcagagacccgtgctgagtttgctgagagatcggtagccaagctggaaaagacaattgatgacctggaagataaactgaaatgcaccaaagaggagcacctctgtacacaaaggatgctggaccagaccctgcttgacctgaatgagatgtagaacgccccagtcccaccctgctgctgctcctccctctgacccagactccgcctgaggccagcctgcgggaagctgacctttaactgagggctgatctttaactggaaggctgctttctcctttcaccaccccctccttccctgtgtctttttcgccaaactgtctctgcctcttcccggagaatccagctgggctagaggctgagcacctttggaaacaacatttaagggaatgtgagcacaatgcataatgtctttaaaaagcatgttgtgatgtacacattttgtaattaccttttttgttgttttgtagcaaccatttgtaaaacattccaaataattccacagtcctgaagcagcaatcgaatccctttctcacttttggaaggtgacttttcaccttaatgcatattcccctctccatagaggagaggaaaaggtgtaggcctgccttaccgagagccaaacagagcccagggagactccgctgtgggaaacctcattgttctgtacaaagtactagctaaaccagaaaggtgattccaggaggagttagccaaacaacaacaaaaacaaaaaatgtgctgttcaagttttcagctttaagatatctttggataatgttatttctattttttatttttttcattagaagttaccaaattaagatggtaagacctctgagaccaaaattttgtcccatctctaccccctcacaactgcttacagaatggatcatgtcccccttatgttgaggtgaccacttaattgctttcctgcctccttgaaagaaagaaagaaagaagactgtgtttttgccactgatttagccatgtgaaactcatctcattacccttttctgggtttgaagctgctgtctctagaagtgccatctcaattgtgctttgtatcagtcagtgctggagaaatcttgaatagcttatgtacaaaactttttaaattttatattattttgaaactttgctttgggtttgtggcaccctggccaccccatctggctgtgacagcctctgcagtccgtgggctggcagtttgttgatcttttaagtttccttccctacccagtccccattttctggtaaggtttctaggaggtctgttaggtgtacatcctgcagcttattggcttaaaatgtactctccttttatgtggtctctttggggccgattgggagaaagagaaatcaatagtgcaactgttttgatactgaatattgacaagtgtctttttgaaataaagaaccagtccctccaaaaaaaaaacaaggggggcccaaataatctgagggccatttacggtccggtttgtcaagggcccaaagggcataagcagagggcggtcaaagcgctggaacgatggtttgggacctctggggatggacaccagaagcggtaa

SEQ ID NO: 327153 - DNA, 2149 bp, Homo sapiens
tccagacacaccaaatatcggcataagtacgaggctcggtgtttatatcggacgagggtgagaggaggctgcaacgccgagcggaggaggcaggaaccggagcgcgagcagtagctgggtgggcaccatggctgggatcaccaccatcgaggcggtgaagcgcaagatccaggttctgcagcagcaggcagatgatgcagaggagcgagctgagcgcctccagcgagaagttgagggagaaaggcgggcccgggaacaggctgaggctgaggtggcctccttgaaccgtaggatccagctggttgaagaagagctggaccgtgctcaggagcgcctggccactgccctgcaaaagctggaagaagctgaaaaagctgctgatgagagtgagagaggtatgaaggttattgaaaaccgggccttaaaagatgaagaaaagatggaactccaggaaatccaactcaaagaagctaagcacattgcagaagaggcagataggaagtatgaagaggtggctcgtaagttggtgatcattgaaggagacttggaacgcacagaggaacgagctgagctggcagagtcccgttgccgagagatggatgagcagattagactgatggaccagaacctgaagtgtctgagtgctgctgaagaaaagtactctcaaaaagaagataaatatgaggaagaaatcaagattcttactgataaactcaaggaggcagagacccgtgctgagtttgctgagagatcggtagccaagctggaaaagacaattgatgacctggaagataaactgaaatgcaccaaagaggagcacctctgtacacaaaggatgctggaccagaccctgcttgacctgaatgagatgtagaacgccccagtcccaccctgctgctgctcctccctctgacccagactccgcctgaggccagcctgcgggaagctgacctttaactgagggctgatctttaactggaaggctgctttctcctttcaccaccccctccttccctgtgtctttttcgccaaactgtctctgcctcttcccggagaatccagctgggctagaggctgagcacctttggaaacaacatttaagggaatgtgagcacaatgcataatgtctttaaaaagcatgttgtgatgtacacattttgtaattaccttttttgttgttttgtagcaaccatttgtaaaacattccaaataattccacagtcctgaagcagcaatcgaatccctttctcacttttggaaggtgacttttcaccttaatgcatattcccctctccatagaggagaggaaaaggtgtaggcctgccttaccgagagccaaacagagcccagggagactccgctgtgggaaacctcattgttctgtacaaagtactagctaaaccagaaaggtgattccaggaggagttagccaaacaacaacaaaaacaaaaaatgtgctgttcaagttttcagctttaagatatctttggataatgttatttctattttttatttttttcattagaagttaccaaattaagatggtaagacctctgagaccaaaattttgtcccatctctaccccctcacaactgcttacagaatggatcatgtcccccttatgttgaggtgaccacttaattgctttcctgcctccttgaaagaaagaaagaaagaagactgtgtttttgccactgatttagccatgtgaaactcatctcattacccttttctgggtttgaagctgctgtctctagaagtgccatctcaattgtgctttgtatcagtcagtgctggagaaatcttgaatagcttatgtacaaaactttttaaattttatattattttgaaactttgctttgggtttgtggcaccctggccaccccatctggctgtgacagcctctgcagtccgtgggctggcagtttgttgatcttttaagtttccttccctacccagtccccattttctggtaaggtttctaggaggtctgttaggtgtacatcctgcagcttattggcttaaaatgtactctccttttatgtggtctctttggggccgattgggagaaagagaaatcaatagtgcaactgttttgatactgaatattgacaagtgtctttttgaaataaagaaccagtccctccaa

SEQ ID NO: 327154 - DNA, 1221 bp, Homo sapiens
cggacgcgtgggtcgacccacgcgtcgagtgaagaaaatgatcagaccttttcagagaaaccagcatcttccacagaggaaaactgtttggaatttcaagaaagttttaaacatatagacagtgaatttgaagaaaatacaaatttgaaaaatactttgaagaatctcaatgtctgtgaatctcagtcacttgattctggatcatgcagtgctctccaaaatgagtttgtgagtgagaagcttcctaaacaaagattaaacgctgaaaaagccaaattggtgaagcaggttcaggagaaagaagaccttcttcggaggctaaaactagtcaaaatgtatagatcaaagaatgatctgtctcagttacagttgttaataaagaagtggagaagctgtagccagctcttgctttatgagttgcagtcagctgtgtctgaagagaacaagaaactaagccttactcaattgatagaccactatgggttagatgataaattactacactataacagaagtgaagaagaatttatagatgtttaattcctgatttttgctccagaatatctttgagaatgacaacttaattaaaagatacttaggcacttttttttttttttgagactgagtttcgctcttgtcatcctggctggagtgtgatggtgcgatcttgactcactgcaacctctgcctctcgggttccagcaattctcctgcctcagcctcccgagtagctgagattacaggcgcccgccaccatgcccggctaatttttgcatttttagtagagactgggtttcaccacgttggccaggctggtctcgaactcctgacctcaggtgatccaccgcctaggcctcccaaaaccattagggctcagaggaaggtatcccaatgaatatcaattaagggcactttaatatataaattataaactaagttctaaaaggaaaattagtattttggatagatttgtcaaaacgacatttaagtcatgtttaaaaagtcatttgggcagttctggaaactagttttaatacatttgttttttatgacaaaaagttttattttaaatgttaaaaattgtccaatctggtgaatgtctaaccctaaagtttaaaaatttctgcctcctaagtttatgtaccttgtttccatccatttaccacatatttccatctgatagtctagcaggtaattaaacttatatgtccaaaaccaaat

SEQ ID NO: 327155 - DNA, 1433 bp, Homo sapiens
ggctctcgctgggaatggcggagggagagaaaaaccaagatttcactttcaagatggaaagtccgtcagactcagctgtggttttacctagcactcctcaggcctctgcgaatccatcatctccctatacaaatagttcccgaaaacaacctatgagtgcaacacttagagaaagattaaggaaaacaagattttcatttaattcctcttacaatgtggtgaaacgtcttaaagtagagagtgaagaaaatgatcagaccttttcagagaaaccagcatcttccacagaggaaaactgtttggaatttcaagaaagttttaaacatatagacagtgaatttgaagaaaatacaaatttgaaaaatactttgaagaatctcaatgtctgtgaatctcagtcacttgattctggatcatgcagtgctctccaaaatgagtttgtgagtgagaagcttcctaaacaaagattaaacgctgaaaaagccaaattggtgaagcaggttcaggagaaagaagaccttcttcggaggctaaaactagtcaaaatgtatagatcaaagaatgatctgtctcagttacagttgttaataaagaagtggagaagctgtagccagctcttgctttatgagttgcagtcagctgtgtctgaagagaacaagaaactaagccttactcaattgatagaccactatgggttagatgataaattactacactataacagaagtgaagaagaatttatagatgtttaattcctgatttttgctccagaatatctttgagaatgacaacttaattaaaagatacttaggcacttttttttttttttgagactgagtttcgctcttgtcatcctggctggagtgtgatggtgcgatcttgactcactgcaacctctgcctctcgggttccagcaattctcctgcctcagcctcccgagtagctgagattacaggcgcccgccaccatgcccggctaatttttgcatttttagtagagactgggtttcaccacgttggccaggctggtctcgaactcctgacctcaggtgatccaccgcctaggcctcccaaaaccattagggctcagaggaaggtatcccaatgaatatcaattaagggcactttaatatataaattataaactaagttctaaaaggaaaattagtattttggatagatttgtcaaaacgacatttaagtcatgtttaaaaagtcatttgggcagttctggaaactagttttaatacatttgttttttatgacaaaaagttttattttaaatgttaaaaattgtccaatctggtgaatgtctaaccctaaagtttaaaaatttctgcctcctaagtttatgtaccttgtttccatccatttaccacatatttccatctgatagtctagcaggtaattaaacttatatgtccaaaaccaaat

SEQ ID NO: 327156 - DNA, 624 bp, Homo sapiens
agaaaaaccaagatttcactttcaagatggaaagtccgtcagactcagctgtggttttacctagcactcctcaggcctctgcgaatccatcatctccctatacaaatagttcccgaaaacaagtatgaaaatctttgttcttccagtggatccattatgtgtttctaagtattgtggcagtggtggtttaaattctacggaaggttgttaattaacataatgtgtagcataaataagtagacattttattaaataattttgtttttcttctaaggtgacatatatgacacccaccagcccccttccatattttcctcttgaatgaattcatttcagttagtttcagattaggttattacaatactccagatggagaaagtttgcatctgtgcaatattattatgaaggtctttagtggcagagtctaggtcttttccttactctgtaattctgaagcacctggagtactatcaggcatgtgcttgttactgaacaaatgttccttgattactgggataaacttctcaacacttttggaaaggtgttgatcttgctgaagtaaaaaggaaataaaacaaatggagcttccagaaattaaagtcattttgtgatgccttctttaga

SEQ ID NO: 327157 - DNA, 1503 bp, Homo sapiens
agcggcgcctcgcgcgtcaggcaatctggccaattgcgcatcttttccgcctaccgcacggccccgcccctgccacaggatcgatttacggccgcagagaaaaaccaagatttcactttcaagatggaaagtccgtcagactcagctgtggttttacctagcactcctcaggcctctgcgaatccatcatctccctatacaaatagttcccgaaaacaacctatgagtgcaacacttagagaaagattaaggaaaacaagattttcatttaattcctcttacaatgtggtgaaacgtcttaaagtagagagtgaagaaaatgatcagaccttttcagagaaaccagcatcttccacagaggaaaactgtttggaatttcaagaaagttttaaacatatagacagtgaatttgaagaaaatacaaatttgaaaaatactttgaagaatctcaatgtctgtgaatctcagtcacttgattctggatcatgcagtgctctccaaaatgagtttgtgagtgagaagcttcctaaacaaagattaaacgctgaaaaagccaaattggtgaagcaggttcaggagaaagaagaccttcttcggaggctaaaactagtcaaaatgtatagatcaaagaatgatctgtctcagttacagttgttaataaagaagtggagaagctgtagccagctcttgctttatgagttgcagtcagctgtgtctgaagagaacaagaaactaagccttactcaattgatagaccactatgggttagatgataaattactacactataacagaagtgaagaagaatttatagatgtttaattcctgatttttgctccagaatatctttgagaatgacaacttaattaaaagatacttaggcacttttttttttttttgagactgagtttcgctcttgtcatcctggctggagtgtgatggtgcgatcttgactcactgcaacctctgcctctcgggttccagcaattctcctgcctcagcctcccgagtagctgagattacaggcgcccgccaccatgcccggctaatttttgcatttttagtagagactgggtttcaccacgttggccaggctggtctcgaactcctgacctcaggtgatccaccgcctaggcctcccaaaaccattagggctcagaggaaggtatcccaatgaatatcaattaagggcactttaatatataaattataaactaagttctaaaaggaaaattagtattttggatagatttgtcaaaacgacatttaagtcatgtttaaaaagtcatttgggcagttctggaaactagttttaatacatttgttttttatgacaaaaagttttattttaaatgttaaaaattgtccaatctggtgaatgtctaaccctaaagtttaaaaatttctgcctcctaagtttatgtaccttgtttccatccatttaccacatatttccatctgatagtctagcaggtaattaaacttatatgtccaaaaccaaat

SEQ ID NO: 327158 - DNA, 687 bp, Homo sapiens
agcggcgcctcgcgcgtcaggcaatctggccaattgcgcatcttttccgcctaccgcacggccccgcccctgccacaggatcgatttacggccgcagagaaaaaccaagatttcactttcaagatggaaagtccgtcagactcagctgtggttttacctagcactcctcaggcctcctgcctcagcctcccgagtagctgagattacaggcgcccgccaccatgcccggctaatttttgcatttttagtagagactgggtttcaccacgttggccaggctggtctcgaactcctgacctcaggtgatccaccgcctaggcctcccaaaaccattagggctcagaggaaggtatcccaatgaatatcaattaagggcactttaatatataaattataaactaagttctaaaaggaaaattagtattttggatagatttgtcaaaacgacatttaagtcatgtttaaaaagtcatttgggcagttctggaaactagttttaatacatttgttttttatgacaaaaagttttattttaaatgttaaaaattgtccaatctggtgaatgtctaaccctaaagtttaaaaatttctgcctcctaagtttatgtaccttgtttccatccatttaccacatatttccatctgatagtctagcaggtaattaaacttatatgtccaaaaccaaat

SEQ ID NO: 327159 - DNA, 3285 bp, Homo sapiens
ggagcggtccgggaggcggacccggctcctgccagggttgggtgcgccgctgaacggatggctgagggagccccgcggatcgtttaggaaagccggccagctgatcgtcgtgtgttgccacccattcatgtcaagatgactaagtttggatttttgcgattgtcctatgagaagcaggacacacttttgaagcttctcattctgtcaatggctgctgtattatccttctccactcgtctgtttgctgtcctgagatttgaaagtgttatccatgagtttgatccgtactttaattatcggactaccaggttcctggctgaggaggggttttataaattccataactggtttgatgaccgagcctggtaccctttgggacgaatcattggaggaacaatttacccaggtttaatgatcacctctgctgcaatctaccatgtactccattttttccacatcaccatcgacattcggaatgtctgtgtgttcctggcccctctcttctcctccttcaccaccatcgtcacgtaccaccttaccaaagagctcaaggatgcaggggctgggcttcttgctgctgccatgattgctgtagttcctggatatatctcccgatctgtggctggctcctatgataatgaagggattgccatcttttgcatgctactcacctactacatgtggatcaaggcagtaaagactggttccatctgttgggcagctaagtgtgcccttgcttatttctacatggtctcgtcatggggaggttatgtgttcctgatcaacttaattcctctccacgtcctcgtgctgatgctcacaggccgtttctctcaccggatctatgtggcctactgtactgtttactgcctgggcactatactttctatgcagatctcctttgtgggtttccagcctgtcctttcatcagagcacatggcagcctttggggtctttggtctctgccagatccatgcctttgtggattacctgcgcagcaagttgaatccacaacaatttgaagttcttttccggagcgtcatctctctggtaggctttgtccttctcaccgtgggagctctcctcatgctgacaggaaaaatatctccctggacggggcgtttctactcgctgctggatccctcttatgctaagaacaacatccccatcattgcttctgtgtctgagcatcagcccacaacctggtcctcatactattttgacctgcagctcctcgtcttcatgtttccagttggcctctattactgctttagcaacctgtctgatgcccggatttttatcatcatgtatggtgtgaccagcatgtacttttcagctgtaatggtgcgtctaatgctagtgttggcacctgttatgtgcattctctctggcattggagtctcccaggtgctgtccacatacatgaagaatctggacataagtcgtccagacaagaagagcaagaagcaacaggattccacctaccctattaagaatgaagtggcaagtgggatgatactggtcatggctttctttctcatcacctacacctttcattcaacctgggtgaccagtgaggcctactcttctccgtccattgtactatctgcccgtggtggggatggcagtaggatcatatttgatgacttccgagaagcatattattggcttcgtcataatactccagaggatgcgaaggtcatgtcctggtgggattatggctatcagattacagctatggcaaaccgaacaattttagtggacaataacacatggaataatacccatatttctcgagtagggcaggcaatggcgtccacagaggaaaaagcctatgagatcatgagggagctcgatgtcagctatgtgctggtcatttttggaggcctcactgggtattcctctgatgatatcaacaagtttctttggatggtccggattggagggagcacagatacaggcaaacatatcaaggagaatgactattatactccaactggggagttccgtgtggaccgtgaaggttctccagtgctgctcaactgcctcatgtacaagatgtgttactatcgctttggacaggtttacacagaagccaagcgtcctccaggctttgaccgtgtccgaaatgctgagattgggaataaagactttgagcttgatgtcctggaggaagcatataccacagaacattggctggtcaggatatacaaggtaaaggacctggataatcgaggcttgtcaaggacataaatgtcacgtccagctctgatatgcttcgcactgagcacatcacatttaggacgttgaagatttttttttttttttttttttaatatgcagtttgtaagaacaaaactggatggcatcagaattgtctggaagttttgtcttgggcagtatgggctgggccaaatgaaatgatttttataattctaaacaggttaccaaatgaaatgtcatggctttactttggtcaattaaaggggggaatttttttaaaaaatgtgccttatttgttttgacttataactgatttgagggaggcaaaagctatgctaggctgccagaaggacataagcagaccttgtccattctcttagctccctaaattagccaaatagagacttctttctcaaatcaggaaaactatcaaagaccaattcagatcctacatttacagacagttttgtcataaccctttgcattgcagcacctagtacaattccttggaaacagcgtggctcaataaatttttattgaatgaataaatgtgggaccagaagagtgctagaagagtgcctttctgggctactatgtctctgttctcaatgtcttttatccttagacgctctttgactttataaatcagcagttttgaagactcaagacaaacagtgaaattattggtttatcaatggagaggaagaaactcttccagcattacatatagagcttgatggtcagtaggtgtttttgaatcagcttaaatataatcatacatatcaatttgaaatggagcttttcagtactctcacttattcatgacacaggaatgaccctttactcaaaactcttgtggttgttcaaaggtgagcttctttttcccttagtcttagcctatgtgttgctattgtatattgttaccaagttcaactacctaattttgaagctctttccaaataagatacaaattaaaaggggaagcattgccagtaacaggtccctagagagcagtgccagcctgcctgcaagaaaagaggagaaacttcttaaaaagtttta

SEQ ID NO: 327160 - DNA, 720 bp, Homo sapiens
  misc_feature (544)..(544): n is a, c, g, or t
  misc_feature (637)..(637): n is a, c, g, or t
  misc_feature (693)..(693): n is a, c, g, or t
  misc_feature (710)..(710): n is a, c, g, or t
ggagcggtccgggaggcggacccggctcctgccagggttgggtgcgccgctgaacggatggctgagggagccccgcggatcgtttaggaaagccggccagctgatcgtcgtgtgttgccacccattcatgtcaagatgactaagtttggatttttgcgattgtcctatgagaagcaggacacacttttgaagcttctcattctgtcaatggctgctgtattatccttctccactcgtctgtttgctgtcctgagatttgaaagtgttatccatgagtttgatccgtactttaattatcggactaccaggttcctgactgaggtcaaaccatctgtgaggtttaacctccgcacctccaaggacccagagcatgaaggatgctacctctccgtcggccacagccagcccttagaagactgcagtttcaacatgacagctaaaacctttttcatcattcacggatggacgatgagcggtatctttgaaaactggctgcacaaactcgtgtcagccctgcacacaagagagaaagacgccaatgtanttgtggttgactggctccccctggcccaccagctttacacggatgcggtcaataataccagggtggtgggacacagcattgccaggatgctcnaactgggctgcaaggagaaaggacgatttttctctccgggaaatgtccactttgantcgggtaaaagccctcncgaagcgcaa

SEQ ID NO: 327161 - DNA, 2514 bp, Homo sapiens
ggagcggtccgggaggcggacccggctcctgccagggttgggtgcgccgctgaacggatggctgagggagccccgcggatcgtttaggaaagccggccagctgatcgtcgtgtgttgccacccattcatgtcaagatgactaagtttggatttttgcgattgtcctatgagaagcaggacacacttttgaagcttctcattctgtcaatggctgctgtattatccttctccactcgtctgtttgctgtcctgagatttgaaagtgttatccatgagtttgatccgtactttaattatcggactaccaggttcctggctgaggaggggttttataaattccataactggtttgatgaccgagcctggtaccctttgggacgaatcattggaggaacaatttacccaggtttaatgatcacctctgctgcaatctaccatgtactccattttttccacatcaccatcgacattcggaatgtctgtgtgttcctggcccctctcttctcctccttcaccaccatcgtcacgtaccaccttaccaaagagctcaaggatgcaggggctgggcttcttgctgctgccatgattgctgtagttcctggatatatctcccgatctgtggctggctcctatgataatgaagggattgccatcttttgcatgctactcacctactacatgtggatcaaggcagtaaagactggttccatctgttgggcagctaagtgtgcccttgcttatttctacatggtctcgtcatggggaggttatgtgttcctgatcaacttaattcctctccacgtcctcgtgctgatgctcacaggccgtttctctcaccggatctatgtggcctactgtactgtttactgcctgggcactatactttctatgcagatctcctttgtgggtttccagcctgtcctttcatcagagcacatggcagcctttggggtctttggtctctgccagatccatgcctttgtggattacctgcgcagcaagttgaatccacaacaatttgaagttcttttccggagcgtcatctctctggtaggctttgtccttctcaccgtgggagctctcctcatgctgacaggaaaaatatctccctggacggggcgtttctactcgctgctggatccctcttatgctaagaacaacatccccatcattgcttctgtgtctgagcatcagcccacaacctggtcctcatactattttgacctgcagctcctcgtcttcatgtttccagttggcctctattactgctttagcaacctgtctgatgcccggatttttatcatcatgtatggtgtgaccagcatgtacttttcagctgtaatggtgcgtctaatgctagtgttggcacctgttatgtgcattctctctggcattggagtctcccaggtgctgtccacatacatgaagaatctggacataagtcgtccagacaagaagagcaagaagcaacaggattccacctaccctattaagaatgaagtggcaagtgggatgatactggtcatggctttctttctcatcacctacacctttcattcaacctgggtgaccagtgaggcctactcttctccgtccattgtactatctgcccgtggtggggatggcagtaggatcatatttgatgacttccgagaagcatattattggcttcgtcataatactccagaggatgcgaaggtcatgtcctggtgggattatggctatcagattacagctatggcaaaccgaacaattttagtggacaataacacatggaataatacccatatttctcgagtagggcaggcaatggcgtccacagaggaaaaagcctatgagatcatgagggagctcgatgtcagctatgtgctggtcatttttggaggcctcactgggtattcctctgatgatatcaacaagtttctttggatggtccggattggagggagcacagatacaggcaaacatatcaaggagaatgactattatactccaactggggagttccgtgtggaccgtgaaggttctccagtgctgctcaactgcctcatgtacaagatgtgttactatcgctttggacaggtttacacagaagccaagcgtcctccaggctttgaccgtgtccgaaatgctgagattgggaataaagactttgagcttgatgtcctggaggaagcatataccacagaacattggctggtcaggatatacaaggtaaaggacctggataatcgaggcttgtcaaggacataaatgtcacgtccagctctgatatgcttcgcactgagcacatcacatttaggacgttgaagatttttttttttttttttttttaatatgcagtttgtaagaacaaaactggatggcatcagaattgtctggaagttttgtcttgggcagtatgggctgggccaaatgaaatgatttttataattctaaacaggttaccaaatgaaatgtcatggctttactttggtcaaaaaaggcgccgctgggatcctctgatcacccgac

SEQ ID NO: 327162 - DNA, 2884 bp, Homo sapiens
cgatatttgtggttctggctctctgagaaggctgggagactctgttgtaggcagctgtgggagaaggctagggttggaggtacacctggagatgtgtcagtttggtgttggcactgcagattcagcgcccgtggtccctgactaaggcactctgcctagatctattttcccctgactgtaccttttatgccccctggctttcccattctcccgatctgtggctggctcctatgataatgaagggattgccatcttttgcatgctactcacctactacatgtggatcaaggcagtaaagactggttccatctgttgggcagctaagtgtgcccttgcttatttctacatggtctcgtcatggggaggttatgtgttcctgatcaacttaattcctctccacgtcctcgtgctgatgctcacaggccgtttctctcaccggatctatgtggcctactgtactgtttactgcctgggcactatactttctatgcagatctcctttgtgggtttccagcctgtcctttcatcagagcacatggcagcctttggggtctttggtctctgccagatccatgcctttgtggattacctgcgcagcaagttgaatccacaacaatttgaagttcttttccggagcgtcatctctctggtaggctttgtccttctcaccgtgggagctctcctcatgctgacaggaaaaatatctccctggacggggcgtttctactcgctgctggatccctcttatgctaagaacaacatccccatcattgcttctgtgtctgagcatcagcccacaacctggtcctcatactattttgacctgcagctcctcgtcttcatgtttccagttggcctctattactgctttagcaacctgtctgatgcccggatttttatcatcatgtatggtgtgaccagcatgtacttttcagctgtaatggtgcgtctaatgctagtgttggcacctgttatgtgcattctctctggcattggagtctcccaggtgctgtccacatacatgaagaatctggacataagtcgtccagacaagaagagcaagaagcaacaggattccacctaccctattaagaatgaagtggcaagtgggatgatactggtcatggctttctttctcatcacctacacctttcattcaacctgggtgaccagtgaggcctactcttctccgtccattgtactatctgcccgtggtggggatggcagtaggatcatatttgatgacttccgagaagcatattattggcttcgtcataatactccagaggatgcgaaggtcatgtcctggtgggattatggctatcagattacagctatggcaaaccgaacaattttagtggacaataacacatggaataatacccatatttctcgagtagggcaggcaatggcgtccacagaggaaaaagcctatgagatcatgagggagctcgatgtcagctatgtgctggtcatttttggaggcctcactgggtattcctctgatgatatcaacaagtttctttggatggtccggattggagggagcacagatacaggcaaacatatcaaggagaatgactattatactccaactggggagttccgtgtggaccgtgaaggttctccagtgctgctcaactgcctcatgtacaagatgtgttactatcgctttggacaggtttacacagaagccaagcgtcctccaggctttgaccgtgtccgaaatgctgagattgggaataaagactttgagcttgatgtcctggaggaagcatataccacagaacattggctggtcaggatatacaaggtaaaggacctggataatcgaggcttgtcaaggacataaatgtcacgtccagctctgatatgcttcgcactgagcacatcacatttaggacgttgaagatttttttttttttttttttttaatatgcagtttgtaagaacaaaactggatggcatcagaattgtctggaagttttgtcttgggcagtatgggctgggccaaatgaaatgatttttataattctaaacaggttaccaaatgaaatgtcatggctttactttggtcaattaaaggggggaatttttttaaaaaatgtgccttatttgttttgacttataactgatttgagggaggcaaaagctatgctaggctgccagaaggacataagcagaccttgtccattctcttagctccctaaattagccaaatagagacttctttctcaaatcaggaaaactatcaaagaccaattcagatcctacatttacagacagttttgtcataaccctttgcattgcagcacctagtacaattccttggaaacagcgtggctcaataaatttttattgaatgaataaatgtgggaccagaagagtgctagaagagtgcctttctgggctactatgtctctgttctcaatgtcttttatccttagacgctctttgactttataaatcagcagttttgaagactcaagacaaacagtgaaattattggtttatcaatggagaggaagaaactcttccagcattacatatagagcttgatggtcagtaggtgtttttgaatcagcttaaatataatcatacatatcaatttgaaatggagcttttcagtactctcacttattcatgacacaggaatgaccctttactcaaaactcttgtggttgttcaaaggtgagcttctttttcccttagtcttagcctatgtgttgctattgtatattgttaccaagttcaactacctaattttgaagctctttccaaataagatacaaattaaaaggggaagcattgccagtaacaggtccctagagagcagtgccagcctgcctgcaagaaaagaggagaaacttcttaaaaagtttta

SEQ ID NO: 327163 - DNA, 2471 bp, Homo sapiens
gatcatagttttttccctgatttttttcacttcataaagaatcaaatttctctgttacttagtattattttatagaaatacttaaaatgtatcatttattagttttttaaagtacagagatgtgtcaagatgtgtaagaaggcaagtagtacataatctcatgcagcaatattttaatatattccattttataaatatagtataattagctccttgtttttggacatttgggttgtttctgatttttttgctactttaaagtgtgctgtagtaaacatctttgcatgtttctatgattgtttttttaggataaattcctggaagtggaattgctgggttaaatgtgtggaatcatccagtcatataatgaagatactttaccttgtaggtttcaacctacaggactcagctgcttatttctccttccctcttttgtagttggcctctattactgctttagcaacctgtctgatgcccggatttttatcatcatgtatggtgtgaccagcatgtacttttcagctgtaatggtgcgtctaatgctagtgttggcacctgttatgtgcattctctctggcattggagtctcccaggtgctgtccacatacatgaagaatctggacataagtcgtccagacaagaagagcaagaagcaacaggattccacctaccctattaagaatgaagtggcaagtgggatgatactggtcatggctttctttctcatcacctacacctttcattcaacctgggtgaccagtgaggcctactcttctccgtccattgtactatctgcccgtggtggggatggcagtaggatcatatttgatgacttccgagaagcatattattggcttcgtcataatactccagaggatgcgaaggtcatgtcctggtgggattatggctatcagattacagctatggcaaaccgaacaattttagtggacaataacacatggaataatacccatatttctcgagtagggcaggcaatggcgtccacagaggaaaaagcctatgagatcatgagggagctcgatgtcagctatgtgctggtcatttttggaggcctcactgggtattcctctgatgatatcaacaagtttctttggatggtccggattggagggagcacagatacaggcaaacatatcaaggagaatgactattatactccaactggggagttccgtgtggaccgtgaaggttctccagtgctgctcaactgcctcatgtacaagatgtgttactatcgctttggacaggtttacacagaagccaagcgtcctccaggctttgaccgtgtccgaaatgctgagattgggaataaagactttgagcttgatgtcctggaggaagcatataccacagaacattggctggtcaggatatacaaggtaaaggacctggataatcgaggcttgtcaaggacataaatgtcacgtccagctctgatatgcttcgcactgagcacatcacatttaggacgttgaagatttttttttttttttttttttaatatgcagtttgtaagaacaaaactggatggcatcagaattgtctggaagttttgtcttgggcagtatgggctgggccaaatgaaatgatttttataattctaaacaggttaccaaatgaaatgtcatggctttactttggtcaattaaaggggggaatttttttaaaaaatgtgccttatttgttttgacttataactgatttgagggaggcaaaagctatgctaggctgccagaaggacataagcagaccttgtccattctcttagctccctaaattagccaaatagagacttctttctcaaatcaggaaaactatcaaagaccaattcagatcctacatttacagacagttttgtcataaccctttgcattgcagcacctagtacaattccttggaaacagcgtggctcaataaatttttattgaatgaataaatgtgggaccagaagagtgctagaagagtgcctttctgggctactatgtctctgttctcaatgtcttttatccttagacgctctttgactttataaatcagcagttttgaagactcaagacaaacagtgaaattattggtttatcaatggagaggaagaaactcttccagcattacatatagagcttgatggtcagtaggtgtttttgaatcagcttaaatataatcatacatatcaatttgaaatggagcttttcagtactctcacttattcatgacacaggaatgaccctttactcaaaactcttgtggttgttcaaaggtgagcttctttttcccttagtcttagcctatgtgttgctattgtatattgttaccaagttcaactacctaattttgaagctctttccaaataagatacaaattaaaaggggaagcattgccagtaacaggtccctagagagcagtgccagcctgcctgcaagaaaagaggagaaacttcttaaaaagtttta

SEQ ID NO: 327164 - DNA, 1175 bp, Homo sapiens
ggagcggtccgggaggcggacccggctcctgccagggttgggtgcgccgctgaacggatggctgagggagccccgcggatcgtttaggaaagccggccagctgatcgtcgtgtgttgccacccattcatgtcaagatgactaagtttggatttttgcgattgtcctatgagaagcaggacacacttttgaagcttctcattctgtcaatggctgctgtattatccttctccactcgtctgtttgctgtcctgagatttgaaagtgttatccatgagtttgatccgtactttaattatcggactaccaggttcctggctgaggaggggttttataaattccataactggtttgatgaccgagcctggtaccctttgggacgaatcattggaggaacaatttacccaggtttaatgatcacctctgctgcaatctaccatgtactccattttttccacatcaccatcgacattcggaatgtctgtgtgttcctggcccctctcttctcctccttcaccaccatcgtcacgtaccaccttaccaaagagctcaaggatgcaggggctgggcttcttgctgctgccatgattgctgtagttcctggatatatctcccgatctgtggctggctcctatgataatgaagggattgccatcttttgcatgctactcacctactacatgtggatcaaggcagtaaagactggttccatctgttgggcagctaagtgtgcccttgcttatttctacatggtctcgtcatggggaggttatgtgttcctgatcaacttaattcctctccacgtcctcgtgctgatgctcacaggccgtttctctcaccggatctatgtggcctactgtactgtttactgcctgggcactatactttctatgcagatctcctttgtgggtttccagcctgtcctttcatcagagcacatggcagcctttggggtctttggtctctgccagatccatgcctttgtggattacctgcgcagcaagttgaatccacaacaatttgaagttcttttccggagcgtcatctctctggtaggctttgtccttctcaccgtgggagctctcctcatgctgacaggtagggaaggctcacagctttttttcttttttctttttttttaagatggagtttagctcttattgcccaggccggagtg

SEQ ID NO: 327165 - DNA, 1137 bp, Homo sapiens
tcactagatcccgcgcgcgagtgaggaagcatataccacagaacatttggtgtcaggatatacaaggtaaaggacctggataatcgaggcttgtcaaggacataaatgtcacgtccagctctgatatgcttcgcactgagcacatcacatttaggacgttgaagatttttttttttttttttttttaatatgcagtttgtaagaacaaaactggatggcatcagaattgtctggaagttttgtcttgggcagtatgggctgggccaaatgaaatgatttttataattctaaacaggttaccaaatgaaatgtcatggctttactttggtcaattaaaggggggaatttttttaaaaaatgtgccttatttgttttgacttataactgatttgagggaggcaaaagctatgctaggctgccagaaggacataagcagaccttgtccattctcttagctccctaaattagccaaatagagacttctttctcaaatcaggaaaactatcaaagaccaattcagatcctacatttacagacagttttgtcataaccctttgcattgcagcacctagtacaattccttggaaacagcgtggctcaataaatttttattgaatgaataaatgtgggaccagaagagtgctagaagagtgcctttctgggctactatgtctctgttctcaatgtcttttatccttagacgctctttgactttataaatcagcagttttgaagactcaagacaaacagtgaaattattggtttatcaatggagaggaagaaactcttccagcattacatatagagcttgatggtcagtaggtgtttttgaatcagcttaaatataatcatacatatcaatttgaaatggagcttttcagtactctcacttattcatgacacaggaatgaccctttactcaaaactcttgtggttgttcaaaggtgagcttctttttcccttagtcttagcctatgtgttgctattgtatattgttaccaagttcaactacctaattttgaagctctttccaaataagatacaaattaaaaggggaagcattgccagtaacaggtccctagagagcagtgccagcctgcctgcaagaaaagaggagaaacttcttaaaaagtttta

SEQ ID NO: 327166 - DNA, 3255 bp, Homo sapiens
gcagtctgggaaactagaggcagggtggcaggagatgccacagcttgcagggcacagttgaggagagcagctgatcgtcgtgtgttgccacccattcatgtcaagatgactaagtttggatttttgcgattgtcctatgagaagcaggacacacttttgaagcttctcattctgtcaatggctgctgtattatccttctccactcgtctgtttgctgtcctgagatttgaaagtgttatccatgagtttgatccgtactttaattatcggactaccaggttcctggctgaggaggggttttataaattccataactggtttgatgaccgagcctggtaccctttgggacgaatcattggaggaacaatttacccaggtttaatgatcacctctgctgcaatctaccatgtactccattttttccacatcaccatcgacattcggaatgtctgtgtgttcctggcccctctcttctcctccttcaccaccatcgtcacgtaccaccttaccaaagagctcaaggatgcaggggctgggcttcttgctgctgccatgattgctgtagttcctggatatatctcccgatctgtggctggctcctatgataatgaagggattgccatcttttgcatgctactcacctactacatgtggatcaaggcagtaaagactggttccatctgttgggcagctaagtgtgcccttgcttatttctacatggtctcgtcatggggaggttatgtgttcctgatcaacttaattcctctccacgtcctcgtgctgatgctcacaggccgtttctctcaccggatctatgtggcctactgtactgtttactgcctgggcactatactttctatgcagatctcctttgtgggtttccagcctgtcctttcatcagagcacatggcagcctttggggtctttggtctctgccagatccatgcctttgtggattacctgcgcagcaagttgaatccacaacaatttgaagttcttttccggagcgtcatctctctggtaggctttgtccttctcaccgtgggagctctcctcatgctgacaggaaaaatatctccctggacggggcgtttctactcgctgctggatccctcttatgctaagaacaacatccccatcattgcttctgtgtctgagcatcagcccacaacctggtcctcatactattttgacctgcagctcctcgtcttcatgtttccagttggcctctattactgctttagcaacctgtctgatgcccggatttttatcatcatgtatggtgtgaccagcatgtacttttcagctgtaatggtgcgtctaatgctagtgttggcacctgttatgtgcattctctctggcattggagtctcccaggtgctgtccacatacatgaagaatctggacataagtcgtccagacaagaagagcaagaagcaacaggattccacctaccctattaagaatgaagtggcaagtgggatgatactggtcatggctttctttctcatcacctacacctttcattcaacctgggtgaccagtgaggcctactcttctccgtccattgtactatctgcccgtggtggggatggcagtaggatcatatttgatgacttccgagaagcatattattggcttcgtcataatactccagaggatgcgaaggtcatgtcctggtgggattatggctatcagattacagctatggcaaaccgaacaattttagtggacaataacacatggaataatacccatatttctcgagtagggcaggcaatggcgtccacagaggaaaaagcctatgagatcatgagggagctcgatgtcagctatgtgctggtcatttttggaggcctcactgggtattcctctgatgatatcaacaagtttctttggatggtccggattggagggagcacagatacaggcaaacatatcaaggagaatgactattatactccaactggggagttccgtgtggaccgtgaaggttctccagtgctgctcaactgcctcatgtacaagatgtgttactatcgctttggacaggtttacacagaagccaagcgtcctccaggctttgaccgtgtccgaaatgctgagattgggaataaagactttgagcttgatgtcctggaggaagcatataccacagaacattggctggtcaggatatacaaggtaaaggacctggataatcgaggcttgtcaaggacataaatgtcacgtccagctctgatatgcttcgcactgagcacatcacatttaggacgttgaagatttttttttttttttttttttaatatgcagtttgtaagaacaaaactggatggcatcagaattgtctggaagttttgtcttgggcagtatgggctgggccaaatgaaatgatttttataattctaaacaggttaccaaatgaaatgtcatggctttactttggtcaattaaaggggggaatttttttaaaaaatgtgccttatttgttttgacttataactgatttgagggaggcaaaagctatgctaggctgccagaaggacataagcagaccttgtccattctcttagctccctaaattagccaaatagagacttctttctcaaatcaggaaaactatcaaagaccaattcagatcctacatttacagacagttttgtcataaccctttgcattgcagcacctagtacaattccttggaaacagcgtggctcaataaatttttattgaatgaataaatgtgggaccagaagagtgctagaagagtgcctttctgggctactatgtctctgttctcaatgtcttttatccttagacgctctttgactttataaatcagcagttttgaagactcaagacaaacagtgaaattattggtttatcaatggagaggaagaaactcttccagcattacatatagagcttgatggtcagtaggtgtttttgaatcagcttaaatataatcatacatatcaatttgaaatggagcttttcagtactctcacttattcatgacacaggaatgaccctttactcaaaactcttgtggttgttcaaaggtgagcttctttttcccttagtcttagcctatgtgttgctattgtatattgttaccaagttcaactacctaattttgaagctctttccaaataagatacaaattaaaaggggaagcattgccagtaacaggtccctagagagcagtgccagcctgcctgcaagaaaagaggagaaacttcttaaaaagtttta

SEQ ID NO: 327167 - DNA, 2340 bp, Homo sapiens
ggagcggtccgggaggcggacccggctcctgccagggttgggtgcgccgctgaacggatggctgagggagccccgcggatcgtttaggaaagccggccagctgatcgtcgtgtgttgccacccattcatgtcaagatgactaagtttggatttttgcgattgtcctatgagaagcaggacacacttttgaagcttctcattctgtcaatggctgctgtattatccttctccactcgtctgtttgctgtcctgagatttgaaagtgttatccatgagtttgatccgtactttaattatcggactaccaggttcctggctgaggaggggttttataaattccataactggtttgatgaccgagcctggtaccctttgggacgaatcattggaggaacaatttacccaggtttaatgatcacctctgctgcaatctaccatgtactccattttttccacatcaccatcgacattcggaatgtctgtgtgttcctggcccctctcttctcctccttcaccaccatcgtcacgtaccaccttaccaaagagctcaaggatgcaggggctgggcttcttgctgctgccatgattgctgtagttcctggatatatctcccgatctgtggctggctcctatgataatgaagggattgccatcttttgcatgctactcacctactacatgtggatcaaggcagtaaagactggttccatctgttgggcagctaagtgtgcccttgcttatttctacatggtctcgtcatggggaggttatgtgttcctgatcaacttaattcctctccacgtcctcgtgctgatgctcacaggccgtttctctcaccggatctatgtggcctactgtactgtttactgcctgggcactatactttctatgcagatctcctttgtgggtttccagcctgtcctttcatcagagcacatggcagcctttggggtctttggtctctgccagatccatgcctttgtggattacctgcgcagcaagttgaatccacaacaatttgaagttcttttccggagcgtcatctctctggtaggctttgtccttctcaccgtgggagctctcctcatgctgacaggaaaaatatctccctggacggggcgtttctactcgctgctggatccctcttatgctaagaacaacatccccatcattgcttctgtgtctgagcatcagcccacaacctggtcctcatactattttgacctgcagctcctcgtcttcatgtttccagttggcctctattactgctttagcaacctgtctgatgcccggatttttatcatcatgtatggtgtgaccagcatgtacttttcagctgtaatggtgcgtctaatgctagtgttggcacctgttatgtgcattctctctggcattggagtctcccaggtgctgtccacatacatgaagaatctggacataagtcgtccagacaagaagagcaagaagcaacaggattccacctaccctattaagaatgaagtggcaagtgggatgatactggtcatggctttctttctcatcacctacacctttcattcaacctgggtgaccagtgaggcctactcttctccgtccattgtactatctgcccgtggtggggatggcagtaggatcatatttgatgacttccgagaagcatattattggcttcgtcataatactccagaggatgcgaaggtcatgtcctggtgggattatggctatcagattacagctatggcaaaccgaacaattttagtggacaataacacatggaataatacccatatttctcgagtagggcaggcaatggcgtccacagaggaaaaagcctatgagatcatgagggagctcgatgtcagctatgtgctggtcatttttggaggcctcactgggtattcctctgatgatatcaacaagtttctttggatggtccggattggagggagcacagatacaggcaaacatatcaaggagaatgactattatactccaactggggagttccgtgtggaccgtgaaggttctccagtgctgctcaactgcctcatgtacaagatgtgttactatcgctttggacaggtttacacagaagccaagcgtcctccaggctttgaccgtgtccgaaatgctgagattgggaataaagactttgagcttgatgtcctggaggaagcatataccacagaacattggctggtcaggatatacaaggtaaaggacctggataatcgaggcttgtcaaggacataaatgtcacgtccagctctgatatgcttcgcactgagcacatcacatttaggacgttgaaatggtcgccaatccggggtaccgagctcg

SEQ ID NO: 327168 - DNA, 2500 bp, Homo sapiens
ggagcggtccgggaggcggacccggctcctgccagggttgggtgcgccgctgaacggatggctgagggagccccgcggatcgtttaggaaagccggccagctgatcgtcgtgtgttgccacccattcatgtcaagatgactaagtttggatttttgcgattgtcctatgagaagcaggacacacttttgaagcttctcattctgtcaatggctgctgtattatccttctccactcgtctgtttgctgtcctgagatttgaaagtgttatccatgagtttgatccgtactttaattatcggactaccaggttcctggctgaggaggggttttataaattccataactggtttgatgaccgagcctggtaccctttgggacgaatcattggaggaacaatttacccaggtttaatgatcacctctgctgcaatctaccatgtactccattttttccacatcaccatcgacattcggaatgtctgtgtgttcctggcccctctcttctcctccttcaccaccatcgtcacgtaccaccttaccaaagagctcaaggatgcaggggctgggcttcttgctgctgccatgattgctgtagttcctggatatatctcccgatctgtggctggctcctatgataatgaagggattgccatcttttgcatgctactcacctactacatgtggatcaaggcagtaaagactggttccatctgttgggcagctaagtgtgcccttgcttatttctacatggtctcgtcatggggaggttatgtgttcctgatcaacttaattcctctccacgtcctcgtgctgatgctcacaggccgtttctctcaccggatctatgtggcctactgtactgtttactgcctgggcactatactttctatgcagatctcctttgtgggtttccagcctgtcctttcatcagagcacatggcagcctttggggtctttggtctctgccagatccatgcctttgtggattacctgcgcagcaagttgaatccacaacaatttgaagttcttttccggagcgtcatctctctggtaggctttgtccttctcaccgtgggagctctcctcatgctgacaggaaaaatatctccctggacggggcgtttctactcgctgctggatccctcttatgctaagaacaacatccccatcattgcttctgtgtctgagcatcagcccacaacctggtcctcatactattttgacctgcagctcctcgtcttcatgtttccagttggcctctattactgctttagcaacctgtctgatgcccggatttttatcatcatgtatggtgtgaccagcatgtacttttcagctgtaatggtgcgtctaatgctagtgttggcacctgttatgtgcattctctctggcattggagtctcccaggtgctgtccacatacatgaagaatctggacataagtcgtccagacaagaagagcaagaagcaacaggattccacctaccctattaagaatgaagtggcaagtgggatgatactggtcatggctttctttctcatcacctacacctttcattcaacctgggtgaccagtgaggcctactcttctccgtccattgtactatctgcccgtggtggggatggcagtaggatcatatttgatgacttccgagaagcatattattggcttcgtcataatactccagaggatgcgaaggtcatgtcctggtgggattatggctatcagattacagctatggcaaaccgaacaattttagtggacaataacacatggaataatacccatatttctcgagtagggcaggcaatggcgtccacagaggaaaaagcctatgagatcatgagggagctcgatgtcagctatgtgctggtcatttttggaggcctcactgggtattcctctgatgatatcaacaagtttctttggatggtccggattggagggagcacagatacaggcaaacatatcaaggagaatgactattatactccaactggggagttccgtgtggaccgtgaaggttctccagtgctgctcaactgcctcatgtacaagatgtgttactatcgctttggacaggtttacacagaagccaagcgtcctccaggctttgaccgtgtccgaaatgctgagattgggaataaagactttgagcttgatgtcctggaggaagcatataccacagaacattggctggtcaggatatacaaggtaaaggacctggataatcgaggcttgtcaaggacataaatgtcacgtccagctctgatatgcttcgcactgatctataggagtggtgcaccactcctatagatcagtcatcatgcaaataaaagccacctgagtcaaaggcaaagccagagtgcagcttggagcaaagaagttaaaagcatattggcagaggaagagccctggcattccagcaggagctaacaggaaaaagaaatcaatggcagtaccctgacacagccttctggtggtacactcactggggatc

SEQ ID NO: 327169 - DNA, 1057 bp, Homo sapiens
ggagcggtccgggaggcggacccggctcctgccagggttgggtgcgccgctgaacggatggctgagggagccccgcggatcgtttaggaaagccggccagctgatcgtcgtgtgttgccacccattcatgtcaagatgactaagtttggatttttgcgattgtcctatgagaagcaggacacacttttgaagcttctcattctgtcaatggctgctgtattatccttctccactcgtctgtttgctgtcctgagatttgaaagtgttatccatgagtttgatccgtactttaattatcggactaccaggttcctggctgaggaggggttttataaattccataactggtttgatgaccgagcctggtaccctttgggacgaatcattggaggaacaatttacccaggtttaatgatcacctctgctgcaatctaccatgtactccattttttccacatcaccatcgacattcggaatgtctgtgtgttcctggcccctctcttctcctccttcaccaccatcgtcacgtaccaccttaccaaagagctcaaggatgcaggggctgggcttcttgctgctgccatgattgctgtagttcctggatatatctcccgatctgtggctggctcctatgataatgaagggattgccatcttttgcatgctactcacctactacatgtggatcaaggcagtaaagactggttccatctgttgggctgccctagccctggacctgtctccgagtacatagacgtttcctgtgtgcctcctgccaggggttaaataggtcaatgtttttccagataattgaatattgaataagttagtcaattaaatacttttttaggtttttaattagagactacttaatgaaatatgtaatttttattatgtataatagaatgtgcaaattctagataaagatactaccactatacttatttactatctttacttactcaaaagatcctacagactaacaaaacatgcatctttaaagctcacattaggacgggcttgacatgtttaaacaactattgctgctacttcttatc

SEQ ID NO: 327170 - DNA, 920 bp, Homo sapiens
cagtgacatgtcctagctcttagaaaatttcatgatacttgctttggcctttggcagacagagcatgaacccattgggtaggaattgacattgaagctgactcaacggattatggaagtggtgaataaaaaaaagacaatgcttgcactcctggagcctatagtctaggaggggagacaagccaaatatagataatcacccaaataagtacttaatttcagttctgtaatggaaaagttaagatttcaagaaagattaaaccagggacctaaatttggccactgtagagatggtatttaaggtcttgagagaagctgaaattgcaaggcagaatatgttgtgatatgaactccccaagaactcaagaatttagaatttggtaggaaaaggaacagaccaaaaaaaaaatcctcagaaagaactgtcataaggtgtaaataaaacaaactaaaaacccctattttatcactgaagcggaagagagagtgtttcagaaggaagatatggttaactgtataaagggctgctgagtggtcaagtcagatgcaggcagaacattgacattggataaactggtgaccacgacaagagcagtttctgcaatgtggtgaagcaggaagccagaatggaaaggagaggaggagataaagtagaggcagtgcctatgcataatggtcaaaaagcgtggctgttaaaggagaatagacagaatgggtgataacttgacagaggtgtggagttagggaagttttcacttgcttggctttgtttgtgagggtggattcttgcatatatttgagtgctgaagggaaaaatccagtagtgaggaagaggtcaaagatttggaaaagagagggtatagctgacagaacaagagccctgaccagggaggaaggcatgagatccaggcacctgtggag

SEQ ID NO: 327171 - DNA, 135 bp, Homo sapiens
ttgctgtcctcatatccagtcctcccaagtagattcactcatttccacatcaaagatagaggcctcataggagccgagatgaaaagtagccttgtgttgctacaggctggccccctgggcaaataaagaagtgca

SEQ ID NO: 327172 - DNA, 279 bp, Homo sapiens
tgtgctctcttgccctgatgctgaaggaaagtcacctcaatggctctgaattcaatggtctcaattgtttggctggaaaattagaaaacccagagaagaaggaagattatattgactccctcagcttccaactcttactcttgccgcgtgtgtccctgctgtggaattcactcattaaatcaatttgttttttaatacataataagcatttattttgtccaaggcatggctgcccaagatgatcacctgaagtgcacccacattgttttgtgaataaag

SEQ ID NO: 327173 - DNA, 2357 bp, Homo sapiens
gattactcacacagtcttgaagatgcaatgtcagctatttaggacagaaacatccaaggccgtgtcagaactcaattacgactacatatgcattaaggcaggaactggcaggcctcagggtacgccaactataggactcgtgcttctcgtacgctgggctataatctatgaaactgagctccagagccagccaatcacttagctcctcataacaagtctaactggctctggaaagctgaaagggctgcactggaacaacacagatgagatattctacacattaatctacttatctggaatcactttgcctctaaaggccagagaaaaatcacagcttccttgtcggaggggaaaaggacaggtgatctggggaaaacgcagctacacctggagcaaggtctcttcccggcttggcaatctcagctgtgccggcgctacgggacccgagccgtcccagaaaccaaagggcaggcacggcagcaaacgcctgagtgctgctgccttcggtgactatatgagaatggaaacttctaaggaagccaggttgttagaattgttaccccctttactcagagataacatagattatccaggctgagatggaaaacaagccctttattgaattttcaacacagactccctgcttctcatctccttaataaaatttcattaaaatccccttgaactcccatgttcaaatctccatttgttgacagacaaagccaacaatactctaaactgaggcctgcaagtcatttcatttgtatttttgtccagaaatttcccataggaagacttcacctcctacaactccgaagaaaacccttactgtccaagaccgtcaccagcaaccatccgcagtcattcaagtggaagctttcacagcttttgtacattctctgtgtcaatatacaactgagttacagactgtcccctggctccctgacccttacaaacactaaaagttttgtttgactcaacttcaagctgctcatctgttagtaagtgatgttcactccagaacacattcatgatgagaactttctaaaagaccagcactgctcttcccctcctataatcataataatcatgataacctgaaacatgttactgggactcgacatttttctggggattgaaatctttagtccttggagctgtcacatagcaggggcaacctcacactgaaacaaaggaagtgatgtcccattattatccaccctgagccaccataatatgctgtttacatttattttcttcagcctgtgcaaaacaaagcaatggaaaaggaaactaaaaaatatacatactagtaccattatcttcttttgcctaaaattactaatgcaccacgtcagtctgcttccttcaggcatcattctcaattcatcaggacttgtattagcaggttctggctagagagactatctcctgtcatcacgatcaattaatgttttctggtgatcacatcaggccctatctaagaagctcatggtatacaagggtcacccaaatagctgagtgcagtccttgctcatatttccttcatcttaaccccgcaaacaagaattaagatgatcccaataaaagaaaaattgctcaggaaactgaacctttttctgaaccaagcactgtcagcaaatctcaggtattagagcaactatggttgattgaaaagtgtctcaaaatctgggccaagaatgattgctaggtccataagctaatttgtctggccttgccatttacgtaagccaaagaaagtcactcatgagtaaactatagaaaacgttcagacccatcctgttagtatgtcaaatcaactaagactggcagggtattaactccattccaggtgacatggataaagagccccattattttcacagtgccagcctctacctaaggaaaccctagaccttggaaccagtttcctggtagggaactgctgacagtttcaatgctgacagttggagccaatgcctcatagtgtaaactgaaagaaaaatagttgctttttaaaatgtcagcaagaaggcctgcctcatcttaacaaagcaaaaaaaaatgctttaattcaaattaaaaatcatgatactagagatgggagtctgtggtcactataaagataaagttcatgttcttggttcagataacaaaacactttatctggataaatggacctcaaaatttgctcttggcacatgggggaaattttttgttgtattttgttgttgttgttgttcttgttgttattgtttaaattaatcttcctaaggccatgaatatgaaatcatattaataatgcatgtgacaaaattctaaaatatattacacttaaaattagcataaaccatcaa

SEQ ID NO: 327174 - DNA, 1010 bp, Homo sapiens
gattactcacacagtcttgaagatgcaatgtcagctatttaggacagaaacatccaaggccgtgtcagaactcaattacgactacatatgcattaaggcaggaactggcaggcctcagggtacgccaactataggactcgtgcttctcgtacgctgggctataatctatgaaactgagctccagagccagccaatcacttagctcctcataacaagtctaactggctctggaaagctgaaagggctgcactggaacaacacagatgagatattctacacattaatctacttatctggaatcactttgcctctaaaggccagagaaaaatcacagcttccttgtcggaggggaaaaggacaggtgatctggggaaaacgcagctacacctggagcaaggtctcttcccggcttggcaatctcagctgtgccggcgctacgggacccgagccgtcccagaaaccaaagggcaggcacggcagcaaacgcctgagtgctgctgccttcggtgactatatgagaatggaaacttctaaggaagccaggttgttagaattgttaccccctttactcagagataacatagattatccaggctgagatggaaaacaagccctttattgaattttcaacacagactccctgcttctcatctccttaataaaatttcattaaaatccccttgaaaaaaaaaaaaaaaaaaaaaaccaacaaaaaaaaaaaaaaaaaaaacaacgccaaaagtacgacacaacagcaacataaccaacaacagtaccacacaaagcaaacaccacacgagctggggggcggccgcggcgcccacaaaaagatgtctcaaacaccaacacgagggggggaggcagccgcgcacagtagtaagtgaacaacatggctgaaactgcggcactgtcaacaaacgcgcccgcaaaaagaggggggggtccccccaaaaaaaaaccgcgggggaagaacgcgggttgaacacacaccgggtggagggatacggggc

SEQ ID NO: 327175 - DNA, 685 bp, Homo sapiens
gattactcacacagtcttgaagatgcaatgtcagctatttaggacagaaacatccaaggccgtgtcagaactcaattacgactacatatgcattaaggcaggaactggcaggcctcagggtacgccaactataggactcgtgcttctcgtacgctgggctataatctatgaaactgagctccagagccagccaatcacttagctcctcataacaagtctaactggctctggaaagctgaaagggctgcactggaacaacacagatgagatattctacacattaatctacttatctggaatcactttgcctctaaaggccagagaaaaatcacagcttccttgtcggaggggaaaaggacaggtgatctggggaaaacgcagctacacctggagcaaggtctcttcccggcttggcaatctcagctgtgccggcgctacgggacccgagccgtcccagaaaccaaagggcaggcacggcagcaaacgcctgagtgctgctgccttcggtgactatatgagaatggaaacttctaaggaagccaggttgttagaattgttaccccctttactcagagataacatagattatccaggctgagatggaaaacaagccctttattgaattttcaacacagactccctgcttctcatctccttaataaaatttcattaaaatccccttgaa

SEQ ID NO: 327176 - DNA, 577 bp, Homo sapiens
acacattaatctacttatctggaatcactttgcctctaaaggccagagaaaaatcacagcttccttgtcggaggggaaaaggacaggtgatctggggaaaacgcagctacacctggagcaaggtctcttcccggcttggcaatctcagctgtgccggcgctacgggacccgagccgtcccagaaaccaaagggcaggcacggcagcaaacgcctgaggtaattttcatctttctttttatttttagtagaataatgcagactgaaagtgataagcataaagtcgctgaggcaactagatatgcttcgattttattttacattttcctattctaatcgtgtgcaggatcatttgttatgaagtctgaggagggggagaattaatgtacctgaaataaacttgaaactaaaacgatcatttgtggaggaaaatacaggattttccagaacagtttcagagctacctttgcagatgggtaggcttttcacccacccacagaaagaagagtcaacggggctgagacaggacagggatgggtttcaggagcacaattaaaagtttttcgtatcttaaagaaa

SEQ ID NO: 327177 - DNA, 281 bp, Homo sapiens
tcgggaggctgaggcaggagaatcacttgaacccgggaggtggaggttgcatcaagccaagatcgcaccactacactccagcctgggcgacagagcaagaccccatctcaaaaaaagaataaaagaaagtcccatgtcccaggaaacccctgggacccaggcaaagggggatagttggtcaccctagaccgcctccccctcctacatatgggcaaactgaggcccagggaagggagggactagcctaagctcacccagtcagaggggaatgtgttcatggc

SEQ ID NO: 327178 - DNA, 433 bp, Homo sapiens
atctcaaaaaaacagaaatgaaaacaaacgttttcctctgaaagcaagcatcctgttaccccagacaactatggtatgggtagctctgaacctcaaccatgaattatttcagagttttttcaaactgaaattgaaattaatgcccagccttaactgttcatgtagaaatatttcttttctgacaaatctagctcttgcaaatctatgcttagtagagacggggtttctccatgttggtcaggctgttctcaaactcctgacctctagtgatccacccgcctcagccttccaaagtgctgggattagagcataagccaccatgcctggctggcaaatatatacttctaaacaattatgctgctttagtataattgttttttatatatttttgtactgattaaagatatccttacaataagtctaattgaattat

SEQ ID NO: 327179 - DNA, 762 bp, Homo sapiens
gtgctggtatgatctccctgtttacagaagaggaaacttgagaagttaagcaacctgccaaaggtcttagagcctgaaagattagcccatcgaccaaatccagccaggctttacagccagcacaaacatcggtcaggtggcctagggcaagtcattcaacctctcagaacttcagtttgtgatgtcagttggggataatgatacttgccttgcagggaaggaagagacagctccagctcccttttcttggcatcccagtcttcatcacgctcatccagaggcagccccttctgctgggcagcgcaacggtggtcctggcactcgggctctgccctaggaaagaagagagagccttctgaacttggatcaggaggacctgttccagcctgggaatcggcctttattcacaggttctgcacaccgcagttcagttgagaaggaaggaggccaagtttgagcatttccaagcatacacttagggaaggtctcagacactaaagaaactacttggaggtggagaaaaattgtgggacccgagtgagatgttaacagactcaaagatagtcactcagcttgaagaaaatgctcctgattcttgaagtgctcacatttatagagcaacctgcagattattgcgagactgttttcgtttatttttagttttatttttcataatcataaaagtgatgtgtgttccttgtataaaatttaaaagtacagaaacatataaggaacaaaatgagaatcactcacaatcacata

SEQ ID NO: 327180 - DNA, 2007 bp, Homo sapiens
gattgacttctaaagactcttggtatgtgaggaagaaacctggaagaggaagaggaaagcaaaggagtcagggatggctcttcctcagggtctattgacattcagggatgtggccatagaattctctcaggaggagtggaaatgcctggaccctgctcagaggactctatacagggacgtgatgctggagaattataggaacctggtctccctggagttgtcaggggagtgtccattggcagcacctgcctcctgagtgtctcccaggccatcaccatcagccccaggagctcaggtgggcagagcttaaagggaacgcccccaagcacgctggctcctgtgtgttcctcagctggctcctccctggtcaatatcattgttctcatgcacgtgaccggcaagtggagcaacaaaaataccacgaagacaaaagatctgggatactgttctgctgctgatcacgagggcaccagagagtcgctgacgcggcactgctgtccttccctgatgtgatctgcctggggctcatgctctggggcagcagctccatcgtttgcatcctgcacaggcacaagcggcgggtccagcacattcataggaccagcgtgtcccccacatcctcccctgagtccggagctaccaaaaccatcctcctggagcaggaaaggacaaggagtccccgaagctgacactgagttcatggggttgagctgacagcggccaacaggctgtgatgggatctcactctgtcggccaggctggaatgcaatggtgccaacttggctcagtgcaacctccccaccccgggctccaacaatcctcccatctcagcctctgaagtagctgggactacaggcgttatctcctgtccggggaagaggtgggcctctctccgtcgtgggaggagctctgaacttctccttcatccagggatgggccccagggacccaccagtggggctgggagaagcccccctcagcaggaagacagaggtgcctgggtggccgaggcctggaaggtctgcaccatggtgcacagaggccccggagctgggtgaggccagaaagctgctctggggtcagcggggaatgtgcctgctgaatctgtacctgagctacgtcttcacaaatggcctcagacctagagtgcagggagatcccctggcttttctgaagtggtggcaggtggtctcctgggtagcaggatctgggctgcttacttcccttacccagtgagggcccgcggggagctcttaagttgggcatcatggggctgcgtgatgtggctgctgtgcccacatcagagggtttttgtttcttttccaaagtcaagctgcactaatctagaccagggatccccacccctgggctgcagaccggtccccatgggtggcctgttaggaactggaccgcacagcaggaggtgagcagtgggtgagtgcgcgtgaccacctgagctctgccttctgtgagatcagcagcgccactgcatctcagaggaatgccaaccctactgtgaactgtgcatgcgagggatctgggttgcatgctctttatgagatcaaactaatgcctgatgatctcaggtggaacagtttaatcctgaaaccatccccccatctgtggaaaaactgccttccactaaaccagtccctggtgccaaaaacactgggaaccgctaatctagacagttctctgctaaggaagcacgtggttgagaagcatcagaatcgttcccacggaccatgctccggagtctcagcaggctcctgcagtgtgtttatccgtgcatcatgaaggaccctcatacggctgacgtgccttggctgatgcgaataacactgcagcaagcgtggcagtgcagatagctcttggaaatacccatttccttcagacgcatactcagaggtaggattgctggattgtttggtcattttgatttttaaaattaaaaagaattttaattctcatattgttttgagtaaaattaaattataacttgtaaggc

SEQ ID NO: 327181 - DNA, 837 bp, Homo sapiens
gagggactgaaggtcacaccacagcgcgctggagggcagttgtgcgatcttgattcacttcaacctctgctctccgggctcaagcaattctcccacctcagcctgagtctcactctgtccttcaggctgtgagtgcagtctcctgatcttggctcactgcaacctctgtctcctgggttcaagtgattcttgtgcctcagcctaccaagtagctgagatacaggattgacttctaaagactcttggtacctgaggaagaaacccagaagaggaagaggaaagcaaaggagtcagggatggctcttcctcagggtctattgacattcagggatgtggccatagaattctctcaggaggagtggaaatgcctggaccctgctcagaggactctatacagggacgtgatgctggagaattataggaacctggtctccctgggtgaggataacttccctccagaagtggggatgtgcccttgtggatctttgtattttctcttgtttctcttgggagttgcatccttgcttgactaaaatggaagctgtattgattttgaaatgaaaagcttcatgatacaaaaaaaaaaagaaaaaagaaaaaaaatttttgggcgggcttgggccctaagaaaggtttcaccaccactccggtgggcgccgggggcccagataggtatagggaacgtgggcaaaggggggccccaggggatacccgtgggcaagaaaaggggggggatctcccccatataaaaaacgccggcggaaaacggacggttgagaacaccaaagagatccggaggcaaaggggcctatacaacggggtcaaggaacgataata

SEQ ID NO: 327182 - DNA, 1146 bp, Homo sapiens
actgtgttgattcaaggtttaatggatttagggctgtgcaggatgtgctttgtttaaaatgtgtttgcaggcagtatgcttggtaaaagtcatcaccattctccagtctcaaataccaagggacacaatgcactgcagaaggccacagggacctctgccccagaaagcctgggtattgtccaaggtttctgcctgctgagacagcctgagatatggcctcatgggaagggaaagacctgactgtcccccagcccaacacccgtaaagagtctgtgctgaggaggattagtgaaagaggaagacctctttgcagttgagataagaggaaggcatctgtctcctgctcgtcctggcaatggaacgtctcgctgtaaaacctgattgtacattctatttactgagataggagaaaaccgccttatggctggaggtgagacatgctggcggcaatactgctctttactgcactgagatgtttgtgtaaagtcaaacataaacctggcctacatgcacattgaggcacagcacctttccttaaacttatttatgacacagagacctttgcttacgttttcctgctgaccctctccccaccattagcctgtagtcctgccacattcccctcactgagatggtagagagagtgatcaataaatactgagggaactcagagaccagtgccgatgcgggtcctccgtatgctgagcgccggtcctctgggcccagtgttctttctctatactttgtctctgtgtcttatttcttttctcagtctcttatcccagctgatgagaaatagccacaggtgtggagggactggccccccttcagggttttatgccttgggcttaggttgtaatttggcagggcagccttccaccctttggcacagagctgggtgttccaaagaccacaaggggttttaggccctggaccccggcatgttccaagactctttatattatgtcagactagcaagccctgcctcagcttttccccaacatggaacgctgttctaaaagcacccatgattcttttttttcttttttttcttttttttttttttcagatggagttgcagtgagctgagatcgtgccactacactctagccttggtgacagaacaagactctgactcaaaaaaaa

SEQ ID NO: 327183 - DNA, 797 bp, Homo sapiens
gctgatcacgaggacaccagagagtcgctgacgcggcactgctgtccttccctgatgtgatctgcctggggctcatgctctggggcagcagctccatcgtttgcatcctgcacaggcacaagcggcgggtccagcacattcataggaccagcgtctcccccacatcctcccctgagtccggagctaccaaaaccatcctcctggttctagcatgtattaacaccgtgtgtctaaagtcatccctgctggtcatctggaggaatctgagaaggggcaggtctttcttctgactctcagagcagcaccctctgctggacagggctgggcacctcatctcaagcccaatctgatccaccaacagggtctgttatctccggtccggggaagaggtgggcctctctccatcctgggaggagcgctgagcttctccttcatccagggatgggccccagggacgcgccagtgggactgggagaagccaccctcagcagggaagacagagatgcctgcgtggccgaggcctggaaggtctgcaccatggtgcacagaggccccggagctgggtgaggccagaaagctgctctggggtcagcggggaatgtgcctgctgaatctgcaagcacctgagctacgtcttcacaaatggcctcagacctagagtgcagggagatcccctggcttttctgaagtggtggcaggtggtctcctgggtagcaggatctgggctgcttacttcccttacccagtgagggcccgcggggagctcttaagttgggcatcatgggtctgcgtgatgt

SEQ ID NO: 327184 - DNA, 841 bp, Homo sapiens
cgctgcgcatacgctaacttgaatcatatggtctgggtgcctcatagaatggttttcattcaatcaggcatcggtttggtccaaccagttttacattaaaaaaaaacagtgatataaaagtggatatttaatttattggtgaggatgacgttgaggatatcctctagtactggatccacaagagaaatctctcaggagtcagtctcagtatggctcagcgctgcaaataataaatgatcaattatatacatacataaaacttcctaatatttcacttagtattgctattactatgttcttggggcagaagctcagtctgtcagatacattacgagagactggtgtctccataattgtgcttaggactatgttgcatgaatggataaactgttaagcaggaacctaggagagctagggtgacaaagttcaagtccattaaaactagcaagacatattccttacagctcatgcacgagtcaccgtcataagatgtttatggttaaggaaagcagcttattgatacctgcaaggacaaatttctacagaaacacaatgtccagatgacccaatatcccatgacaatgtatgcttttaagatagcaggctggtctcggactcctgacctccggtgatccacctgcctcggccttccaaagcgctgtcaatacaggcgtaagccattgcgcctggccaaggatagctttaaatcaacaaagtaataagttttgttacagtgtcagcccacccgcaggtagacataccttagcttttacgtaggctttggccgggcgcggtggctcacgcctgtaatcccagcactttgggaggccgaggcaggtgg

SEQ ID NO: 327185 - DNA, 1891 bp, Homo sapiens
ggatagcgtggagtgacggtgccaccgcggcgcagtattgcccgggctgtgagtgcagtctcatgatcttgggtcactgcaacctctgtttcctgggttcaagtgattcttgtgcctcagcatcccacgtagctgagattacaggattgacttctaaagactcttggtacgtgaggaagaaacccggaagaggaagaggagagcaaaggagtcagggatggctttttctcagggtctattgacattcagggatgtggccatagaattctctcaggaggagtggaaatgcctggaccctgctcagaggactctatacagggacgtgatgctggagaattataggaacctggtctccctggaaaggagaatcacttgaacccaggaggaggaggttgtggtgagccgagattgcgccattgccctccagcctgggcaataacagtgaaaatctgtctcaaaaagaaaagaaaagaaaaaaagatatatactcccctaagaaaagaaaaaaagctatatactcccctcacaaactggggacctcaagatctccaccctaaaatagttattttgaatttccccctggcaatgtaaaccgagagcttatctgcacaggtgtgggacagaaccaatccctctgcacacctgagacaaatgcctatctgattgcttcccctgccctattgtttacataaaaacgcagggtcactgaggcagtcgaaggcataagtgactattcctcctcccgctctcacatataaattgtgtatttagtgaaaggttgatcaaagactcaaagaatgtgatcatttgttatctacctgtgacccggaagccccccaattccagttattccacctttccagactgaaccaatgcatatcttacatgtattgattgatgtattatgtctctgcaaaatgtgtaaaaccaaactgcagcctgaacaccttgggcacacattgtcaggacctcctgaggctgtgtcacgggggcatttttaaccttggcaaaatagatttctaaattgactgagacctagtagatacttttagttcacaagctcatgaacgcagaagaaattgagagaataagaaaaaagctaggtgtcatggaaagcacgaaatcagttccaaaatctgaactccttcatatttattcaacatagggaaatgctcttcaactttgtgtgattagattccatttgcgaatgatatatatttctagtatttgattaaaataacccattctatgtaattttagccaacttaaactgcaaataataaatgatcaattatatacatacataaaacttcctaatatttcacttagtattgctattactatgttcttggggcagaagctcagtctgtcagatacattacgagagactggtgtctccataattgtgcttaggactatgttgcatgaatggataaactgttaagcaggaacctaggagagctagggtgacaaagttcaagtccattaaaactagcaagacatattccttacagctcatgcacgagtcaccgtcataagatgtttatggttaaggaaagcagcttattgatacctgcaaggacaaatttctacagaaacacaatgtccagatgacccaatatcccatgacaatgtatgcttttaagatagcaggctggtctcggactcctgacctccggtgatccacctgcctcggccttccaaagcgctgtcaatacaggcgtaagccattgcgcctggccaaggatagctttaaatcaacaaagtaataagttttgttacagtgtcagcccacccgcaggtagacataccttagcttttacgtaggctttggccgggcgcggtggctcacgcctgtaatcccagcactttgggaggccgaggcaggtgg

SEQ ID NO: 327186 - DNA, 3055 bp, Homo sapiens
actgtgttgattcaaggtttaatggatttagggctgtgcaggatgtgctttgtttaaaatgtgtttgcaggcagtatgcttggtaaaagtcatcaccattctccagtctcaaataccaagggacacaatgcactgcagaaggccacagggacctctgccccagaaagcctgggtattgtccaaggtttctgcctgctgagacagcctgagatatggcctcatgggaagggaaagacctgactgtcccccagcccaacacccgtaaagagtctgtgctgaggaggattagtgaaagaggaagacctctttgcagttgagataagaggaaggcatctgtctcctgctcgtcctggcaatggaacgtctcgctgtaaaacctgattgtacattctatttactgagataggagaaaaccgccttatggctggaggtgagacatgctggcggcaatactgctctttactgcactgagatgtttgtgtaaagtcaaacataaacctggcctacatgcacattgaggcacagcacctttccttaaacttatttatgacacagagacctttgcttacgttttcctgctgaccctctccccaccattagcctgtagtcctgccacattcccctcactgagatggtagagagagtgatcaataaatactgagggaactcagagaccagtgccgatgcgggtcctccgtatgctgagcgccggtcctctgggcccagtgttctttctctatactttgtctctgtgtcttatttcttttctcagtctcttatcccagctgatgagaaatagccacaggtgtggagggactggccccccttcagggttttatgccttgggcttaggttgtaatttggcagggcagccttccaccctttggcacagagctgggtgttccaaagaccacaaggggttttaggccctggaccccggcatgttccaagactctttatattatgtcagactagcaagccctgcctcagcttttccccaacatggaacgctgttctaaaagcacccatgattcttttttttcttttttttcttttttttttttttcagatggaatggagtttcgctcttgttgctcaggctggagtgcaatggtgtgatctcggctcactgcaacctccgcctcccgggttcaagcgattctcctgcctcagcctctcgagtagctgagattacagagtattgcccgggctgtgagtgcagtctcatgatcttgggtcactgcaacctctgtttcctgggttcaagtgattcttgtgcctcagcatcccacgtagctgagattacaggattgacttctaaagactcttggtacgtgaggaagaaacccggaagaggaagaggagagcaaaggagtcagggatggctttttctcagggtctattgacattcagggatgtggccatagaattctctcaggaggagtggaaatgcctggaccctgctcagaggactctatacagggacgtgatgctggagaattataggaacctggtctccctggaaaggagaatcacttgaacccaggaggaggaggttgtggtgagccgagattgcgccattgccctccagcctgggcaataacagtgaaaatctgtctcaaaaagaaaagaaaagaaaaaaagatatatactcccctaagaaaagaaaaaaagctatatactcccctcacaaactggggacctcaagatctccaccctaaaatagttattttgaatttccccctggcaatgtaaaccgagagcttatctgcacaggtgtgggacagaaccaatccctctgcacacctgagacaaatgcctatctgattgcttcccctgccctattgtttacataaaaacgcagggtcactgaggcagtcgaaggcataagtgactattcctcctcccgctctcacatataaattgtgtatttagtgaaaggttgatcaaagactcaaagaatgtgatcatttgttatctacctgtgacccggaagccccccaattccagttattccacctttccagactgaaccaatgcatatcttacatgtattgattgatgtattatgtctctgcaaaatgtgtaaaaccaaactgcagcctgaacaccttgggcacacattgtcaggacctcctgaggctgtgtcacgggggcatttttaaccttggcaaaatagatttctaaattgactgagacctagtagatacttttagttcacaagctcatgaacgcagaagaaattgagagaataagaaaaaagctaggtgtcatggaaagcacgaaatcagttccaaaatctgaactccttcatatttattcaacatagggaaatgctcttcaactttgtgtgattagattccatttgcgaatgatatatatttctagtatttgattaaaataacccattctatgtaattttagccaacttaaactgcaaataataaatgatcaattatatacatacataaaacttcctaatatttcacttagtattgctattactatgttcttggggcagaagctcagtctgtcagatacattacgagagactggtgtctccataattgtgcttaggactatgttgcatgaatggataaactgttaagcaggaacctaggagagctagggtgacaaagttcaagtccattaaaactagcaagacatattccttacagctcatgcacgagtcaccgtcataagatgtttatggttaaggaaagcagcttattgatacctgcaaggacaaatttctacagaaacacaatgtccagatgacccaatatcccatgacaatgtatgcttttaagatagcaggctggtctcggactcctgacctccggtgatccacctgcctcggccttccaaagcgctgtcaatacaggcgtaagccattgcgcctggccaaggatagctttaaatcaacaaagtaataagttttgttacagtgtcagcccacccgcaggtagacataccttagcttttacgtaggctttggccgggcgcggtggctcacgcctgtaatcccagcactttgggaggccgaggcaggtgg

SEQ ID NO: 327187 - DNA, 2014 bp, Homo sapiens
ggatagcgtggagtgacggtgccaccgcggcgcatggagtttcgctcttgttgctcaggctggagtgcaatggtgtgatctcggctcactgcaacctccgcctcccgggttcaagcgattctcctgcctcagcctctcgagtagctgagattacagagtattgcccgggctgtgagtgcagtctcatgatcttgggtcactgcaacctctgtttcctgggttcaagtgattcttgtgcctcagcatcccacgtagctgagattacaggattgacttctaaagactcttggtacgtgaggaagaaacccggaagaggaagaggagagcaaaggagtcagggatggctttttctcagggtctattgacattcagggatgtggccatagaattctctcaggaggagtggaaatgcctggaccctgctcagaggactctatacagggacgtgatgctggagaattataggaacctggtctccctggaaaggagaatcacttgaacccaggaggaggaggttgtggtgagccgagattgcgccattgccctccagcctgggcaataacagtgaaaatctgtctcaaaaagaaaagaaaagaaaaaaagatatatactcccctaagaaaagaaaaaaagctatatactcccctcacaaactggggacctcaagatctccaccctaaaatagttattttgaatttccccctggcaatgtaaaccgagagcttatctgcacaggtgtgggacagaaccaatccctctgcacacctgagacaaatgcctatctgattgcttcccctgccctattgtttacataaaaacgcagggtcactgaggcagtcgaaggcataagtgactattcctcctcccgctctcacatataaattgtgtatttagtgaaaggttgatcaaagactcaaagaatgtgatcatttgttatctacctgtgacccggaagccccccaattccagttattccacctttccagactgaaccaatgcatatcttacatgtattgattgatgtattatgtctctgcaaaatgtgtaaaaccaaactgcagcctgaacaccttgggcacacattgtcaggacctcctgaggctgtgtcacgggggcatttttaaccttggcaaaatagatttctaaattgactgagacctagtagatacttttagttcacaagctcatgaacgcagaagaaattgagagaataagaaaaaagctaggtgtcatggaaagcacgaaatcagttccaaaatctgaactccttcatatttattcaacatagggaaatgctcttcaactttgtgtgattagattccatttgcgaatgatatatatttctagtatttgattaaaataacccattctatgtaattttagccaacttaaactgcaaataataaatgatcaattatatacatacataaaacttcctaatatttcacttagtattgctattactatgttcttggggcagaagctcagtctgtcagatacattacgagagactggtgtctccataattgtgcttaggactatgttgcatgaatggataaactgttaagcaggaacctaggagagctagggtgacaaagttcaagtccattaaaactagcaagacatattccttacagctcatgcacgagtcaccgtcataagatgtttatggttaaggaaagcagcttattgatacctgcaaggacaaatttctacagaaacacaatgtccagatgacccaatatcccatgacaatgtatgcttttaagatagcaggctggtctcggactcctgacctccggtgatccacctgcctcggccttccaaagcgctgtcaatacaggcgtaagccattgcgcctggccaaggatagctttaaatcaacaaagtaataagttttgttacagtgtcagcccacccgcaggtagacataccttagcttttacgtaggctttggccgggcgcggtggctcacgcctgtaatcccagcactttgggaggccgaggcaggtgg

SEQ ID NO: 327188 - DNA, 1774 bp, Homo sapiens
  misc_feature (1774)..(1774): n is a, c, g, or t
ggatagcgtggagtgacggtgccaccgcggcgcagtattgcccgggctgtgagtgcagtctcatgatcttgggtcactgcaacctctgtttcctgggttcaagtgattcttgtgcctcagcatcccacgtagctgagattacaggattgacttctaaagactcttggtacgtgaggaagaaacccggaagaggaagaggagagcaaaggagtcagggatggctttttctcagggtctattgacattcagggatgtggccatagaattctctcaggaggagtggaaatgcctggaccctgctcagaggactctatacagggacgtgatgctggagaattataggaacctggtctccctggaaaggagaatcacttgaacccaggaggaggaggttgtggtgagccgagattgcgccattgccctccagcctgggcaataacagtgaaaatctgtctcaaaaagaaaagaaaagaaaaaaagatatatactcccctaagaaaagaaaaaaagctatatactcccctcacaaactggggacctcaagatctccaccctaaaatagttattttgaatttccccctggcaatgtaaaccgagagcttatctgcacaggtgtgggacagaaccaatccctctgcacacctgagacaaatgcctatctgattgcttcccctgccctattgtttacataaaaacgcagggtcactgaggcagtcgaaggcataagtgactattcctcctcccgctctcacatataaattgtgtatttagtgaaaggttgatcaaagactcaaagaatgtgatcatttgttatctacctgtgacccggaagccccccaattccagttattccacctttccagactgaaccaatgcatatcttacatgtattgattgatgtattatgtctctgcaaaatgtgtaaaaccaaactgcagcctgaacaccttgggcacacattgtcaggacctcctgaggctgtgtcacgggggcatttttaaccttggcaaaatagatttctaaattgactgagacctagtagatacttttagttcacaagctcatgaacgcagaagaaattgagagaataagaaaaaagctaggtgtcatggaaagcacgaaatcagttccaaaatctgaactccttcatatttattcaacatagggaaatgctcttcaactttgtgtgattagattccatttgcgaatgatatatatttctagtatttgattaaaataacccattctatgtaattttagccaacttaaactgcaaataataaatgatcaattatatacattaaaaaaaaaaaaaaaaaaaaaaaaaaaaaaaaaaaacaaaaaaacaaaaaaaaaaacaaaacacagcaaaacaaacacaaaaggagacaagaaacaagaaaacaagcaacgaagacgcgaaaaacaagacaaacaaaccgagaacagagaccacgagaagacgaaagaggagaaaaaaccgaacaaaacgagagcagagagaagaacaggcaacggaccgaacgcttcggcaccagaaccaaggaagcaagaaagcaagacaagacgagaacaagcgggaaaccaaggatagagaacgaaaccacgagtcagaaaggacagaagacagagagagagcgaggacacatggcgagaaagaacaagaagcgggaagacgaccggaagaaggtaaaggaagcagaagatagcgaagcgagagctaattaacggaggacgacagacacaaacacacgcccgggcaccgcgcgggggn

SEQ ID NO: 327189 - DNA, 1445 bp, Homo sapiens
gattgacttctaaagactcttggtatgtgaggaagaaacctggaagaggaagaggaaagcaaaggagtcagggatggctcttcctcagggtctattgacattcagggatgtggccatagaattctctcaggaggagtggaaatgcctggaccctgctcagaggactctatacagggacgtgatgctggagaattataggaacctggtctccctggagttgtcaggggagtgtccattggcagcacctgcctcctgagtgtctcccaggccatcaccatcagccccaggagctcaggtgggcagagcttaaagggaacgcccccaagcacgctggctcctgtgtgttcctcagctggctcctccctggtcaatatcattgttctcatgcacgtgaccggcaagtggagcaacaaaaataccacgaagacaaaagatctgggatactgttctgctgctgatcacgagggcaccagagagtcgctgacgcggcactgctgtccttccctgatgtgatctgcctggggctcatgctctggggcagcagctccatcgtttgcatcctgcacaggcacaagcggcgggtccagcacattcataggaccagcgtgtcccccacatcctcccctgagtccggagctaccaaaaccatcctcctggtgagcacgtttgtgtccttttacactctctcttcacctttcaagtttgtttggctcttttgaataatcccagtcagctggtggtgaacatctctgcaatgatcagtgcaggtttcccaactgtcagccgctttcttctcatgagtggagactcctgtgtatccaagctttgctttgcttagataagtaacacaaaaccccctaatcttatcagaaatatgtgaattggacatgtttgtacaatgtttatgtttcttcattgatctctagagacccataaacacggttatgaaacgaggcttgttagtgctgtgcttgccagcaggggccactgttttattctgtacctcctgatcccccctccaaccacaccgccctggagcagctctgtggaaaaagtggaatcagcttagaggttttggagaggaagatactgaaacgtaaacgatataagaaagtcacggtgcacaaatatacatacctcatttctgtgtcccttggagcagatgggggaatgtgcgcagatgcgaagctcttgctgtaatttatgtgacaaataataaaatatatgttttgtcggatccagaaatctcatgccttcagccaacatccataaactgacagtctaacttgttggcttgtaagtaaggtaaaaatctaaaactggccaggcgcggtgtcacgcctgtaatcccagcactttggagggccgaagcagacggattaactgaggtcgagaatttgagaccagcctgacaaacatggagaaacctcatctctactaaaaaa

SEQ ID NO: 327190 - DNA, 2014 bp, Homo sapiens
actgtgttgattcaaggtttaatggatttagggctgtgcaggatgtgctttgtttaaaatgtgtttgcaggcagtatgcttggtaaaagtcatcaccattctccagtctcaaataccaagggacacaatgcactgcagaaggccacagggacctctgccccagaaagcctgggtattgtccaaggtttctgcctgctgagacagcctgagatatggcctcatgggaagggaaagacctgactgtcccccagcccaacacccgtaaagagtctgtgctgaggaggattagtgaaagaggaagacctctttgcagttgagataagaggaaggcatctgtctcctgctcgtcctggcaatggaacgtctcgctgtaaaacctgattgtacattctatttactgagataggagaaaaccgccttatggctggaggtgagacatgctggcggcaatactgctctttactgcactgagatgtttgtgtaaagtcaaacataaacctggcctacatgcacattgaggcacagcacctttccttaaacttatttatgacacagagacctttgcttacgttttcctgctgaccctctccccaccattagcctgtagtcctgccacattcccctcactgagatggtagagagagtgatcaataaatactgagggaactcagagaccagtgccgatgcgggtcctccgtatgctgagcgccggtcctctgggcccagtgttctttctctatactttgtctctgtgtcttatttcttttctcagtctcttatcccagctgatgagaaatagccacaggtgtggagggactggccccccttcagggttttatgccttgggcttaggttgtaatttggcagggcagccttccaccctttggcacagagctgggtgttccaaagaccacaaggggttttaggccctggaccccggcatgttccaagactctttatattatgtcagactagcaagccctgcctcagcttttccccaacatggaacgctgttctaaaagcacccatgattcttttttttcttttttttcttttttttttttttcagatggaatggagtttcgctcttgttgctcaggctggagtgcaatggtgtgatctcggctcactgcaacctccgcctcccgggttcaagcgattctcctgcctcagcctctcgagtagctgagattacagagtattgcccgggctgtgagtgcagtctcatgatcttgggtcactgcaacctctgtttcctgggttcaagtgattcttgtgcctcagcatcccacgtagctgagattacaggattgacttctaaagactcttggtacgtgaggaagaaacccggaagaggaagaggagagcaaaggagtcagggatggctttttctcagggtctattgacattcagggatgtggccatagaattctctcaggaggagtggaaatgcctggaccctgctcagaggactctatacagggacgtgatgctggagaattataggaacctggtctccctggacagggtcttgctgtgttgttgaaattcatcttgatctcctgagctcaagagatcctcctcagtctcccaagtagctgagattacaggtgccaaccaccatacctaattattggcttttatttttaagatttttgcatatgtgtggccgggcttggtggctcacgcctgtaatcccagcactttgggaggccaaggtgggtggatcacgaggtcaggcgatcgagaccagcccggccaacatggtgaaaccccgtctctactaaaaatagaaaaattagccgggtgtggtggcatgggcctgtaatcccagctacttgggaggctgaagcaggaggatcacatgaacctgggaatcggaggttgcagtgagccaagatcaccactgcacatctgcctggtgacagagtgagactccatctcaaaaaaataaataaaataaaatgaaatatttgcatatgtgtgtccttaaggctaatatgagtctatgagt

SEQ ID NO: 327191 - DNA, 2189 bp, Homo sapiens
gattgacttctaaagactcttggtatgtgaggaagaaacctggaagaggaagaggaaagcaaaggagtcagggatggctcttcctcagggtctattgacattcagggatgtggccatagaattctctcaggaggagtggaaatgcctggaccctgctcagaggactctatacagggacgtgatgctggagaattataggaacctggtctccctggagttgtcaggggagtgtccattggcagcacctgcctcctgagtgtctcccaggccatcaccatcagccccaggagctcaggtgggcagagcttaaagggaacgcccccaagcacgctggctcctgtgtgttcctcagctggctcctccctggtcaatatcattgttctcatgcacgtgaccggcaagtggagcaacaaaaataccacgaagacaaaagatctgggatactgttctgctgctgatcacgagggcaccagagagtcgctgacgcggcactgctgtccttccctgatgtgatctgcctggggctcatgctctggggcagcagctccatcgtttgcatcctgcacaggcacaagcggcgggtccagcacattcataggaccagcgtgtcccccacatcctcccctgagtccggagctaccaaaaccatcctcctggagcaggaaaggacaaggagtccccgaagctgacactgagttcatggggttgagctgacagcggccaacaggctgtggtaaacgctaatgaaacgagccttgttagtgctgtgcttgccagcaggggtcactgtttccttctgtacctcctgatccctccctccacccacaccgcactgcagcagctctggggaaaaagtggaatcagcttagaagtttttgggaggaagacactgaaagtcctacttttttttttcagatgggatctcactctgtcggccaggctggaatgcaatggtgccaacttggctcagtgcaacctccccaccccgggctccaacaatcctcccatctcagcctctgaagtagctgggactacaggcgttatctcctgtccggggaagaggtgggcctctctccgtcgtgggaggagctctgaacttctccttcatccagggatgggccccagggacccaccagtggggctgggagaagcccccctcagcaggaagacagaggtgcctgggtggccgaggcctggaaggtctgcaccatggtgcacagaggccccggagctgggtgaggccagaaagctgctctggggtcagcggggaatgtgcctgctgaatctgtacctgagctacgtcttcacaaatggcctcagacctagagtgcagggagatcccctggcttttctgaagtggtggcaggtggtctcctgggtagcaggatctgggctgcttacttcccttacccagtgagggcccgcggggagctcttaagttgggcatcatggggctgcgtgatgtggctgctgtgcccacatcagagggtttttgtttcttttccaaagtcaagctgcactaatctagaccagggatccccacccctgggctgcagaccggtccccatgggtggcctgttaggaactggaccgcacagcaggaggtgagcagtgggtgagtgcgcgtgaccacctgagctctgccttctgtgagatcagcagcgccactgcatctcagaggaatgccaaccctactgtgaactgtgcatgcgagggatctgggttgcatgctctttatgagatcaaactaatgcctgatgatctcaggtggaacagtttaatcctgaaaccatccccccatctgtggaaaaactgccttccactaaaccagtccctggtgccaaaaacactgggaaccgctaatctagacagttctctgctaaggaagcacgtggttgagaagcatcagaatcgttcccacggaccatgctccggagtctcagcaggctcctgcagtgtgtttatccgtgcatcatgaaggaccctcatacggctgacgtgccttggctgatgcgaataacactgcagcaagcgtggcagtgcagatagctcttggaaatacccatttccttcagacgcatactcagaggtaggattgctggattgtttggtcattttgatttttaaaattaaaaagaattttaattctcatattgttttgagtaaaattaaattataacttgtaaggc

SEQ ID NO: 327192 - DNA, 1633 bp, Homo sapiens
actgtgttgattcaaggtttaatggatttagggctgtgcaggatgtgctttgtttaaaatgtgtttgcaggcagtatgcttggtaaaagtcatcaccattctccagtctcaaataccaagggacacaatgcactgcagaaggccacagggacctctgccccagaaagcctgggtattgtccaaggtttctgcctgctgagacagcctgagatatggcctcatgggaagggaaagacctgactgtcccccagcccaacacccgtaaagagtctgtgctgaggaggattagtgaaagaggaagacctctttgcagttgagataagaggaaggcatctgtctcctgctcgtcctggcaatggaacgtctcgctgtaaaacctgattgtacattctatttactgagataggagaaaaccgccttatggctggaggtgagacatgctggcggcaatactgctctttactgcactgagatgtttgtgtaaagtcaaacataaacctggcctacatgcacattgaggcacagcacctttccttaaacttatttatgacacagagacctttgcttacgttttcctgctgaccctctccccaccattagcctgtagtcctgccacattcccctcactgagatggtagagagagtgatcaataaatactgagggaactcagagaccagtgccgatgcgggtcctccgtatgctgagcgccggtcctctgggcccagtgttctttctctatactttgtctctgtgtcttatttcttttctcagtctcttatcccagctgatgagaaatagccacaggtgtggagggactggccccccttcagggttttatgccttgggcttaggttgtaatttggcagggcagccttccaccctttggcacagagctgggtgttccaaagaccacaaggggttttaggccctggaccccggcatgttccaagactctttatattatgtcagactagcaagccctgcctcagcttttccccaacatggaacgctgttctaaaagcacccatgattcttttttttcttttttttcttttttttttttttcagatggaatggagtttcgctcttgttgctcaggctggagtgcaatggtgtgatctcggctcactgcaacctccgcctcccgggttcaagcgattctcctgcctcagcctctcgagtagctgagattacagagtattgcccgggctgtgagtgcagtctcatgatcttgggtcactgcaacctctgtttcctgggttcaagtgattcttgtgcctcagcatcccacgtagctgagattacaggattgacttctaaagactcttggtacgtgaggaagaaacccggaagaggaagaggagagcaaaggagtcagggatggctttttctcagggtctattgacattcagggatgtggccatagaattctctcaggaggagtggaaatgcctggaccctgctcagaggactctatacagggacgtgatgctggagaattataggaacctggtctccctggatatctcttccaaatgcacgatgaaggagttcttgtcaacagcgcaaggcaacagagaagtgttccatgcagggacattgcaaatacatgaaagtcatcacaatggagat

SEQ ID NO: 327193 - DNA, 1631 bp, Homo sapiens
actgtgttgattcaaggtttaatggatttagggctgtgcaggatgtgctttgtttaaaatgtgtttgcaggcagtatgcttggtaaaagtcatcaccattctccagtctcaaataccaagggacacaatgcactgcagaaggccacagggacctctgccccagaaagcctgggtattgtccaaggtttctgcctgctgagacagcctgagatatggcctcatgggaagggaaagacctgactgtcccccagcccaacacccgtaaagagtctgtgctgaggaggattagtgaaagaggaagacctctttgcagttgagataagaggaaggcatctgtctcctgctcgtcctggcaatggaacgtctcgctgtaaaacctgattgtacattctatttactgagataggagaaaaccgccttatggctggaggtgagacatgctggcggcaatactgctctttactgcactgagatgtttgtgtaaagtcaaacataaacctggcctacatgcacattgaggcacagcacctttccttaaacttatttatgacacagagacctttgcttacgttttcctgctgaccctctccccaccattagcctgtagtcctgccacattcccctcactgagatggtagagagagtgatcaataaatactgagggaactcagagaccagtgccgatgcgggtcctccgtatgctgagcgccggtcctctgggcccagtgttctttctctatactttgtctctgtgtcttatttcttttctcagtctcttatcccagctgatgagaaatagccacaggtgtggagggactggccccccttcagggttttatgccttgggcttaggttgtaatttggcagggcagccttccaccctttggcacagagctgggtgttccaaagaccacaaggggttttaggccctggaccccggcatgttccaagactctttatattatgtcagactagcaagccctgcctcagcttttccccaacatggaacgctgttctaaaagcacccatgattcttttttttcttttttttcttttttttttttttcagatggaatggagtttcgctcttgttgctcaggctggagtgcaatggtgtgatctcggctcactgcaacctccgcctcccgggttcaagcgattctcctgcctcagcctctcgagtagctgagattacagagtattgcccgggctgtgagtgcagtctcatgatcttgggtcactgcaacctctgtttcctgggttcaagtgattcttgtgcctcagcatcccacgtagctgagattacaggattgacttctaaagactcttggtacgtgaggaagaaacccggaagaggaagaggagagcaaaggagtcagggatggctttttctcagggtctattgacattcagggatgtggccatagaattctctcaggaggagtggaaatgcctggaccctgctcagaggactctatacagggacgtgatgctggagaattataggaacctggtctccctggaaacggggtttcaccgtgtgaaccaggatggtctcgatctcctgacctcgtgatcctcctgcctcagcctcccaaagtgctgggattacaggtgtgaaccaccatgcc

SEQ ID NO: 327194 - DNA, 1660 bp, Homo sapiens
ttgagccacagtgcccgaccaagattcctccattctataacccttgaatgggactgttgtgtgagagggaggattgaaatgaactgtccgaatgtgatttatctgttgctcattctcttcctggcaggagcaggaaaggacaaggagtccccgaagctgacactgagttcatggggttgagctgacagcggccaacaggctgtggtaaacgctaatgaaacgagccttgttagtgctgtgcttgccagcaggggtcactgtttccttctgtacctcctgatccctccctccacccacaccgcactgcagcagctctggggaaaaagtggaatcagcttagaagtttttgggaggaagacactgaaagtcctacttttttttttcagatgggatctcactctgtcggccaggctggaatgcaatggtgccaacttggctcagtgcaacctccccaccccgggctccaacaatcctcccatctcagcctctgaagtagctgggactacaggcgttatctcctgtccggggaagaggtgggcctctctccgtcgtgggaggagctctgaacttctccttcatccagggatgggccccagggacccaccagtggggctgggagaagcccccctcagcaggaagacagaggtgcctgggtggccgaggcctggaaggtctgcaccatggtgcacagaggccccggagctgggtgaggccagaaagctgctctggggtcagcggggaatgtgcctgctgaatctgtacctgagctacgtcttcacaaatggcctcagacctagagtgcagggagatcccctggcttttctgaagtggtggcaggtggtctcctgggtagcaggatctgggctgcttacttcccttacccagtgagggcccgcggggagctcttaagttgggcatcatggggctgcgtgatgtggctgctgtgcccacatcagagggtttttgtttcttttccaaagtcaagctgcactaatctagaccagggatccccacccctgggctgcagaccggtccccatgggtggcctgttaggaactggaccgcacagcaggaggtgagcagtgggtgagtgcgcgtgaccacctgagctctgccttctgtgagatcagcagcgccactgcatctcagaggaatgccaaccctactgtgaactgtgcatgcgagggatctgggttgcatgctctttatgagatcaaactaatgcctgatgatctcaggtggaacagtttaatcctgaaaccatccccccatctgtggaaaaactgccttccactaaaccagtccctggtgccaaaaacactgggaaccgctaatctagacagttctctgctaaggaagcacgtggttgagaagcatcagaatcgttcccacggaccatgctccggagtctcagcaggctcctgcagtgtgtttatccgtgcatcatgaaggaccctcatacggctgacgtgccttggctgatgcgaataacactgcagcaagcgtggcagtgcagatagctcttggaaatacccatttccttcagacgcatactcagaggtaggattgctggattgtttggtcattttgatttttaaaattaaaaagaattttaattctcatattgttttgagtaaaattaaattataacttgtaaggc

SEQ ID NO: 327195 - DNA, 1213 bp, Homo sapiens
ggatagcgtggagtgacggtgccaccgcggcgcatggagtttcgctcttgttgctcaggctggagtgcaatggtgtgatctcggctcactgcaacctccgcctcccgggttcaagcgattctcctgcctcagcctctcgagtagctgagattacagagtattgcccgggctgtgagtgcagtctcatgatcttgggtcactgcaacctctgtttcctgggttcaagtgattcttgtgcctcagcatcccacgtagctgagattacaggattgacttctaaagactcttggtacgtgaggaagaaacccggaagaggaagaggagagcaaaggagtcagggatggctttttctcagggtctattgacattcagggatgtggccatagaattctctcaggaggagtggaaatgcctggaccctgctcagaggactctatacagggacgtgatgctggagaattataggaacctggtctccctgggtgaggataacttccctccagaagtgggaatgtgcccttgtgtatctttgtattttctcttgtttttagatacagtgtcttgctctgtcacccagggtagagtgcaatggtgtgatcatggctcactgcagtcttgaattccttggctcaagtgattgtcccacctcagcctcccccggtagctggtacaggtgcatgccaccatgtttgggcaaattttttagtttgttttctttccagacagggtcttgctgtgttgttgaaattcatcttgatctcctgagctcaagagatcctcctcagtctcccaagtagctgagattacaggtgccaaccaccatacctaattattggcttttatttttaagatttttgcatatgtgtggccgggcttggtggctcacgcctgtaatcccagcactttgggaggccaaggtgggtggatcacgaggtcaggcgatcgagaccagcccggccaacatggtgaaaccccgtctctactaaaaatagaaaaattagccgggtgtggtggcatgggcctgtaatcccagctacttgggaggctgaagcaggaggatcacatgaacctgggaatcggaggttgcagtgagccaagatcaccactgcacatctgcctggtgacagagtgagactccatctcaaaaaaataaataaaataaaatgaaatatttgcatatgtgtgtccttaaggctaatatgagtctatgagt

SEQ ID NO: 327196 - DNA, 821 bp, Homo sapiens
gtggcggtgaatagataagcatcgtgactggggaagctcaggtgagcaccacctgagggagagggtctggcagtgaataaataagcagtgtgactgggaaattgtgaagctcaggtgagcgccaccacctcctgggttgctttagtgtccagcagctgcctagaactatgttgaatgaagagctctctgggttctggaagtgggacagctttgggtggggcagtgttaccaccgtcagcctggcttgggtctgcagggtccagggcctcggtcactttgcttctctctccacagctcactcctgggggcaaagcggcgcaggccggagtggccgtgggtgactgggtgctgagcatcgatggcgagaatgcgggtagcctcacacacatcgaagctcagaacaagatccgggcctgcggggagcgcctcagcctgggcctcagcagggcccagccggttcagagcaaaccgcagaaggcctccgcccccgccgcggaccctccgcggtacacctttgcacccagcgtctccctcaacaagacggcccggccctttggggcgcccccgcccgctgacagcgccccgcagcagaatggacagccgctccgaccgctggtcccagatgccagcaagcagcggctgatggagaacacagaggacctggccgcccacctgggttcatctgacactgccttccctctttgccctgtggtactgctgtctgccaggtctgtgctgccttgggcatggaataaacattctcagccctgcttgctctgcctgtcttctatctttgtggacctggtttgcatttggggtgt

SEQ ID NO: 327197 - DNA, 1788 bp, Homo sapiens
cttttttttaagcagggctgagaatgtttattccatgcccaaggcagcacagacctggcagacagcagtaccacagggcaaagagggagggcggccgatcccaacgaggctccctggagcccgacgcagagcagcgccctggccgggccaagcaggagccggcatcatggattccttcaaagtagtgctggaggggccagcaccttggggcttccggctgcaagggggcaaggacttcaatgtgcccctctccatttcccggctcactcctgggggcaaagcggcgcaggccggagtggccgtgggtgactgggtgctgagcatcgatggcgagaatgcgggtagcctcacacacatcgaagctcagaacaagatccgggcctgcggggagcgcctcagcctgggcctcagcagggcccagccggttcagagcaaaccgcagaaggcctccgcccccgccgcggaccctccgcggtacacctttgcacccagcgtctccctcaacaagacggcccggccctttggggcgcccccgcccgctgacagcgccccgcagcagaatggacagccgctccgaccgctggtcccagatgccagcaagcagcggctgatggagaacacagaggactggcggccgcggccggggacaggccagtcgcgttccttccgcatccttgcccacctcacaggcaccgagttcatgcaagacccggatgaggagcacctgaagaaatcaagccaggtgcccaggacagaagccccagccccagcctcatctacaccccaggagccctggcctggccctaccgcccccagccctaccagccgcccgccctgggctgtggaccctgcgtttgccgagcgctatgccccggacaaaacgagcacagtgctgacccggcacagccagccggccacgcccacgccgctgcagagccgcacctccattgtgcaggcagctgccggaggggtgccaggagggggcagcaacaacggcaagactcccgtgtgtcaccagtgccacaaggtcatccggggccgctacctggtggcgctgggccacgcgtaccacccggaggagtttgtgtgtagccagtgtgggaaggtcctggaagagggtggcttctttgaggagaagggcgccatcttctgcccaccatgctatgacgtgcgctatgcacccagctgtgccaagtgcaagaagaagattacaggcgagatcatgcacgccctgaagatgacctggcacgtgcactgctttacctgtgctgcctgcaagacgcccatccggaacagggccttctacatggaggagggcgtgccctattgcgagcgagactatgagaagatgtttggcacgaaatgccatggctgtgacttcaagatcgacgctggggaccgcttcctggaggccctgggcttcagctggcatgacacctgcttcgtctgtgcgatatgtcagatcaacctggaaggaaagaccttctactccaagaaggacaggcctctctgcaagagccatgccttctctcatgtgtgagccccttctgcccacagctgccgcggtggcccctagcctgaggggcctggagtcgtggccctgcatttctgggtagggctggcaatggttgccttaaccctggctcctggcccgagcctggggctccctgggccctgccccacccaccttatcctcccaccccactccctccaccaccacagcacaccggtgctggccacaccagccccctttcacctccagtgccacaataaacctgtacccagctg

SEQ ID NO: 327198 - DNA, 3217 bp, Homo sapiens
cttttttttaagcagggctgagaatgtttattccatgcccaaggcagcacagacctggcagacagcagtaccacagggcaaagagggagggcggccgatcccaacgaggctccctggagcccgacgcagagcagcgccctggccgggccaagcaggagccggcatcatggattccttcaaagtagtgctggaggggccagcaccttggggcttccggctgcaagggggcaaggacttcaatgtgcccctctccatttcccggctcactcctgggggcaaagcggcgcaggccggagtggccgtgggtgactgggtgctgagcatcgatggcgagaatgcgggtagcctcacacacatcgaagctcagaacaagatccgggcctgcggggagcgcctcagcctgggcctcagcagggcccagccggttcagagcaaaccgcagaaggcctccgcccccgccgcggaccctccgcggtacacctttgcacccagcgtctccctcaacaagacggcccggccctttggggcgcccccgcccgctgacagcgccccgcagcagaatggacagccgctccgaccgctggtcccagatgccagcaagcagcggctgatggagaacacagaggactggcggccgcggccggggacaggccagtcgcgttccttccgcatccttgcccacctcacaggcaccgagttcatgcaagacccggatgaggagcacctgaagaaatcaagccaggtgcccaggacagaagccccagccccagcctcatctacaccccaggagccctggcctggccctaccgcccccagccctaccagccgcccgccctgggctgtggaccctgcgtttgccgagcgctatgccccggacaaaacgagcacagtgctgacccggcacagccagccggccacgcccacgccgctgcagagccgcacctccattgtgcaggcagctgccggaggggtgccaggagggggcagcaacaacggcaagactcccgtgtgtcaccagtgccacaaggtcatccggggccgctacctggtggcgctgggccacgcgtaccacccggaggagtttgtgtgtagccagtgtgggaaggtcctggaagagggtggcttctttgaggagaagggcgccatcttctgcccaccatgctatgacgtgcgctatgcacccagctgtgccaagtgcaagaagaagattacaggcgagatcatgcacgccctgaagatgacctggcacgtgcactgctttacctgtgctgcctgcaagacgcccatccggaacagggccttctacatggaggagggcgtgccctattgcgagcgagactatgagaagatgtttggcacgaaatgccatggctgtgacttcaagatcgacgctggggaccgcttcctggaggccctgggcttcagctggcatgacacctgcttcgtctgtgcgatatgtcagatcaacctggaaggaaagaccttctactccaagaaggacaggcctctctgcaagagccatgccttctctcatgtgtgagccccttctgcccacagctgccgcggtggcccctagcctgaggggcctggagtcgtggccctgcatttctgggtagggctggcaatggttgccttaaccctggctcctggcccgagcctggggctccctgggccctgccccacccaccttatcctcccaccccactccctccaccaccacagcacaccggtgctggccacaccagccccctttcacctccagtgccacaataaacctgtacccagctgaaaaaaaaaaaaaaaaaaaaaaaaaaaaaaaaacaaaaacaagaaaaaaaaaaaaaaagaaaacacaaacaaaacagaacgaaaggggggcgcccaacacgaacctacacccagcgaggcacacagaactacaccgcgccacacagccgcaccaaaaagagcgaccacacacacggcgcaccacaaaacacacaccaccgagcgcgccgtcccaccacacacgcagcagagacacacaccgcacgcgaacgctactaagaagacaacccaccacatcacggacgcgagcgaccaacgagtcggacagcaacacacagcagacagtcacagccagccgaagcgaaaacaacaagcccagccgcgggaactgcgggcaaaacacccggaacagcgcgccgagcaagcatgtccagcggagcattcagaacatatccggcggcgcataagcaacacccgacgcaacgaccgcacagcgaccgcaacccagccgacgcgacagcgacagcaggcacgcaacagacagcgcagaccaagcgacgccacacgcggcttgtgcggacgcgtggtaagctcagcgcaagcgcagacagccccgcggcgagcaaccagcaacgcagacaatagaacatgaagtacagactacaccagcgagcaactagcagaaggcgacgcgatgcagacgacagcaagcgcagtcccagccagtaacgcaacgcagagagaacaggaccagaagacgaacaccgactgagacggacgtcgcacgacacaagagagaaagcgagaccaggcgagcgaacgcaccacgcagacaacggcagcagagcccgcggagagtgggcggcgggagcggccggaggggaggcgagcaggggggaggcacgaggcaacagcgggggccggggggcggcgggcgcgagagggagcgggaggcatgcgagaggagcagaggcgaacgcgagagccgagagaaagcacaggccggacacgccagcgaagcccacgcccgctccgccggagacgccggacgcccggcggagcccgacacggacaacggcacagggaaagacggcggccggcgcgtacggcagaaagcagaagcgccagagacagcgaacagaccagcgacgagaacacgccgacaggccgacgaggcggagaggagagagcccacgaacaaagaccggcacaaacgaaacacagacacaaacaagagcacaaaaggcggcggcgcaccgaggcgatggagcgggcagggctaagaccgactgaggaggcggcacacacacgacgcacgcgcacgcacacgccgcgcgacgaggccgagcacacgagcccagaacagcagacgacgacagccagcaaaagacaacagacaagaacaggggaacacaccacagcgacacgagctgagacacacgcgacagat

SEQ ID NO: 327199 - DNA, 3416 bp, Homo sapiens
cttttttttaagcagggctgagaatgtttattccatgcccaaggcagcacagacctggcagacagcagtaccacagggcaaagagggagggcggccgatcccaacgaggctccctggagcccgacgcagagcagcgccctggccgggccaagcaggagccggcatcatggattccttcaaagtagtgctggaggggccagcaccttggggcttccggctgcaagggggcaaggacttcaatgtgcccctctccatttcccggctcactcctgggggcaaagcggcgcaggccggagtggccgtgggtgactgggtgctgagcatcgatggcgagaatgcgggtagcctcacacacatcgaagctcagaacaagatccgggcctgcggggagcgcctcagcctgggcctcagcagggcccagccggttcagagcaaaccgcagaaggcctccgcccccgccgcggaccctccgcggtacacctttgcacccagcgtctccctcaacaagacggcccggccctttggggcgcccccgcccgctgacagcgccccgcagcagaatggacagccgctccgaccgctggtcccagatgccagcaagcagcggctgatggagaacacagaggactggcggccgcggccggggacaggccagtcgcgttccttccgcatccttgcccacctcacaggcaccgagttcatgcaagacccggatgaggagcacctgaagaaatcaagctagagaccgcacaccagctaactggacattgctaggagaagctgccgttcccatccctaccccagtgggacctggaatccaactcggcagtttccacgcccccagtcatctcccgtggggccagcaggacccaggttggggggtggggccatgtcaggaagctcagccatgcagggccttgaatggcagatcttgcagccaggtgcccaggacagaagccccagccccagcctcatctacaccccaggagccctggcctggccctaccgcccccagccctaccagccgcccgccctgggctgtggaccctgcgtttgccgagcgctatgccccggacaaaacgagcacagtgctgacccggcacagccagccggccacgcccacgccgctgcagagccgcacctccattgtgcaggcagctgccggaggggtgccaggagggggcagcaacaacggcaagactcccgtgtgtcaccagtgccacaaggtcatccggggccgctacctggtggcgctgggccacgcgtaccacccggaggagtttgtgtgtagccagtgtgggaaggtcctggaagagggtggcttctttgaggagaagggcgccatcttctgcccaccatgctatgacgtgcgctatgcacccagctgtgccaagtgcaagaagaagattacaggcgagatcatgcacgccctgaagatgacctggcacgtgcactgctttacctgtgctgcctgcaagacgcccatccggaacagggccttctacatggaggagggcgtgccctattgcgagcgagactatgagaagatgtttggcacgaaatgccatggctgtgacttcaagatcgacgctggggaccgcttcctggaggccctgggcttcagctggcatgacacctgcttcgtctgtgcgatatgtcagatcaacctggaaggaaagaccttctactccaagaaggacaggcctctctgcaagagccatgccttctctcatgtgtgagccccttctgcccacagctgccgcggtggcccctagcctgaggggcctggagtcgtggccctgcatttctgggtagggctggcaatggttgccttaaccctggctcctggcccgagcctggggctccctgggccctgccccacccaccttatcctcccaccccactccctccaccaccacagcacaccggtgctggccacaccagccccctttcacctccagtgccacaataaacctgtacccagctgaaaaaaaaaaaaaaaaaaaaaaaaaaaaaaaaacaaaaacaagaaaaaaaaaaaaaaagaaaacacaaacaaaacagaacgaaaggggggcgcccaacacgaacctacacccagcgaggcacacagaactacaccgcgccacacagccgcaccaaaaagagcgaccacacacacggcgcaccacaaaacacacaccaccgagcgcgccgtcccaccacacacgcagcagagacacacaccgcacgcgaacgctactaagaagacaacccaccacatcacggacgcgagcgaccaacgagtcggacagcaacacacagcagacagtcacagccagccgaagcgaaaacaacaagcccagccgcgggaactgcgggcaaaacacccggaacagcgcgccgagcaagcatgtccagcggagcattcagaacatatccggcggcgcataagcaacacccgacgcaacgaccgcacagcgaccgcaacccagccgacgcgacagcgacagcaggcacgcaacagacagcgcagaccaagcgacgccacacgcggcttgtgcggacgcgtggtaagctcagcgcaagcgcagacagccccgcggcgagcaaccagcaacgcagacaatagaacatgaagtacagactacaccagcgagcaactagcagaaggcgacgcgatgcagacgacagcaagcgcagtcccagccagtaacgcaacgcagagagaacaggaccagaagacgaacaccgactgagacggacgtcgcacgacacaagagagaaagcgagaccaggcgagcgaacgcaccacgcagacaacggcagcagagcccgcggagagtgggcggcgggagcggccggaggggaggcgagcaggggggaggcacgaggcaacagcgggggccggggggcggcgggcgcgagagggagcgggaggcatgcgagaggagcagaggcgaacgcgagagccgagagaaagcacaggccggacacgccagcgaagcccacgcccgctccgccggagacgccggacgcccggcggagcccgacacggacaacggcacagggaaagacggcggccggcgcgtacggcagaaagcagaagcgccagagacagcgaacagaccagcgacgagaacacgccgacaggccgacgaggcggagaggagagagcccacgaacaaagaccggcacaaacgaaacacagacacaaacaagagcacaaaaggcggcggcgcaccgaggcgatggagcgggcagggctaagaccgactgaggaggcggcacacacacgacgcacgcgcacgcacacgccgcgcgacgaggccgagcacacgagcccagaacagcagacgacgacagccagcaaaagacaacagacaagaacaggggaacacaccacagcgacacgagctgagacacacgcgacagat

SEQ ID NO: 327200 - DNA, 3155 bp, Homo sapiens
cttttttttaagcagggctgagaatgtttattccatgcccaaggcagcacagacctggcagacagcagtaccacagggcaaagagggagggcggccgatcccaacgaggctccctggagcccgacgcagagcagcgccctggccgggccaagcaggagccggcatcatggattccttcaaagtagtgctggaggggccagcaccttggggcttccggctgcaagggggcaaggacttcaatgtgcccctctccatttcccggctcactcctgggggcaaagcggcgcaggccggagtggccgtgggtgactgggtgctgagcatcgatggcgagaatgcgggtagcctcacacacatcgaagctcagaacaagatccgggcctgcggggagcgcctcagcctgggcctcagcagggcccagccggttcagagcaaaccgcagaaggcctccgcccccgccgcggaccctccgcggtacacctttgcacccagcgtctccctcaacaagacggcccggccctttggggcgcccccgcccgctgacagcgccccgcagcagaatggacagccgctccgaccgctggtcccagatgccagcaagcagcggctgatggagaacacagaggactggcggccgcggccggggacaggccagtcgcgttccttccgcatccttgcccacctcacaggcaccgagttcatgcaagacccggatgaggagcacctgaagaaatcaaggccctaccgcccccagccctaccagccgcccgccctgggctgtggaccctgcgtttgccgagcgctatgccccggacaaaacgagcacagtgctgacccggcacagccagccggccacgcccacgccgctgcagagccgcacctccattgtgcaggcagctgccggaggggtgccaggagggggcagcaacaacggcaagactcccgtgtgtcaccagtgccacaaggtcatccggggccgctacctggtggcgctgggccacgcgtaccacccggaggagtttgtgtgtagccagtgtgggaaggtcctggaagagggtggcttctttgaggagaagggcgccatcttctgcccaccatgctatgacgtgcgctatgcacccagctgtgccaagtgcaagaagaagattacaggcgagatcatgcacgccctgaagatgacctggcacgtgcactgctttacctgtgctgcctgcaagacgcccatccggaacagggccttctacatggaggagggcgtgccctattgcgagcgagactatgagaagatgtttggcacgaaatgccatggctgtgacttcaagatcgacgctggggaccgcttcctggaggccctgggcttcagctggcatgacacctgcttcgtctgtgcgatatgtcagatcaacctggaaggaaagaccttctactccaagaaggacaggcctctctgcaagagccatgccttctctcatgtgtgagccccttctgcccacagctgccgcggtggcccctagcctgaggggcctggagtcgtggccctgcatttctgggtagggctggcaatggttgccttaaccctggctcctggcccgagcctggggctccctgggccctgccccacccaccttatcctcccaccccactccctccaccaccacagcacaccggtgctggccacaccagccccctttcacctccagtgccacaataaacctgtacccagctgaaaaaaaaaaaaaaaaaaaaaaaaaaaaaaaaacaaaaacaagaaaaaaaaaaaaaaagaaaacacaaacaaaacagaacgaaaggggggcgcccaacacgaacctacacccagcgaggcacacagaactacaccgcgccacacagccgcaccaaaaagagcgaccacacacacggcgcaccacaaaacacacaccaccgagcgcgccgtcccaccacacacgcagcagagacacacaccgcacgcgaacgctactaagaagacaacccaccacatcacggacgcgagcgaccaacgagtcggacagcaacacacagcagacagtcacagccagccgaagcgaaaacaacaagcccagccgcgggaactgcgggcaaaacacccggaacagcgcgccgagcaagcatgtccagcggagcattcagaacatatccggcggcgcataagcaacacccgacgcaacgaccgcacagcgaccgcaacccagccgacgcgacagcgacagcaggcacgcaacagacagcgcagaccaagcgacgccacacgcggcttgtgcggacgcgtggtaagctcagcgcaagcgcagacagccccgcggcgagcaaccagcaacgcagacaatagaacatgaagtacagactacaccagcgagcaactagcagaaggcgacgcgatgcagacgacagcaagcgcagtcccagccagtaacgcaacgcagagagaacaggaccagaagacgaacaccgactgagacggacgtcgcacgacacaagagagaaagcgagaccaggcgagcgaacgcaccacgcagacaacggcagcagagcccgcggagagtgggcggcgggagcggccggaggggaggcgagcaggggggaggcacgaggcaacagcgggggccggggggcggcgggcgcgagagggagcgggaggcatgcgagaggagcagaggcgaacgcgagagccgagagaaagcacaggccggacacgccagcgaagcccacgcccgctccgccggagacgccggacgcccggcggagcccgacacggacaacggcacagggaaagacggcggccggcgcgtacggcagaaagcagaagcgccagagacagcgaacagaccagcgacgagaacacgccgacaggccgacgaggcggagaggagagagcccacgaacaaagaccggcacaaacgaaacacagacacaaacaagagcacaaaaggcggcggcgcaccgaggcgatggagcgggcagggctaagaccgactgaggaggcggcacacacacgacgcacgcgcacgcacacgccgcgcgacgaggccgagcacacgagcccagaacagcagacgacgacagccagcaaaagacaacagacaagaacaggggaacacaccacagcgacacgagctgagacacacgcgacagat

SEQ ID NO: 327201 - DNA, 1086 bp, Homo sapiens
cttttttttaagcagggctgagaatgtttattccatgcccaaggcagcacagacctggcagacagcagtaccacagggcaaagagggagggcggccgatcccaacgaggctccctggagcccgacgcagagcagcgccctggccgggccaagcaggagccggcatcatggattccttcaaagtagtgctggaggggccagcaccttggggcttccggctgcaagggggcaaggacttcaatgtgcccctctccatttcccggctcactcctgggggcaaagcggcgcaggccggagtggccgtgggtgactgggtgctgagcatcgatggcgagaatgcgggtagcctcacacacatcgaagctcagaacaagatccgggcctgcggggagcgcctcagcctgggcctcagcagggcccagccggttcagagcaaaccgcagaaggcctccgcccccgccgcggaccctccgcggtacacctttgcacccagcgtctccctcaacaagacggcccggccctttggggcgcccccgcccgctgacagcgccccgcagcagaatggacagccgctccgaccgctggtcccagatgccagcaagcagcggctgatggagaacacagaggactggcggccgcggccggggacaggccagtcgcgttccttccgcatccttgcccacctcacaggcaccgagttcatgcaagacccggatgaggagcacctgaagaaatcaagggaaaagtatgtcctggagctgcagagcccacgctacacccgcctccgggactggcaccaccagcgctctgcccacgtgctcaacgtgcagtcgtagcccggccctctccagccggctgccctctctgcctccctctttctgttcctcctgcccagggcacccccttagtgcctccagcttctgcctacctcaccccccctttcgtgcccctggcctgagcctcctgctggcctggccctggccgcccacctgggttcatctgacactgccttccctctttgccctgtggtactgctgtctgccaggtctgtgctgccttgggcatggaataaacattctcagccctg

SEQ ID NO: 327202 - DNA, 1137 bp, Homo sapiens
cttttttttaagcagggctgagaatgtttattccatgcccaaggcagcacagacctggcagacagcagtaccacagggcaaagagggagggcggccgatcccaacgaggctccctggagcccgacgcagagcagcgccctggccgggccaagcaggagccggcatcatggattccttcaaagtagtgctggaggggccagcaccttggggcttccggctgcaagggggcaaggacttcaatgtgcccctctccatttcccggctcactcctgggggcaaagcggcgcaggccggagtggccgtgggtgactgggtgctgagcatcgatggcgagaatgcgggtagcctcacacacatcgaagctcagaacaagatccgggcctgcggggagcgcctcagcctgggcctcagcagggcccagccggttcagagcaaaccgcagaaggcctccgcccccgccgcggaccctccgcggtacacctttgcacccagcgtctccctcaacaagacggcccggccctttggggcgcccccgcccgctgacagcgccccgcagcagaatggacagccgctccgaccgctggtcccagatgccagcaagcagcggctgatggagaacacagaggactggcggccgcggccggggacaggccagtcgcgttccttccgcatccttgcccacctcacaggcaccgagttcatgcaagacccggatgaggagcacctgaagaaatcaagggaaaagtatgtcctggagctgcagagcccacgctacacccgcctccgggactggcaccaccagcgctctgcccacgtgctcaacgtgcagtcgtagcccggccctctccagccggctgccctctctgcctccctctttctgttcctcctgcccagggcacccccttagtgcctccagcttctgcctacctcaccccccctttcgtgcccctggcctgagcctcctgctggcctggccctggccgcccacctgggttcatctgacactgccttccctctttgccctgtggtactgctgtctgccaggtctgtgctgccttgggcatggaataaacattctcagccctgcttgctctgcctgtcttctatctttgtggacctggtttgcatttggggtgt

SEQ ID NO: 327203 - DNA, 1605 bp, Homo sapiens
cttttttttaagcagggctgagaatgtttattccatgcccaaggcagcacagacctggcagacagcagtaccacagggcaaagagggagggcggccgatcccaacgaggctccctggagcccgacgcagagcagcgccctggccgggccaagcaggagccggcatcatggattccttcaaagtagtgctggaggggccagcaccttggggcttccggctgcaagggggcaaggacttcaatgtgcccctctccatttcccgggcctccgcccccgccgcggaccctccgcggtacacctttgcacccagcgtctccctcaacaagacggcccggccctttggggcgcccccgcccgctgacagcgccccgcagcagaatggacagccgctccgaccgctggtcccagatgccagcaagcagcggctgatggagaacacagaggactggcggccgcggccggggacaggccagtcgcgttccttccgcatccttgcccacctcacaggcaccgagttcatgcaagacccggatgaggagcacctgaagaaatcaagccaggtgcccaggacagaagccccagccccagcctcatctacaccccaggagccctggcctggccctaccgcccccagccctaccagccgcccgccctgggctgtggaccctgcgtttgccgagcgctatgccccggacaaaacgagcacagtgctgacccggcacagccagccggccacgcccacgccgctgcagagccgcacctccattgtgcaggcagctgccggaggggtgccaggagggggcagcaacaacggcaagactcccgtgtgtcaccagtgccacaaggtcatccggggccgctacctggtggcgctgggccacgcgtaccacccggaggagtttgtgtgtagccagtgtgggaaggtcctggaagagggtggcttctttgaggagaagggcgccatcttctgcccaccatgctatgacgtgcgctatgcacccagctgtgccaagtgcaagaagaagattacaggcgagatcatgcacgccctgaagatgacctggcacgtgcactgctttacctgtgctgcctgcaagacgcccatccggaacagggccttctacatggaggagggcgtgccctattgcgagcgagactatgagaagatgtttggcacgaaatgccatggctgtgacttcaagatcgacgctggggaccgcttcctggaggccctgggcttcagctggcatgacacctgcttcgtctgtgcgatatgtcagatcaacctggaaggaaagaccttctactccaagaaggacaggcctctctgcaagagccatgccttctctcatgtgtgagccccttctgcccacagctgccgcggtggcccctagcctgaggggcctggagtcgtggccctgcatttctgggtagggctggcaatggttgccttaaccctggctcctggcccgagcctggggctccctgggccctgccccacccaccttatcctcccaccccactccctccaccaccacagcacaccggtgctggccacaccagccccctttcacctccagtgccacaataaacctgtacccagctg

SEQ ID NO: 327204 - DNA, 1938 bp, Homo sapiens
cttttttttaagcagggctgagaatgtttattccatgcccaaggcagcacagacctggcagacagcagtaccacagggcaaagagggagggcggccgatcccaacgaggctccctggagcccgacgcagagcagcgccctggccgggccaagcaggagccggcatcatggattccttcaaagtagtgctggaggggccagcaccttggggcttccggctgcaagggggcaaggacttcaatgtgcccctctccatttcccggctcactcctgggggcaaagcggcgcaggccggagtggccgtgggtgactgggtgctgagcatcgatggcgagaatgcgggtagcctcacacacatcgaagctcagaacaagatccgggcctgcggggagcgcctcagcctgggcctcagcagggcccagccggttcagagcaaaccgcagaaggtgcagacccctgacaagtcagtgagcccccctctgcctgtgcctttcttcttccttttggcactctgggtggcggcccctccccaccctggctgccctcctctccacttcgccctcctgtcctctcacctacccgcccagcagggctcctggcctcacccttacccactccctcccatcactgtaacccaaacccacatgcaccaaatcctgggaggggctgcccccaccgcccacccccagtgtggggttctgagccacaccctcccacagccgctccgaccgctggtcccagatgccagcaagcagcggctgatggagaacacagaggactggcggccgcggccggggacaggccagtcgcgttccttccgcatccttgcccacctcacaggcaccgagttcatgcaagacccggatgaggagcacctgaagaaatcaagccaggtgcccaggacagaagccccagccccagcctcatctacaccccaggagccctggcctggccctaccgcccccagccctaccagccgcccgccctgggctgtggaccctgcgtttgccgagcgctatgccccggacaaaacgagcacagtgctgacccggcacagccagccggccacgcccacgccgctgcagagccgcacctccattgtgcaggcagctgccggaggggtgccaggagggggcagcaacaacggcaagactcccgtgtgtcaccagtgccacaaggtcatccggggccgctacctggtggcgctgggccacgcgtaccacccggaggagtttgtgtgtagccagtgtgggaaggtcctggaagagggtggcttctttgaggagaagggcgccatcttctgcccaccatgctatgacgtgcgctatgcacccagctgtgccaagtgcaagaagaagattacaggcgagatcatgcacgccctgaagatgacctggcacgtgcactgctttacctgtgctgcctgcaagacgcccatccggaacagggccttctacatggaggagggcgtgccctattgcgagcgagactatgagaagatgtttggcacgaaatgccatggctgtgacttcaagatcgacgctggggaccgcttcctggaggccctgggcttcagctggcatgacacctgcttcgtctgtgcgatatgtcagatcaacctggaaggaaagaccttctactccaagaaggacaggcctctctgcaagagccatgccttctctcatgtgtgagccccttctgcccacagctgccgcggtggcccctagcctgaggggcctggagtcgtggccctgcatttctgggtagggctggcaatggttgccttaaccctggctcctggcccgagcctggggctccctgggccctgccccacccaccttatcctcccaccccactccctccaccaccacagcacaccggtgctggccacaccagccccctttcacctccagtgccacaataaacctgtacccagctg

SEQ ID NO: 327205 - DNA, 1846 bp, Homo sapiens
atcaggcccactgtggccccacgcccgctgcccgctgctgctcagtctgtgctgcgccccagcccggcggaaccgtgcggcagcgccccctggcggccggggtggggctgcaggcacagggcccctcccgaggctgtggcgccttgcagggcaccgccctggggaggggtctctgaatgacgccgcgccccctgctggcggctgggggttgggttgtggtgtcgggccagctgagccccagacactcagtgccgccttgtccccggctgttctgacccctccccgtctttcttcctctcctgtgtctgtccctttgtccctttatctgtctgtctgtcttatttccttcacaggtgcagacccctgacaagtcagtgagcccccctctgcctgtgcctttcttcttccttttggcactctgggtggcggcccctccccaccctggctgccctcctctccacttcgccctcctgtcctctcacctacccgcccagcagggctcctggcctcacccttacccactccctcccatcactgtaacccaaacccacatgcaccaaatcctgggaggggctgcccccaccgcccacccccagtgtggggttctgagccacaccctcccacagccgctccgaccgctggtcccagatgccagcaagcagcggctgatggagaacacagaggactggcggccgcggccggggacaggccagtcgcgttccttccgcatccttgcccacctcacaggcaccgagttcatgcaagacccggatgaggagcacctgaagaaatcaagccaggtgcccaggacagaagccccagccccagcctcatctacaccccaggagccctggcctggccctaccgcccccagccctaccagccgcccgccctgggctgtggaccctgcgtttgccgagcgctatgccccggacaaaacgagcacagtgctgacccggcacagccagccggccacgcccacgccgctgcagagccgcacctccattgtgcaggcagctgccggaggggtgccaggagggggcagcaacaacggcaagactcccgtgtgtcaccagtgccacaaggtcatccggggccgctacctggtggcgctgggccacgcgtaccacccggaggagtttgtgtgtagccagtgtgggaaggtcctggaagagggtggcttctttgaggagaagggcgccatcttctgcccaccatgctatgacgtgcgctatgcacccagctgtgccaagtgcaagaagaagattacaggcgagatcatgcacgccctgaagatgacctggcacgtgcactgctttacctgtgctgcctgcaagacgcccatccggaacagggccttctacatggaggagggcgtgccctattgcgagcgagactatgagaagatgtttggcacgaaatgccatggctgtgacttcaagatcgacgctggggaccgcttcctggaggccctgggcttcagctggcatgacacctgcttcgtctgtgcgatatgtcagatcaacctggaaggaaagaccttctactccaagaaggacaggcctctctgcaagagccatgccttctctcatgtgtgagccccttctgcccacagctgccgcggtggcccctagcctgaggggcctggagtcgtggccctgcatttctgggtagggctggcaatggttgccttaaccctggctcctggcccgagcctggggctccctgggccctgccccacccaccttatcctcccaccccactccctccaccaccacagcacaccggtgctggccacaccagccccctttcacctccagtgccacaataaacctgtacccagctg

SEQ ID NO: 327206 - DNA, 1110 bp, Homo sapiens
cttttttttaagcagggctgagaatgtttattccatgcccaaggcagcacagacctggcagacagcagtaccacagggcaaagagggagggcggccgatcccaacgaggctccctggagcccgacgcagagcagcgccctggccgggccaagcaggagccggcatcatggattccttcaaagtagtgctggaggggccagcaccttggggcttccggctgcaagggggcaaggacttcaatgtgcccctctccatttcccggctcactcctgggggcaaagcggcgcaggccggagtggccgtgggtgactgggtgctgagcatcgatggcgagaatgcgggtagcctcacacacatcgaagctcagaacaagatccgggcctgcggggagcgcctcagcctgggcctcagcagggcccagccggttcagagcaaaccgcagaaggcctccgcccccgccgcggaccctccgcggtacacctttgcacccagcgtctccctcaacaagacggcccggccctttggggcgcccccgcccgctgacagcgccccgcagcagaatggacagccgctccgaccgctggtcccagatgccagcaagcagcggctgatggagaacacagaggactggcggccgcggccggggacaggccagtcgcgttccttccgcatccttgcccacctcacaggcaccgagttcatgcaagacccggatgaggagcacctgaagaaatcaagggaaaagtatgtcctggagctgcagagcccacgctacacccgcctccgggactggcaccaccagcgctctgcccacgtgctcaacgtgcagtcgtagcccggccctctccagccggctgccctctctgcctccctctttctgttcctcctgcccagggcacccccttagtgcctccagcttctgcctacctcaccccccctttcgtgccccctggccgcccacctgggttcatctgacactgccttccctctttgccctgtggtactgctgtctgccaggtctgtgctgccttgggcatggaataaacattctcagccctgcttgctctgcctgtcttctatctttgtggacctggtttgcatttggggtgt

SEQ ID NO: 327207 - DNA, 1366 bp, Homo sapiens
cttttttttaagcagggctgagaatgtttattccatgcccaaggcagcacagacctggcagacagcagtaccacagggcaaagagggagggcggccgatcccaacgaggctccctggagcccgacgcagagcagcgccctggccgggccaagcaggagccggcatcatggattccttcaaagtagtgctggaggggccagcaccttggggcttccggctgcaagggggcaaggacttcaatgtgcccctctccatttcccggctcactcctgggggcaaagcggcgcaggccggagtggccgtgggtgactgggtgctgagcatcgatggcgagaatgcgggtagcctcacacacatcgaagctcagaacaagatccgggcctgcggggagcgcctcagcctgggcctcagcagggcccagccggttcagagcaaaccgcagaaggcctccgcccccgccgcggaccctccgcggtacacctttgcacccagcgtctccctcaacaagacggcccggccctttggggcgcccccgcccgctgacagcgccccgcagcagaatggacagccgctccgaccgctggtcccagatgccagcaagcagcggctgatggagaacacagaggactggcggccgcggccggggacaggccagtcgcgttccttccgcatccttgcccacctcacaggcaccgagttcatgcaagacccggatgaggagcacctgaagaaatcaaggtacagggacgggcaccagcccctctcccacctcctgcctcttccattccagctactgccctgtgtctactcctgaggctcccagctggggctctcaattctccctcccttccttccttccttccttccttccttccttccttccttccttccttccttcccttcctccttccttccttctttcatttcttccctccctccttccttccctcctccctccctgcctcccttccatctctccttccttccacttcttcctccctctctctctgcccctcagggaaaagtatgtcctggagctgcagagcccacgctacacccgcctccgggactggcaccaccagcgctctgcccacgtgctcaacgtgcagtcgtagcccggccctctccagccggctgccctctctgcctccctctttctgttcctcctgcccagggcacccccttagtgcctccagcttctgcctacctcaccccccctttcgtgcccctggcctgagcctcctgctggcctggccctggccgcccacctgggttcatctgacactgccttccctctttgccctgtggtactgctgtctgccaggtctgtgctgccttgggcatggaataaacattctcagccctg

SEQ ID NO: 327208 - DNA, 2436 bp, Homo sapiens
tccatcagccgctgcttgctggcatctgggaccagcggtcggagcggctgtccattctgctgcggggcgctgtcagcgggcgggggcgccccaaagggccgggccgtcttgttgagggagacgctgggtgcaaaggtgtaccgcggagggtccgcggcgggggcggaggcctgggcagagacacagccgggcagggcggggggcagcaacaacggcaagactcccgtgtgtcaccagtgccacaaggtcatccggggccgctacctggtggcgctgggccacgcgtaccacccggaggagtttgtgtgtagccagtgtgggaaggtcctggaagagggtggcttctttgaggagaagggcgccatcttctgcccaccatgctatgacgtgcgctatgcacccagctgtgccaagtgcaagaagaagattacaggcgagatcatgcacgccctgaagatgacctggcacgtgcactgctttacctgtgctgcctgcaagacgcccatccggaacagggccttctacatggaggagggcgtgccctattgcgagcgagactatgagaagatgtttggcacgaaatgccatggctgtgacttcaagatcgacgctggggaccgcttcctggaggccctgggcttcagctggcatgacacctgcttcgtctgtgcgatatgtcagatcaacctggaaggaaagaccttctactccaagaaggacaggcctctctgcaagagccatgccttctctcatgtgtgagccccttctgcccacagctgccgcggtggcccctagcctgaggggcctggagtcgtggccctgcatttctgggtagggctggcaatggttgccttaaccctggctcctggcccgagcctggggctccctgggccctgccccacccaccttatcctcccaccccactccctccaccaccacagcacaccggtgctggccacaccagccccctttcacctccagtgccacaataaacctgtacccagctgaaaaaaaaaaaaaaaaaaaaaaaaaaaaaaaaacaaaaacaagaaaaaaaaaaaaaaagaaaacacaaacaaaacagaacgaaaggggggcgcccaacacgaacctacacccagcgaggcacacagaactacaccgcgccacacagccgcaccaaaaagagcgaccacacacacggcgcaccacaaaacacacaccaccgagcgcgccgtcccaccacacacgcagcagagacacacaccgcacgcgaacgctactaagaagacaacccaccacatcacggacgcgagcgaccaacgagtcggacagcaacacacagcagacagtcacagccagccgaagcgaaaacaacaagcccagccgcgggaactgcgggcaaaacacccggaacagcgcgccgagcaagcatgtccagcggagcattcagaacatatccggcggcgcataagcaacacccgacgcaacgaccgcacagcgaccgcaacccagccgacgcgacagcgacagcaggcacgcaacagacagcgcagaccaagcgacgccacacgcggcttgtgcggacgcgtggtaagctcagcgcaagcgcagacagccccgcggcgagcaaccagcaacgcagacaatagaacatgaagtacagactacaccagcgagcaactagcagaaggcgacgcgatgcagacgacagcaagcgcagtcccagccagtaacgcaacgcagagagaacaggaccagaagacgaacaccgactgagacggacgtcgcacgacacaagagagaaagcgagaccaggcgagcgaacgcaccacgcagacaacggcagcagagcccgcggagagtgggcggcgggagcggccggaggggaggcgagcaggggggaggcacgaggcaacagcgggggccggggggcggcgggcgcgagagggagcgggaggcatgcgagaggagcagaggcgaacgcgagagccgagagaaagcacaggccggacacgccagcgaagcccacgcccgctccgccggagacgccggacgcccggcggagcccgacacggacaacggcacagggaaagacggcggccggcgcgtacggcagaaagcagaagcgccagagacagcgaacagaccagcgacgagaacacgccgacaggccgacgaggcggagaggagagagcccacgaacaaagaccggcacaaacgaaacacagacacaaacaagagcacaaaaggcggcggcgcaccgaggcgatggagcgggcagggctaagaccgactgaggaggcggcacacacacgacgcacgcgcacgcacacgccgcgcgacgaggccgagcacacgagcccagaacagcagacgacgacagccagcaaaagacaacagacaagaacaggggaacacaccacagcgacacgagctgagacacacgcgacagat

SEQ ID NO: 327209 - DNA, 967 bp, Homo sapiens
cttttttttaagcagggctgagaatgtttattccatgcccaaggcagcacagacctggcagacagcagtaccacagggcaaagagggagggcggccgatcccaacgaggctccctggagcccgacgcagagcagcgccctggccgggccaagcaggagccggcatcatggattccttcaaagtagtgctggaggggccagcaccttggggcttccggctgcaagggggcaaggacttcaatgtgcccctctccatttcccggctcactcctgggggcaaagcggcgcaggccggagtggccgtgggtgactgggtgctgagcatcgatggcgagaatgcgggtagcctcacacacatcgaagctcagaacaagatccgggcctgcggggagcgcctcagcctgggcctcagcagggcccagccggttcagagcaaaccgcagaagacagccgctccgaccgctggtcccagatgccagcaagcagcggctgatggagaacacagaggactggcggccgcggccggggacaggccagtcgcgttccttccgcatccttgcccacctcacaggcaccgagttcatgcaagacccggatgaggagcacctgaagaaatcaagggaaaagtatgtcctggagctgcagagcccacgctacacccgcctccgggactggcaccaccagcgctctgcccacgtgctcaacgtgcagtcgtagcccggccctctccagccggctgccctctctgcctccctctttctgttcctcctgcccagggcacccccttagtgcctccagcttctgcctacctcaccccccctttcgtgcccctggcctgagcctcctgctggcctggccctggccgcccacctgggttcatctgacactgccttccctctttgccctgtggtactgctgtctgccaggtctgtgctgccttgggcatggaataaacattctcagccctg

SEQ ID NO: 327210 - DNA, 440 bp, Homo sapiens
cttttttttaagcagggctgagaatgtttattccatgcccaaggcagcacagacctggcagacagcagtaccacagggcaaagagggagggcggccgatcccaacgaggctccctggagcccgacgcagagcagcgccctggccgggccaagcaggagccggcatcatggattccttcaaagtagtgctggaggggccagcaccttggggcttccggctgcaagggggcaaggacttcaatgtgcccctctccatttcccggctcactcctgggggcaaagcggcgcaggccggagtggccgtgggtgactgggtgctgagcatcgatggcgagaatgcgggtagcctcacacacatcgaagctcagaacaagatccgccccgcagcagaatgggtgcagaccccttgacacacagccgctccgaccgctggtcccagat

SEQ ID NO: 327211 - DNA, 1861 bp, Homo sapiens
ggggaggccgcgccagtttagtccctcggcccacccctggttgcaaagaacctcaagcctggattcaggcacccctcaccgttccagtcccaaggggaggggggctgctcctgtctttccaaagtgaggtccgccagccagcagcccaggccagcctgacaaaatacctgcctcctatggcttgggcgtgctcaggggctgcccgtgcctgcctggcccctgtccaaggagccggcatcatggattccttcaaagtagtgctggaggggccagcaccttggggcttccggctgcaagggggcaaggacttcaatgtgcccctctccatttcccggctcactcctgggggcaaagcggcgcaggccggagtggccgtgggtgactgggtgctgagcatcgatggcgagaatgcgggtagcctcacacacatcgaagctcagaacaagatccgggcctgcggggagcgcctcagcctgggcctcagcagggcccagccggttcagagcaaaccgcagaaggcctccgcccccgccgcggaccctccgcggtacacctttgcacccagcgtctccctcaacaagacggcccggccctttggggcgcccccgcccgctgacagcgccccgcagcagaatggacagccgctccgaccgctggtcccagatgccagcaagcagcggctgatggagaacacagaggactggcggccgcggccggggacaggccagtcgcgttccttccgcatccttgcccacctcacaggcaccgagttcatgcaagacccggatgaggagcacctgaagaaatcaagccaggtgcccaggacagaagccccagccccagcctcatctacaccccaggagccctggcctggccctaccgcccccagccctaccagccgcccgccctgggctgtggaccctgcgtttgccgagcgctatgccccggacaaaacgagcacagtgctgacccggcacagccagccggccacgcccacgccgctgcagagccgcacctccattgtgcaggcagctgccggaggggtgccaggagggggcagcaacaacggcaagactcccgtgtgtcaccagtgccacaaggtcatccggggccgctacctggtggcgctgggccacgcgtaccacccggaggagtttgtgtgtagccagtgtgggaaggtcctggaagagggtggcttctttgaggagaagggcgccatcttctgcccaccatgctatgacgtgcgctatgcacccagctgtgccaagtgcaagaagaagattacaggcgagatcatgcacgccctgaagatgacctggcacgtgcactgctttacctgtgctgcctgcaagacgcccatccggaacagggccttctacatggaggagggcgtgccctattgcgagcgagactatgagaagatgtttggcacgaaatgccatggctgtgacttcaagatcgacgctggggaccgcttcctggaggccctgggcttcagctggcatgacacctgcttcgtctgtgcgatatgtcagatcaacctggaaggaaagaccttctactccaagaaggacaggcctctctgcaagagccatgccttctctcatgtgtgagccccttctgcccacagctgccgcggtggcccctagcctgaggggcctggagtcgtggccctgcatttctgggtagggctggcaatggttgccttaaccctggctcctggcccgagcctggggctccctgggccctgccccacccaccttatcctcccaccccactccctccaccaccacagcacaccggtgctggccacaccagccccctttcacctccagtgccacaataaacctgtacccagctg

SEQ ID NO: 327212 - DNA, 1669 bp, Homo sapiens
cttttttttaagcagggctgagaatgtttattccatgcccaaggcagcacagacctggcagacagcagtaccacagggcaaagagggagggcggccgatcccaacgaggctccctggagcccgacgcagagcagcgccctggccgggccaagcaggagccggcatcatggattccttcaaagtagtgctggaggggccagcaccttggggcttccggctgcaagggggcaaggacttcaatgtgcccctctccatttcccggctcactcctgggggcaaagcggcgcaggccggagtggccgtgggtgactgggtgctgagcatcgatggcgagaatgcgggtagcctcacacacatcgaagctcagaacaagatccgggcctgcggggagcgcctcagcctgggcctcagcagggcccagccggttcagagcaaaccgcagaagacagccgctccgaccgctggtcccagatgccagcaagcagcggctgatggagaacacagaggactggcggccgcggccggggacaggccagtcgcgttccttccgcatccttgcccacctcacaggcaccgagttcatgcaagacccggatgaggagcacctgaagaaatcaagccaggtgcccaggacagaagccccagccccagcctcatctacaccccaggagccctggcctggccctaccgcccccagccctaccagccgcccgccctgggctgtggaccctgcgtttgccgagcgctatgccccggacaaaacgagcacagtgctgacccggcacagccagccggccacgcccacgccgctgcagagccgcacctccattgtgcaggcagctgccggaggggtgccaggagggggcagcaacaacggcaagactcccgtgtgtcaccagtgccacaaggtcatccggggccgctacctggtggcgctgggccacgcgtaccacccggaggagtttgtgtgtagccagtgtgggaaggtcctggaagagggtggcttctttgaggagaagggcgccatcttctgcccaccatgctatgacgtgcgctatgcacccagctgtgccaagtgcaagaagaagattacaggcgagatcatgcacgccctgaagatgacctggcacgtgcactgctttacctgtgctgcctgcaagacgcccatccggaacagggccttctacatggaggagggcgtgccctattgcgagcgagactatgagaagatgtttggcacgaaatgccatggctgtgacttcaagatcgacgctggggaccgcttcctggaggccctgggcttcagctggcatgacacctgcttcgtctgtgcgatatgtcagatcaacctggaaggaaagaccttctactccaagaaggacaggcctctctgcaagagccatgccttctctcatgtgtgagccccttctgcccacagctgccgcggtggcccctagcctgaggggcctggagtcgtggccctgcatttctgggtagggctggcaatggttgccttaaccctggctcctggcccgagcctggggctccctgggccctgccccacccaccttatcctcccaccccactccctccaccaccacagcacaccggtgctggccacaccagccccctttcacctccagtgccacaataaacctgtacccagctg

SEQ ID NO: 327213 - DNA, 1820 bp, Homo sapiens
gtggcggtgaatagataagcatcgtgactggggaagctcaggtgagcaccacctgagggagagggtctggcagtgaataaataagcagtgtgactgggaaattgtgaagctcaggtgagcgccaccacctcctgggttgctttagtgtccagcagctgcctagaactatgttgaatgaagagctctctgggttctggaagtgggacagctttgggtggggcagtgttaccaccgtcagcctggcttgggtctgcagggtccagggcctcggtcactttgcttctctctccacagctcactcctgggggcaaagcggcgcaggccggagtggccgtgggtgactgggtgctgagcatcgatggcgagaatgcgggtagcctcacacacatcgaagctcagaacaagatccgggcctgcggggagcgcctcagcctgggcctcagcagggcccagccggttcagagcaaaccgcagaaggcctccgcccccgccgcggaccctccgcggtacacctttgcacccagcgtctccctcaacaagacggcccggccctttggggcgcccccgcccgctgacagcgccccgcagcagaatggacagccgctccgaccgctggtcccagatgccagcaagcagcggctgatggagaacacagaggactggcggccgcggccggggacaggccagtcgcgttccttccgcatccttgcccacctcacaggcaccgagttcatgcaagacccggatgaggagcacctgaagaaatcaagccaggtgcccaggacagaagccccagccccagcctcatctacaccccaggagccctggcctggccctaccgcccccagccctaccagccgcccgccctgggctgtggaccctgcgtttgccgagcgctatgccccggacaaaacgagcacagtgctgacccggcacagccagccggccacgcccacgccgctgcagagccgcacctccattgtgcaggcagctgccggaggggtgccaggagggggcagcaacaacggcaagactcccgtgtgtcaccagtgccacaaggtcatccggggccgctacctggtggcgctgggccacgcgtaccacccggaggagtttgtgtgtagccagtgtgggaaggtcctggaagagggtggcttctttgaggagaagggcgccatcttctgcccaccatgctatgacgtgcgctatgcacccagctgtgccaagtgcaagaagaagattacaggcgagatcatgcacgccctgaagatgacctggcacgtgcactgctttacctgtgctgcctgcaagacgcccatccggaacagggccttctacatggaggagggcgtgccctattgcgagcgagactatgagaagatgtttggcacgaaatgccatggctgtgacttcaagatcgacgctggggaccgcttcctggaggccctgggcttcagctggcatgacacctgcttcgtctgtgcgatatgtcagatcaacctggaaggaaagaccttctactccaagaaggacaggcctctctgcaagagccatgccttctctcatgtgtgagccccttctgcccacagctgccgcggtggcccctagcctgaggggcctggagtcgtggccctgcatttctgggtagggctggcaatggttgccttaaccctggctcctggcccgagcctggggctccctgggccctgccccacccaccttatcctcccaccccactccctccaccaccacagcacaccggtgctggccacaccagccccctttcacctccagtgccacaataaacctgtacccagctg

SEQ ID NO: 327214 - DNA, 2265 bp, Homo sapiens
cttttttttaagcagggctgagaatgtttattccatgcccaaggcagcacagacctggcagacagcagtaccacagggcaaagagggagggcggccgatcccaacgaggctccctggagcccgacgcagagcagcgccctggccgggccaagcaggagccggcatcatggattccttcaaagtagtgctggaggggccagcaccttggggcttccggctgcaagggggcaaggacttcaatgtgcccctctccatttcccggctcactcctgggggcaaagcggcgcaggccggagtggccgtgggtgactgggtgctgagcatcgatggcgagaatgcgggtagcctcacacacatcgaagctcagaacaagatccgggcctgcggggagcgcctcagcctgggcctcagcagggcccagccggttcagagcaaaccgcagaagtacgaggctggccgggacatccgggcggtgggcggtgtgggcttggacggccaggcctgctcgccctcctggcacattctcggtaccccaatccctggccgggagtggagggcagaaaccggagctaaggcgggtctagggccctggagttgagccaggggctgctgcacggtcctggcaccacgcatgtccgcctgtctgtccgcctgtctgtccgcctgctgcctcccgccgccggcgctgcgtgctcgcccgcactcggtcagccctcggtcctgcgtggactgagatcgccactcccaaatgggccccttgaaacctgagtcgtcctctccccgtagcctccaaatagatgtagggggtggggtgggggtggggggctggagctgccgctgtcctctgctgcaggcgccccacttccacccaggcccccaccttaccctgcccgcccgccctgcccggctgtgtctctgcccagcctccgcccccgccgcggaccctccgcggtacacctttgcacccagcgtctccctcaacaagacggcccggccctttggggcgcccccgcccgctgacagcgccccgcagcagaatggacagccgctccgaccgctggtcccagatgccagcaagcagcggctgatggagaacacagaggactggcggccgcggccggggacaggccagtcgcgttccttccgcatccttgcccacctcacaggcaccgagttcatgcaagacccggatgaggagcacctgaagaaatcaagccaggtgcccaggacagaagccccagccccagcctcatctacaccccaggagccctggcctggccctaccgcccccagccctaccagccgcccgccctgggctgtggaccctgcgtttgccgagcgctatgccccggacaaaacgagcacagtgctgacccggcacagccagccggccacgcccacgccgctgcagagccgcacctccattgtgcaggcagctgccggaggggtgccaggagggggcagcaacaacggcaagactcccgtgtgtcaccagtgccacaaggtcatccggggccgctacctggtggcgctgggccacgcgtaccacccggaggagtttgtgtgtagccagtgtgggaaggtcctggaagagggtggcttctttgaggagaagggcgccatcttctgcccaccatgctatgacgtgcgctatgcacccagctgtgccaagtgcaagaagaagattacaggcgagatcatgcacgccctgaagatgacctggcacgtgcactgctttacctgtgctgcctgcaagacgcccatccggaacagggccttctacatggaggagggcgtgccctattgcgagcgagactatgagaagatgtttggcacgaaatgccatggctgtgacttcaagatcgacgctggggaccgcttcctggaggccctgggcttcagctggcatgacacctgcttcgtctgtgcgatatgtcagatcaacctggaaggaaagaccttctactccaagaaggacaggcctctctgcaagagccatgccttctctcatgtgtgagccccttctgcccacagctgccgcggtggcccctagcctgaggggcctggagtcgtggccctgcatttctgggtagggctggcaatggttgccttaaccctggctcctggcccgagcctggggctccctgggccctgccccacccaccttatcctcccaccccactccctccaccaccacagcacaccggtgctggccacaccagccccctttcacctccagtgccacaataaacctgtacccagctg

SEQ ID NO: 327215 - DNA, 1857 bp, Homo sapiens
cttttttttaagcagggctgagaatgtttattccatgcccaaggcagcacagacctggcagacagcagtaccacagggcaaagagggagggcggccgatcccaacgaggctccctggagcccgacgcagagcagcgccctggccgggccaagcaggagccggcatcatggattccttcaaagtagtgctggaggggccagcaccttggggcttccggctgcaagggggcaaggacttcaatgtgcccctctccatttcccggctcactcctgggggcaaagcggcgcaggccggagtggccgtgggtgactgggtgctgagcatcgatggcgagaatgcgggtagcctcacacacatcgaagctcagaacaagatccgggcctgcggggagcgcctcagcctgggcctcagcagggcccagccggttcagagcaaaccgcagaaggcgccccacttccacccaggcccccaccttaccctgcccgcccgccctgcccggctgtgtctctgcccagcctccgcccccgccgcggaccctccgcggtacacctttgcacccagcgtctccctcaacaagacggcccggccctttggggcgcccccgcccgctgacagcgccccgcagcagaatggacagccgctccgaccgctggtcccagatgccagcaagcagcggctgatggagaacacagaggactggcggccgcggccggggacaggccagtcgcgttccttccgcatccttgcccacctcacaggcaccgagttcatgcaagacccggatgaggagcacctgaagaaatcaagccaggtgcccaggacagaagccccagccccagcctcatctacaccccaggagccctggcctggccctaccgcccccagccctaccagccgcccgccctgggctgtggaccctgcgtttgccgagcgctatgccccggacaaaacgagcacagtgctgacccggcacagccagccggccacgcccacgccgctgcagagccgcacctccattgtgcaggcagctgccggaggggtgccaggagggggcagcaacaacggcaagactcccgtgtgtcaccagtgccacaaggtcatccggggccgctacctggtggcgctgggccacgcgtaccacccggaggagtttgtgtgtagccagtgtgggaaggtcctggaagagggtggcttctttgaggagaagggcgccatcttctgcccaccatgctatgacgtgcgctatgcacccagctgtgccaagtgcaagaagaagattacaggcgagatcatgcacgccctgaagatgacctggcacgtgcactgctttacctgtgctgcctgcaagacgcccatccggaacagggccttctacatggaggagggcgtgccctattgcgagcgagactatgagaagatgtttggcacgaaatgccatggctgtgacttcaagatcgacgctggggaccgcttcctggaggccctgggcttcagctggcatgacacctgcttcgtctgtgcgatatgtcagatcaacctggaaggaaagaccttctactccaagaaggacaggcctctctgcaagagccatgccttctctcatgtgtgagccccttctgcccacagctgccgcggtggcccctagcctgaggggcctggagtcgtggccctgcatttctgggtagggctggcaatggttgccttaaccctggctcctggcccgagcctggggctccctgggccctgccccacccaccttatcctcccaccccactccctccaccaccacagcacaccggtgctggccacaccagccccctttcacctccagtgccacaataaacctgtacccagctg

SEQ ID NO: 327216 - DNA, 1083 bp, Homo sapiens
cttttttttaagcagggctgagaatgtttattccatgcccaaggcagcacagacctggcagacagcagtaccacagggcaaagagggagggcggccgatcccaacgaggctccctggagcccgacgcagagcagcgccctggccgggccaagcaggagccggcatcatggattccttcaaagtagtgctggaggggccagcaccttggggcttccggctgcaagggggcaaggacttcaatgtgcccctctccatttcccggctcactcctgggggcaaagcggcgcaggccggagtggccgtgggtgactgggtgctgagcatcgatggcgagaatgcgggtagcctcacacacatcgaagctcagaacaagatccgggcctgcggggagcgcctcagcctgggcctcagcagggcccagccggttcagagcaaaccgcagaaggcctccgcccccgccgcggaccctccgcggtacacctttgcacccagcgtctccctcaacaagacggcccggccctttggggcgcccccgcccgctgacagcgccccgcagcagaatggacagccgctccgaccgctggtcccagatgccagcaagcagcggctgatggagaacacagaggactggcggccgcggccggggacaggccagtcgcgttccttccgcatccttgcccacctcacaggcaccgagttcatgcaagacccggatgaggagcacctgaagaaatcaagggaaaagtatgtcctggagctgcagagcccacgctacacccgcctccgggactggcaccaccagcgctctgcccacgtgctcaacgtgcagtcgtagccggctttcagcggtgcttttggtcctcttatgtctcctgcagggaccccttatgtccagtttgtactaacaccctttggcctgactgagcccgtggctgccggcgccacggtactgaactgactccttgcgggacgcgtgcgtaggccgagaacttccctaaagaacaacaaagcaacaaccgagtggacaaaagagcgactaaggaagacaatagtgagagacagcatctgtcttctatataggga

SEQ ID NO: 327217 - DNA, 1059 bp, Homo sapiens
cttttttttaagcagggctgagaatgtttattccatgcccaaggcagcacagacctggcagacagcagtaccacagggcaaagagggagggcggccgatcccaacgaggctccctggagcccgacgcagagcagcgccctggccgggccaagcaggagccggcatcatggattccttcaaagtagtgctggaggggccagcaccttggggcttccggctgcaagggggcaaggacttcaatgtgcccctctccatttcccggctcactcctgggggcaaagcggcgcaggccggagtggccgtgggtgactgggtgctgagcatcgatggcgagaatgcgggtagcctcacacacatcgaagctcagaacaagatccgggcctgcggggagcgcctcagcctgggcctcagcagggcccagccggttcagagcaaaccgcagaaggcctccgcccccgccgcggaccctccgcggtacacctttgcacccagcgtctccctcaacaagacggcccggccctttggggcgcccccgcccgctgacagcgccccgcagcagaatggacagccgctccgaccgctggtcccagatgccagcaagcagcggctgatggagaacacagaggactggcggccgcggccggggacaggccagtcgcgttccttccgcatccttgcccacctcacaggcaccgagttcatgcaagacccggatgaggagcacctgaagaaatcaagggaaaagtatgtcctggagctgcagagcccacgctacacccgcctccgggactggcaccaccagcgctctgcccacgtgctcaacgtgcagtcgtagcccggccctctccagccggctgccctctctgcctccctctttctgttcctcctgcccagggcacccccttagtgcctccagcttctgcctacctcaccccccctttcgtgccccctggccgcccacctgggttcatctgacactgccttccctctttgccctgtggtactgctgtctgccaggtctgtgctgccttgggcatggaataaacattctcagccctg

SEQ ID NO: 327218 - DNA, 3036 bp, Homo sapiens
cttttttttaagcagggctgagaatgtttattccatgcccaaggcagcacagacctggcagacagcagtaccacagggcaaagagggagggcggccgatcccaacgaggctccctggagcccgacgcagagcagcgccctggccgggccaagcaggagccggcatcatggattccttcaaagtagtgctggaggggccagcaccttggggcttccggctgcaagggggcaaggacttcaatgtgcccctctccatttcccggctcactcctgggggcaaagcggcgcaggccggagtggccgtgggtgactgggtgctgagcatcgatggcgagaatgcgggtagcctcacacacatcgaagctcagaacaagatccgggcctgcggggagcgcctcagcctgggcctcagcagggcccagccggttcagagcaaaccgcagaagacagccgctccgaccgctggtcccagatgccagcaagcagcggctgatggagaacacagaggactggcggccgcggccggggacaggccagtcgcgttccttccgcatccttgcccacctcacaggcaccgagttcatgcaagacccggatgaggagcacctgaagaaatcaaggccctaccgcccccagccctaccagccgcccgccctgggctgtggaccctgcgtttgccgagcgctatgccccggacaaaacgagcacagtgctgacccggcacagccagccggccacgcccacgccgctgcagagccgcacctccattgtgcaggcagctgccggaggggtgccaggagggggcagcaacaacggcaagactcccgtgtgtcaccagtgccacaaggtcatccggggccgctacctggtggcgctgggccacgcgtaccacccggaggagtttgtgtgtagccagtgtgggaaggtcctggaagagggtggcttctttgaggagaagggcgccatcttctgcccaccatgctatgacgtgcgctatgcacccagctgtgccaagtgcaagaagaagattacaggcgagatcatgcacgccctgaagatgacctggcacgtgcactgctttacctgtgctgcctgcaagacgcccatccggaacagggccttctacatggaggagggcgtgccctattgcgagcgagactatgagaagatgtttggcacgaaatgccatggctgtgacttcaagatcgacgctggggaccgcttcctggaggccctgggcttcagctggcatgacacctgcttcgtctgtgcgatatgtcagatcaacctggaaggaaagaccttctactccaagaaggacaggcctctctgcaagagccatgccttctctcatgtgtgagccccttctgcccacagctgccgcggtggcccctagcctgaggggcctggagtcgtggccctgcatttctgggtagggctggcaatggttgccttaaccctggctcctggcccgagcctggggctccctgggccctgccccacccaccttatcctcccaccccactccctccaccaccacagcacaccggtgctggccacaccagccccctttcacctccagtgccacaataaacctgtacccagctgaaaaaaaaaaaaaaaaaaaaaaaaaaaaaaaaacaaaaacaagaaaaaaaaaaaaaaagaaaacacaaacaaaacagaacgaaaggggggcgcccaacacgaacctacacccagcgaggcacacagaactacaccgcgccacacagccgcaccaaaaagagcgaccacacacacggcgcaccacaaaacacacaccaccgagcgcgccgtcccaccacacacgcagcagagacacacaccgcacgcgaacgctactaagaagacaacccaccacatcacggacgcgagcgaccaacgagtcggacagcaacacacagcagacagtcacagccagccgaagcgaaaacaacaagcccagccgcgggaactgcgggcaaaacacccggaacagcgcgccgagcaagcatgtccagcggagcattcagaacatatccggcggcgcataagcaacacccgacgcaacgaccgcacagcgaccgcaacccagccgacgcgacagcgacagcaggcacgcaacagacagcgcagaccaagcgacgccacacgcggcttgtgcggacgcgtggtaagctcagcgcaagcgcagacagccccgcggcgagcaaccagcaacgcagacaatagaacatgaagtacagactacaccagcgagcaactagcagaaggcgacgcgatgcagacgacagcaagcgcagtcccagccagtaacgcaacgcagagagaacaggaccagaagacgaacaccgactgagacggacgtcgcacgacacaagagagaaagcgagaccaggcgagcgaacgcaccacgcagacaacggcagcagagcccgcggagagtgggcggcgggagcggccggaggggaggcgagcaggggggaggcacgaggcaacagcgggggccggggggcggcgggcgcgagagggagcgggaggcatgcgagaggagcagaggcgaacgcgagagccgagagaaagcacaggccggacacgccagcgaagcccacgcccgctccgccggagacgccggacgcccggcggagcccgacacggacaacggcacagggaaagacggcggccggcgcgtacggcagaaagcagaagcgccagagacagcgaacagaccagcgacgagaacacgccgacaggccgacgaggcggagaggagagagcccacgaacaaagaccggcacaaacgaaacacagacacaaacaagagcacaaaaggcggcggcgcaccgaggcgatggagcgggcagggctaagaccgactgaggaggcggcacacacacgacgcacgcgcacgcacacgccgcgcgacgaggccgagcacacgagcccagaacagcagacgacgacagccagcaaaagacaacagacaagaacaggggaacacaccacagcgacacgagctgagacacacgcgacagat

SEQ ID NO: 327219 - DNA, 2258 bp, Homo sapiens
gctctggcccagaaatcaggccacgggagtccaggcgcctcaggctaggggccaccgggcagctgtgggcagaagggctcacacatgagagaaggcatggctcttgcgagaggcctgtcttcttggagtaaaggtctttccttaccaggttgatctgacatatgacagacgaacggtgtcatgccatcttctgcccaccatgctatgacgtgcgctatgcacccagctgtgccaagtgcaagaagaagattacaggcgagatcatgcacgccctgaagatgacctggcacgtgcactgctttacctgtgctgcctgcaagacgcccatccggaacagggccttctacatggaggagggcgtgccctattgcgagcgagactatgagaagatgtttggcacgaaatgccatggctgtgacttcaagatcgacgctggggaccgcttcctggaggccctgggcttcagctggcatgacacctgcttcgtctgtgcgatatgtcagatcaacctggaaggaaagaccttctactccaagaaggacaggcctctctgcaagagccatgccttctctcatgtgtgagccccttctgcccacagctgccgcggtggcccctagcctgaggggcctggagtcgtggccctgcatttctgggtagggctggcaatggttgccttaaccctggctcctggcccgagcctggggctccctgggccctgccccacccaccttatcctcccaccccactccctccaccaccacagcacaccggtgctggccacaccagccccctttcacctccagtgccacaataaacctgtacccagctgaaaaaaaaaaaaaaaaaaaaaaaaaaaaaaaaacaaaaacaagaaaaaaaaaaaaaaagaaaacacaaacaaaacagaacgaaaggggggcgcccaacacgaacctacacccagcgaggcacacagaactacaccgcgccacacagccgcaccaaaaagagcgaccacacacacggcgcaccacaaaacacacaccaccgagcgcgccgtcccaccacacacgcagcagagacacacaccgcacgcgaacgctactaagaagacaacccaccacatcacggacgcgagcgaccaacgagtcggacagcaacacacagcagacagtcacagccagccgaagcgaaaacaacaagcccagccgcgggaactgcgggcaaaacacccggaacagcgcgccgagcaagcatgtccagcggagcattcagaacatatccggcggcgcataagcaacacccgacgcaacgaccgcacagcgaccgcaacccagccgacgcgacagcgacagcaggcacgcaacagacagcgcagaccaagcgacgccacacgcggcttgtgcggacgcgtggtaagctcagcgcaagcgcagacagccccgcggcgagcaaccagcaacgcagacaatagaacatgaagtacagactacaccagcgagcaactagcagaaggcgacgcgatgcagacgacagcaagcgcagtcccagccagtaacgcaacgcagagagaacaggaccagaagacgaacaccgactgagacggacgtcgcacgacacaagagagaaagcgagaccaggcgagcgaacgcaccacgcagacaacggcagcagagcccgcggagagtgggcggcgggagcggccggaggggaggcgagcaggggggaggcacgaggcaacagcgggggccggggggcggcgggcgcgagagggagcgggaggcatgcgagaggagcagaggcgaacgcgagagccgagagaaagcacaggccggacacgccagcgaagcccacgcccgctccgccggagacgccggacgcccggcggagcccgacacggacaacggcacagggaaagacggcggccggcgcgtacggcagaaagcagaagcgccagagacagcgaacagaccagcgacgagaacacgccgacaggccgacgaggcggagaggagagagcccacgaacaaagaccggcacaaacgaaacacagacacaaacaagagcacaaaaggcggcggcgcaccgaggcgatggagcgggcagggctaagaccgactgaggaggcggcacacacacgacgcacgcgcacgcacacgccgcgcgacgaggccgagcacacgagcccagaacagcagacgacgacagccagcaaaagacaacagacaagaacaggggaacacaccacagcgacacgagctgagacacacgcgacagat

SEQ ID NO: 327220 - DNA, 179 bp, Homo sapiens
acagaggactggcggccgcggccggggacaggccagtcgcgttccttccgcatccttgcccacctcacaggcaccgagttcagtaagtgccagcccagggcagggggtactttcctcgcccccagcccaggcgtgatccctgaccctgtgtcttttttggtcaatgcctgcctctgccc

SEQ ID NO: 327221 - DNA, 1342 bp, Homo sapiens
catctccagaagtcatatttagtttttctttatatcattcatttctcttttaattatatacatgtttttctttaaatacttaaacatggttataacagctgtgttttaagctccttgtctgttaattccatcatctgtcatttttgcatctgtttttattgactaactttcttcctcatcatggtcacatatccttgcttcttcccatatttagtaaagtttagttggatgctggattgttttaatttagcattttggagtgactgcttttgcacttgcctttaaaagtattggacttcgttttgatagttgaattacttgcaaatcagcttgatcattctgagacttgtttttaacttttgtcgaaaaggctatgctacttcaagtataataaaacctagttttagttttatcctataactaaggcatgtgttcaatttgaatgtctccaaccctgtgtgaactctgaaaattgttcagctcccaatttcgcagtaatttttttttgttcagccttgcagtctcatcctactcaagtgtggctctgtatccaacaacagtcttggagatctcatgaagatttctgaaacttttgctctgcaggataccttcctttgtggttatgtgccctgaaaactccagcctccgtgtcttcaattcagtgaaactactactctgcttggattcccctcttatacaatggtctaccaagtgactgcaaacagaaatctaagggaatttcaggagtcacctcatttattttcctttttttcagggattatagtagtactataccacctgtcagccaatgtgtgagaatggtggtttcatacattttctccaattctttcttgttacaggagcctccattacttttcaaacagtaatgcagttgcagttgcctctccttttcttcattatgtgtttatctctggcagtttgagccaagagagggcacggagaagtacaatgactagagagcacttctgttgaggctcattcattgacccctaccccagtgctttatgaatgtgtgctgcagatgtcatacagcatcacagcttcttctctaatttatgagccataatttttttttttgtatttttattgtattacctgcttggttgcaagaggatgatgaggaggactactataggataaatttgtttttatagagcaatttctcatgggtcacgagggatagtactccattttcctcactgatatcggcttgatcatctgagtcagtgggctcattgtggaaacatatggaatcctttatgctttttctcaggctgcttctgttacatgaaataaagccagagttgattgtgaaaaaaag

SEQ ID NO: 327222 - DNA, 1928 bp, Homo sapiens
agcggctcccatcgcggctcccgggagctaagcgagacggcgacggcggcagtcgtccctccccacgcgggcgcgcgggcatgcggacacccactcggccggtccaggccctcaggctcccggaagcggaaggggagagcggcccggcctgggcggcggcgccggaggaggcggaggtggcgcggcaggaggaggggaaagagctgctggtggtcgggagagcggcggcagcgagaggcgagccagcggcgacgaatgaagaactttttcacttactgcaggattttcagcttcagcaagcaggttctcatggagaactgttattgaagagagatccatttggtgggatataattaaaaaaaatgaatcaaaagaaaatctctaaatgcagattccagaaaaattacagcacatctcagtgaatttgcaagtggatcatccttccttgtgggttagcaggcagttataagattgcaaaatgggtctccggattcactttgttgttgacccacatggttggtgctgcatgggtttgattgtctttgtttggttatacaatattgttttaattcccaaaattgtcctctttcctcactatgaagaaggacatattccaggcatattaataataatattctatggcatttccatattctgtctggttgccttagtgagggcctccataactgatccaggaagactccctgagaaccccaagatcccacatggagaacgggagttctgggaattatgtaacaagtgtactttgatgagaccaaagcgttcccatcactgtagccgctgcggccactgtgtgaggagaatggatcatcactgtccatggattaacaattgtgttggtgaagataatcattggctctttctgcagttgtgtttctacactgaacttcttacttgctacgcactgatgttttctttctgccactattactattttcttccactaaaaaagcgtaatttggacctctttgtttttagacatgaattggccataatgagactagcagcctttatgggcattactatgttagttggaataactggactcttttacactcaactaattggcatcatcacaccttgcagtctcatcctactcaagtgtggctctgtatccaacaacagtcttggagatctcatgaagatttctgaaacttttgctctgcaggataccttcctttgtggttatgtgccctgaaaactccagcctccgtgtcttcaattcagtgaaactactactctgcttggattcccctcttatacaatggtctaccaagtgactgcaaacagaaatctaagggaatttcaggagtcacctcatttattttcctttttttcagggattatagtagtactataccacctgtcagccaatgtgtgagaatggtggtttcatacattttctccaattctttcttgttacaggagcctccattacttttcaaacagtaatgcagttgcagttgcctctccttttcttcattatgtgtttatctctggcagtttgagccaagagagggcacggagaagtacaatgactagagagcacttctgttgaggctcattcattgacccctaccccagtgctttatgaatgtgtgctgcagatgtcatacagcatcacagcttcttctctaatttatgagccataatttttttttttgtatttttattgtattacctgcttggttgcaagaggatgatgaggaggactactataggataaatttgtttttatagagcaatttctcatgggtcacgagggatagtactccattttcctcactgatatcggcttgatcatctgagtcagtgggctcattgtggaaacatatggaatcctttatgctttttctcaggctgcttctgttacatgaaataaagccagagttgattgtgaaaaaaag

SEQ ID NO: 327223 - DNA, 1820 bp, Homo sapiens
agcggctcccatcgcggctcccgggagctaagcgagacggcgacggcggcagtcgtccctccccacgcgggcgcgcgggcatgcggacacccactcggccggtccaggccctcaggctcccggaagcggaaggggagagcggcccggcctgggcggcggcgccggaggaggcggaggtggcgcggcaggaggaggggaaagagctgctggtggtcgggagagcggcggcagcgagaggcgagccagcggcgacgaatgaagaactttttcacttactgcaggattttcagcttcagcaagcagttagcattttggaggcgctgctttgccagtcaatttctcatttaagcgtgacagcaactgtgttctcatggagaactgttattgaagagagatccatttggtgggatataattaaaaaaaatgaatcaaaagaaaatctctaaatgcagattccagaaaaattacagcacatctcagtgaatttgcaagtgaaggacatattccaggcatattaataataatattctatggcatttccatattctgtctggttgccttagtgagggcctccataactgatccaggaagactccctgagaaccccaagatcccacatggagaacgggagttctgggaattatgtaacaagtgtactttgatgagaccaaagcgttcccatcactgtagccgctgcggccactgtgtgaggagaatggatcatcactgtccatggattaacaattgtgttggtgaagataatcattggctctttctgcagttgtgtttctacactgaacttcttacttgctacgcactgatgttttctttctgccactattactattttcttccactaaaaaagcgtaatttggacctctttgtttttagacatgaattggccataatgagactagcagcctttatgggcattactatgttagttggaataactggactcttttacactcaactaattggcatcatcacaccttgcagtctcatcctactcaagtgtggctctgtatccaacaacagtcttggagatctcatgaagatttctgaaacttttgctctgcaggataccttcctttgtggttatgtgccctgaaaactccagcctccgtgtcttcaattcagtgaaactactactctgcttggattcccctcttatacaatggtctaccaagtgactgcaaacagaaatctaagggaatttcaggagtcacctcatttattttcctttttttcagggattatagtagtactataccacctgtcagccaatgtgtgagaatggtggtttcatacattttctccaattctttcttgttacaggagcctccattacttttcaaacagtaatgcagttgcagttgcctctccttttcttcattatgtgtttatctctggcagtttgagccaagagagggcacggagaagtacaatgactagagagcacttctgttgaggctcattcattgacccctaccccagtgctttatgaatgtgtgctgcagatgtcatacagcatcacagcttcttctctaatttatgagccataatttttttttttgtatttttattgtattacctgcttggttgcaagaggatgatgaggaggactactataggataaatttgtttttatagagcaatttctcatgggtcacgagggatagtactccattttcctcactgatatcggcttgatcatctgagtcagtgggctcattgtggaaacatatggaatcctttatgctttttctcaggctgcttctgttacatgaaataaagccagagttgattgtgaaaaaaag

SEQ ID NO: 327224 - DNA, 1080 bp, Homo sapiens
agctcggtaccccccccaatggaatccctcgtagagaggaggcctcagcctcagtgcatatttgttgcattacactaataaggagttgtttgaactacagtcgtctttctgtttaagtatagttctacttgtaaatttcgtgtagggatgattcctgacacaaggaatcatcacatctattacatgtcgaggaatactcactttcactctgtttgcagcttgctttatgtatttgagagtgctcttgttagccttgcagtctcatcctactcaagtgtggctctgtatccaacaacagtcttggagatctcatgaagatttctgaaacttttgctctgcaggataccttcctttgtggttatgtgccctgaaaactccagcctccgtgtcttcaattcagtgaaactactactctgcttggattcccctcttatacaatggtctaccaagtgactgcaaacagaaatctaagggaatttcaggagtcacctcatttattttcctttttttcagggattatagtagtactataccacctgtcagccaatgtgtgagaatggtggtttcatacattttctccaattctttcttgttacaggagcctccattacttttcaaacagtaatgcagttgcagttgcctctccttttcttcattatgtgtttatctctggcagtttgagccaagagagggcacggagaagtacaatgactagagagcacttctgttgaggctcattcattgacccctaccccagtgctttatgaatgtgtgctgcagatgtcatacagcatcacagcttcttctctaatttatgagccataatttttttttttgtatttttattgtattacctgcttggttgcaagaggatgatgaggaggactactataggataaatttgtttttatagagcaatttctcatgggtcacgagggatagtactccattttcctcactgatatcggcttgatcatctgagtcagtgggctcattgtggaaacatatggaatcctttatgctttttctcaggctgcttctgttacatgaaataaagccagagttgattgtgaaaaaaag

SEQ ID NO: 327225 - DNA, 1241 bp, Homo sapiens
agcggctcccatcgcggctcccgggagctaagcgagacggcgacggcggcagtcgtccctccccacgcgggcgcgcgggcatgcggacacccactcggccggtccaggccctcaggctcccggaagcggaaggggagagcggcccggcctgggcggcggcgccggaggaggcggaggtggcgcggcaggaggaggggaaagagctgctggtggtcgggagagcggcggcagcgagaggcgagccagcggcgacgaatgaagaactttttcacttactgcaggattttcagcttcagcaagcaggttctcatggagaactgttattgaagagagatccatttggtgggatataattaaaaaaaatgaatcaaaagaaaatctctaaatgcagattccagaaaaattacagcacatctcagtgaatttgcaagtggatcatccttccttgtgggttagcaggcagttataagattgcaaaatgggtctccggattcactttgttgttgacccacatggttggtgctgcatgggtttgattgtctttgtttggttatacaatattgttttaattcccaaaattgtcctctttcctcactatgaagaaggacatattccaggcatattaataataatattctatggcatttccatattctgtctggttgccttagtgagggcctccataactgatccaggaagactccctgagaaccccaagatcccacatggagaacgggagttctgggaattatgtaacaagtgtactttgatgagaccaaagcgttcccatcactgtagccgctgcggccactgtgtgaggagaatggatcatcactgtccatggattaacaattgtgttggtgaagataatcattggctctttctgcagttgtgtttctacactgaacttcttacttgctacgcactgatgttttctttctgccactattactattttcttccactaaaaaagcgtaatttggtaagaaatgtttatattgggaggccgaggcgggcggatcacgaggtcaggagatcgagaccatcctggctaacacggtgaaaccccgtctctactaaaaatacaaaaaattagccgggcgaggtggcgggtgcctgtagtcccagctactcgggaggctgaggcaggagaatggcgtgaaccccagggggcggagcctgcagtgagccgagattgcgccactgcactccaacctgggcgacagcgagactccgtctca

SEQ ID NO: 327226 - DNA, 1235 bp, Homo sapiens
agcggctcccatcgcggctcccgggagctaagcgagacggcgacggcggcagtcgtccctccccacgcgggcgcgcgggcatgcggacacccactcggccggtccaggccctcaggctcccggaagcggaaggggagagcggcccggcctgggcggcggcgccggaggaggcggaggtggcgcggcaggaggaggggaaagagctgctggtggtcgggagagcggcggcagcgagaggcgagccagcggcgacgaatgaagaactttttcacttactgcaggattttcagcttcagcaagcaggttctcatggagaactgttattgaagagagatccatttggtgggatataattaaaaaaaatgaatcaaaagaaaatctctaaatgcagattccagaaaaattacagcacatctcagtgaatttgcaagtggatcatccttccttgtgggttagcaggcagttataagattgcaaaatgggtctccggattcactttgttgttgacccacatggttggtgctgcatgggtttgattgtctttgtttggttatacaatattgttttaattcccaaaattgtcctctttcctcactatgaagaaggacatattccaggcatattaataataatattctatggcatttccatattctgtctggttgccttagtgagggcctccataactgatccaggaagactccctgagaaccccaagatcccacatggagaacgggagttctgggaattatgtaacaagtgtactttgatgagaccaaagcgttcccatcactgtagccgctgcggccactgtgtgaggagaatggatcatcactgtccatggattaacaattgtgttggtgaagataatcattggctctttctgcagttgtgtttctacactgaacttcttacttgctacgcactgatgttttctttctgccactattactattttcttccactaaaaaagcgtaatttggacctctttgtttttagacatgaattggccataatgagactagcagcctttatgggcattactatgttagttggaataactggactcttttacactcaactaattggcatcatcacaccatgtgacatgcctgctcctactctgccttccatcatgaataaaagcttcttgaggcctcaccagaagccaagcagatgctggtgccatgcttatacagcctgcagagccatgagccaaataaaccttcttcttt

SEQ ID NO: 327227 - DNA, 1271 bp, Homo sapiens
gaaaaaactggcaccttttctggaaatctcttattgcaaagaaaagatactgagtgtatagaaaattttgtcaccagaggaaaaataaacaatatataagggtggctttcactttaacatttgggatattttggagttcttgatacctcgaaggtctccatttctattggtattttgaatatctgtaacatgtaatgtcgttcttataacagttcaacactgatttttttggtatcgatagctttatatataaacaaagatgcggacaaaatagcttaacagaagttgtgggcttttttgtggctttgcctgcctgtttgaccaaatacagggtttaattgtttgcaggctgttaactaaagggaaagcttacctgcgtattgcaagctatatattcttgccagtatacattggatgatattttaacctactggtgcctgaagttcgtgttttataacctcaacaactataaaacatcctggtgctattcactttagcattgagtgacatttttaattcctgtaccaaagagttaattttctttttggttgactgagttttcttctcacatcgttgtgtatttataaagtagaatttaatgttactaagaacagtttgattaacagatcttattttttgcatgctgctctggcaatttaatggattttaaatgtttctcatttggatttttttttaggtaggcatgtatggattttaattttgtattttcaatatagcttggctactttaaaaggtagtttgataggctgaaattacaaaagataattgaagcacttttcacaagttgttttatttctgcaacaatgaataaaaagagacccatgattttatgtttctgcaaagctctcatgtctgccttcatagaagaaagttggatctcatactgcttcgcattagaccaattgaattgttattttgttagaagtatctggagaagtctgatcttgtgcagataatgtagttggaaaaaggaggagtattctgatcttttcagatgctgttccactgccagggactccctccccatatcttcctggaaaacacttgttcacccctttggacaattcagttatcacttcctggagggacactttccctgactttcccagaagatttccttctccatgttctgcagggacaccacttatcctgcttccactatagcatgaatcagtgctctctatacaagtgcctagtacactgcttggacctctgaaggtatttagtaaaagtttacttagtaaataagc

SEQ ID NO: 327228 - DNA, 559 bp, Homo sapiens
agcggctcccatcgcggctcccgggagctaagcgagacggcgacggcggcagtcgtccctccccacgcgggcgcgcgggcatgcggacacccactcggccggtccaggccctcaggctcccggaagcggaaggggagagcggcccggcctgggcggcggcgccggaggaggcggaggtggcgcggcaggaggaggggaaagagctgctggtggtcgggagagcggcggcagcgagaggcgagccagcggcgacgaatgaagaactttttcacttactgcaggattttcagcttcagcaagcagatgctgttccactgccagggactccctccccatatcttcctggaaaacacttgttcacccctttggacaattcagttatcacttcctggagggacactttccctgactttcccagaagatttccttctccatgttctgcagggacaccacttatcctgcttccactatagcatgaatcagtgctctctatacaagtgcctagtacactgcttggacctctgaaggtatttagtaaaagtttacttagtaaataagc

SEQ ID NO: 327229 - DNA, 1717 bp, Homo sapiens
agcggctcccatcgcggctcccgggagctaagcgagacggcgacggcggcagtcgtccctccccacgcgggcgcgcgggcatgcggacacccactcggccggtccaggccctcaggctcccggaagcggaaggggagagcggcccggcctgggcggcggcgccggaggaggcggaggtggcgcggcaggaggaggggaaagagctgctggtggtcgggagagcggcggcagcgagaggcgagccagcggcgacgaatgaagaactttttcacttactgcaggattttcagcttcagcaagcaggttctcatggagaactgttattgaagagagatccatttggtgggatataattaaaaaaaatgaatcaaaagaaaatctctaaatgcagattccagaaaaattacagcacatctcagtgaatttgcaagtggatcatccttccttgtgggttagcaggcagttataagattgcaaaatgggtctccggattcactttgttgttgacccacatggttggtgctgcatgggtttgattgtctttgtttggttatacaatattgttttaattcccaaaattgtcctctttcctcactatgaagaaggacatattccaggcatattaataataatattctatggcatttccatattctgtctggttgccttagtgagggcctccataactgatccaggaagactccctgagaaccccaagatcccacatggagaacgggagttctgggaattatgtaacaagtgtactttgatgagaccaaagcgttcccatcactgtagccgctgcggccactgtgtgaggagaatggatcatcactgtccatggattaacaattgtgttggtgaagataatcattggctctttctgcagttgtgtttctacactgaacttcttacttgctacgcactgatgttttctttctgccactattactattttcttccactaaaaaagcgtaatttggacctctttgtttttagacatgaattggccataatgagactagcagcctttatgggcattactatgttagttggaataactggactcttttacactcaactaattggcatcatcacagatacaacatctattgaaaagatgtcaaactgttgtgaagatatgtaggcatgtatggattttaattttgtattttcaatatagcttggctactttaaaaggtagtttgataggctgaaattacaaaagataattgaagcacttttcacaagttgttttatttctgcaacaatgaataaaaagagacccatgattttatgtttctgcaaagctctcatgtctgccttcatagaagaaagttggatctcatactgcttcgcattagaccaattgaattgttattttgttagaagtatctggagaagtctgatcttgtgcagataatgtagttggaaaaaggaggagtattctgatcttttcagatgctgttccactgccagggactccctccccatatcttcctggaaaacacttgttcacccctttggacaattcagttatcacttcctggagggacactttccctgactttcccagaagatttccttctccatgttctgcagggacaccacttatcctgcttccactatagcatgaatcagtgctctctatacaagtgcctagtacactgcttggacctctgaaggtatttagtaaaagtttacttagtaaataagc

SEQ ID NO: 327230 - DNA, 878 bp, Homo sapiens
atcctgggctctggacaatgccaggcacatggtgggttgtcaataaacagtggttaaaagaaatactgagcaagacagtaagtgacacaaatgttatttggagatgcttaacacgagtttattcttgacaataagcaatacatcttgtaggcatataaaatgtgaagagcaatatgtacattaacatggaaatgtgaaaaaacaaggtacttttctcaatgaactcaaggaatagcaagaaattctatatcttcagaaaacaggatgatgagaataaatgaaaatggagctagattccaacagctttctaagataagttaacttaacttagaaagataaaagttaacatatcttatatctttgggcaatggataattattaaggaaggcatttgtgcaagtgaatggcatgatcagttttttgtgctttaggaatacaactctggagagtgaactgcagaagaggagaaaggcaagtttaagtagaagttaaaaaaattttctgagcagaaaacttaataacggcttagagatggaaaaaagatagagggcagaatcaaggatgaagtctagatttccggattgggtaaattgatgtatgattctattcactaacagggaatcctagagcaagtacagatttgggggaaattttctaccagctgtagtaagcttatgcaccaaaagtaaataacaactaaccttacaatgttataagttaattggctatttgttcctacatcaaaaacacttatattagtcaggcatggctactccagaggctgatagtaggcggatccctacagcctgggagttcaaggatgcagtgagctatgatcatgccactggactccagtttgggtgacagagcaagaccct

SEQ ID NO: 327231 - DNA, 679 bp, Homo sapiens
agaacccccgatattaggcggggaaacatgattatgtgtcatgtgttttcagatagataggaaaaggaaccccaacattccaaaacctcggcgaatcttgcgctcggcctggggcagcaacccttacttccgcggctcctattcatacacgcaggtgggctccagcggggcggatgtggagaagctggccaagcccctgccgtacacggagagctcaaagacagcgcccatgcaggtgctgttttccggtgaggccacccaccgcaagtactattccaccacccacggtgctctgctgtccggccagcgtgaggctgcccgcctcattgagatgtaccgagacctcttccagcaggggacctgagggctgtcctcgctgctgagaagagccactaactcgtgacctccagcctgccccttgctgccgtgtgctcctgccttcctgatcctctgtagaaaggatttttatcttctgtagagctagccgccctgactgccttcagacctggccctgtagcttttctttttctccaggctgggccgtgagcaggtgggccgttgagttacctctgtgctggatcccgtgcccccacttgcctaccctctgtcctgccttgttattgtaagtgccttcaatactttgcattttgggataataaaaaaggctccctcccctgcc

SEQ ID NO: 327232 - DNA, 491 bp, Homo sapiens
aaggtcactcccaaggatttcgctgggccctcgtcatggagaagtgtgatgacgaggcagtggccgagatctgcacggagatgctgcgtcagttcacagggaaccccaacattccaaaacctcggcgaatcttgcgctcggcctggggcagcaacccttacttccgcggctcctattcatacacgcaggtgggctccagcggggcggatgtggagaagctggccaagcccctgccgtacacggagagctcaaagacagcgcccatgcaggtgctgttttccggtgaggccacccaccgcaagtactattccaccacccacggtgctctgctgtccggccagcgtgaggctgcccgcctcattgagatgtaccgagacctcttccagcaggggacctgagggctgtcctcgctgctgagaagagccactaactcgtgacctccagcctgccccttgctgacgagtccagcggatcctctagagtcagcctcc

SEQ ID NO: 327233 - DNA, 762 bp, Homo sapiens
gaggaatggtcacatttatgagttaactggaagaaagagacagagaaggagtgtcaagagaggtgaaagccaagagcaggtgccaaagaaagcgagtacacttctaaggaaggaggaaatggtcagtgagtcaaaatattcccaagaggggtccagctagcgaggaggaaagctgtgatggggtgcaggagtggaggagaaacgtggcaactgccgaataaacacaccaaccagggaagacggccaaggctgggcccagaatatctggaatggaacccatcttccttttgcagcaggaagtggagttggaagctgagttgactgtggaatttccgagcttggaggatgttattactacaagaccttaacggttgttggaggcacaagatggaatgagcctagatccctgaatcactatgtggaggaaggccattatgaaacaggaatattcctttattgtgtccgtaagatctaaacttctattacgttggagtcatttattcttgggtctctgttccactagccagcattactgtaactaacatatttcttaaagcccttctttgttactcacctttcatcatacatggtaacccagcgccttgtgatggtgggtgtgaagtgctccgcacatgtgaaatctgactgtgatcaatgctttactaatgttccaacacaaaatggaatctaagtcagctgcactaatgtgacagagactggtgctaataattactgacatttggagaggacctgatggcttgg

SEQ ID NO: 327234 - DNA, 380 bp, Homo sapiens
agggatccagcagtctccggcttcaggggcttctagcttcccggctcccggcggggcgggcccggggaggagctcggcgggtccccgcccagaggcggagcggagggccgggccggagcggggtgggtaggggacgcgaggcggagcggggccccacacaggccgcggcggctggctcgggcccctacggtcccggcggcggctggaggaggaagccaggcggctggcggaggaggagagacggaggaggccgagaccggagcgccgctcgccgcagacttacttccccggctcagcagggaaaggtacggtgcgcccgctctccggccccgggccccggctctcagcctcccccgggcgcaggcaggggctgcggccgc

SEQ ID NO: 327235 - DNA, 2345 bp, Homo sapiens
agggatccagcagtctccggcttcaggggcttctagcttcccggctcccggcggggcgggcccggggaggagctcggcgggtccccgcccagaggcggagcggagggccgggccggagcggggtgggtaggggacgcgaggcggagcggggccccacacaggccgcggcggctggctcgggcccctacggtcccggcggcggctggaggaggaagccaggcggctggcggaggaggagagacggaggaggccgagaccggagcgccgctcgccgcagacttacttccccggctcagcagggaaaggttcctagaaggtgagcgcggacggtatgcaaagttgtgaatccagtggtgacagtgcggatgaccctctcagtcgcggcctacggagaaggggacagcctcgtgtggtggtgatcggcgccggcttggctggcctggctgcagccaaagcacttcttgagcagggtttcacggatgtcactgtgcttgaggcttccagccacatcggaggccgtgtgcagagtgtgaaacttggacacgccacctttgagctgggagccacctggatccatggctcccatgggaaccctatctatcatctagcagaagccaacggcctcctggaagagacaaccgatggggaacgcagcgtgggccgcatcagcctctattccaagaatggcgtggcctgctaccttaccaaccacggccgcaggatccccaaggacgtggttgaggaattcagcgatttatacaacgaggtctataacttgacccaggagttcttccggcacgataaaccagtcaatgctgaaagtcaaaatagcgtgggggtgttcacccgagaggaggtgcgtaaccgcatcaggaatgaccctgacgacccagaggctaccaagcgcctgaagctcgccatgatccagcagtacctgaaggtggagagctgtgagagcagctcacacagcatggacgaggtgtccctgagcgccttcggggagtggaccgagatccccggcgctcaccacatcatcccctcgggcttcatgcgggttgtggagctgctggcggagggcatccctgcccacgtcatccagctagggaaacctgtccgctgcattcactgggaccaggcctcagcccgccccagaggccctgagattgagccccggggtgagggcgaccacaatcacgacactggggagggtggccagggtggagaggagccccgggggggcaggtgggatgaggatgagcagtggtcggtggtggtggagtgcgaggactgtgagctgatcccggcggaccatgtgattgtgaccgtgtcgctaggtgtgctaaagaggcagtacaccagtttcttccggccaggcctgcccacagagaaggtggctgccatccaccgcctgggcattggcaccaccgacaagatctttctggaattcgaggagcccttctggggccctgagtgcaacagcctacagtttgtgtgggaggacgaagcagagagccacaccctcacctacccacctgagctctggtaccgcaagatctgcggctttgatgtcctctacccgcctgagcgctacggccatgtgctgagcggctggatctgcggggaggaggccctcgtcatggagaagtgtgatgacgaggcagtggccgagatctgcacggagatgctgcgtcagttcacagggaaccccaacattccaaaacctcggcgaatcttgcgctcggcctggggcagcaacccttacttccgcggctcctattcatacacgcaggtgggctccagcggggcggatgtggagaagctggccaagcccctgccgtacacggagagctcaaagacagcgcccatgcaggtgctgttttccggtgaggccacccaccgcaagtactattccaccacccacggtgctctgctgtccggccagcgtgaggctgcccgcctcattgagatgtaccgagacctcttccagcaggggacctgagggctgtcctcgctgctgagaagagccactaactcgtgacctccagcctgccccttgctgccgtgtgctcctgccttcctgatcctctgtagaaaggatttttatcttctgtagagctagccgccctgactgccttcagacctggccctgtagcttttctttttctccaggctgggccgtgagcaggtgggccgttgagttacctctgtgctggatcccgtgcccccacttgcctaccctctgtcctgccttgttattgtaagtgccttcaatactttgcattttgggataataaaaaaggctccctcccctgcccctcagcttctctctggttttctcaaaatct

SEQ ID NO: 327236 - DNA, 2404 bp, Homo sapiens
agggatccagcagtctccggcttcaggggcttctagcttcccggctcccggcggggcgggcccggggaggagctcggcgggtccccgcccagaggcggagcggagggccgggccggagcggggtgggtaggggacgcgaggcggagcggggccccacacaggccgcggcggctggctcgggcccctacggtcccggcggcggctggaggaggaagccaggcggctggcggaggaggagagacggaggaggccgagaccggagcgccgctcgccgcagacttacttccccggctcagcagggaaaggttcctagaaggtgagcgcggacggtatgcaaagttgtgaatccagtggtgacagtgcggatgaccctctcagtcgcggcctacggagaaggggacagcctcgtgtggtggtgatcggcgccggcttggctggcctggctgcagccaaagcacttcttgagcagggtttcacggatgtcactgtgcttgaggcttccagccacatcggaggccgtgtgcagagtgtgaaacttggacacgccacctttgagctgggagccacctggatccatggctcccatgggaaccctatctatcatctagcagaagccaacggcctcctggaagagacaaccgatggggaacgcagcgtgggccgcatcagcctctattccaagaatggcgtggcctgctaccttaccaaccacggccgcaggatccccaaggacgtggttgaggaattcagcgatttatacaacgaggtctataacttgacccaggagttcttccggcacgataaaccagtcaatgctgaaagtcaaaatagcgtgggggtgttcacccgagaggaggtgcgtaaccgcatcaggaatgaccctgacgacccagaggctaccaagcgcctgaagctcgccatgatccagcagtacctgaaggtggagagctgtgagagcagctcacacagcatggacgaggtgtccctgagcgccttcggggagtggaccgagatccccggcgctcaccacatcatcccctcgggcttcatgcgggttgtggagctgctggcggagggcatccctgcccacgtcatccagctagggaaacctgtccgctgcattcactgggaccaggcctcagcccgccccagaggccctgagattgagccccggggtgagggcgaccacaatcacgacactggggagggtggccagggtggagaggagccccgggggggcaggtgggatgaggatgagcagtggtcggtggtggtggagtgcgaggactgtgagctgatcccggcggaccatgtgattgtgaccgtgtcgctaggtgtgctaaagaggcagtacaccagtttcttccggccaggcctgcccacagagaaggtggctgccatccaccgcctgggcattggcaccaccgacaagatctttctggaattcgaggagcccttctggggccctgagtgcaacagcctacagtttgtgtgggaggacgaagcagagagccacaccctcacctacccacctgagctctggtaccgcaagatctgcggctttgatgtcctctacccgcctgagcgctacggccatgtgctgagcggctggatctgcggggaggaggccctcgtcatggagaagtgtgatgacgaggcagtggccgagatctgcacggagatgctgcgtcagttcacagggaaccccaacattccaaaacctcggcgaatcttgcgctcggcctggggcagcaacccttacttccgcggctcctattcatacacgcaggtgggctccagcggggcggatgtggagaagctggccaagcccctgccgtacacggagagctcaaagacagcgcatggaagctccacaaagcagcagcctggtcaccttttctcttccaagtgcccagaacagcccctggatgctaacaggggcgccgtaaagcccatgcaggtgctgttttccggtgaggccacccaccgcaagtactattccaccacccacggtgctctgctgtccggccagcgtgaggctgcccgcctcattgagatgtaccgagacctcttccagcaggggacctgagggctgtcctcgctgctgagaagagccactaactcgtgacctccagcctgccccttgctgccgtgtgctcctgccttcctgatcctctgtagaaaggatttttatcttctgtagagctagccgccctgactgccttcagacctggccctgtagcttttctttttctccaggctgggccgtgagcaggtgggccgttgagttacctctgtgctggatcccgtgcccccacttgcctaccctctgtcctgccttgttattgtaagtgccttcaatactttgcattttgggataataaaaaaggctccctcccctgcc

SEQ ID NO: 327237 - DNA, 2092 bp, Homo sapiens
agggatccagcagtctccggcttcaggggcttctagcttcccggctcccggcggggcgggcccggggaggagctcggcgggtccccgcccagaggcggagcggagggccgggccggagcggggtgggtaggggacgcgaggcggagcggggccccacacaggccgcggcggctggctcgggcccctacggtcccggcggcggctggaggaggaagccaggcggctggcggaggaggagagacggaggaggccgagaccggagcgccgctcgccgcagacttacttccccggctcagcagggaaaggttcctagaaggtgagcgcggacggtatgcaaagttgtgaatccagtggtgacagtgcggatgaccctctcagtcgcggcctacggagaaggggacagcctcgtgtggtggtgatcggcgccggcttggctggcctggctgcagccaaagcacttcttgagcagggtttcacggatgtcactgtgcttgaggcttccagccacatcggaggccgtgtgcagagtgtgaaacttggacacgccacctttgagctgggagccacctggatccatggctcccatgggaaccctatctatcatctagcagaagccaacggcctcctggaagagacaaccgatggggaacgcagcgtgggccgcatcagcctctattccaagaatggcgtggcctgctaccttaccaaccacggccgcaggatccccaaggacgtggttgaggaattcagcgatttatacaacgaggtctataacttgacccaggagttcttccggcacgataaaccagtcaatgctgaaagtcaaaatagcgtgggggtgttcacccgagaggaggtgcgtaaccgcatcaggaatgaccctgacgacccagaggctaccaagcgcctgaagctcgccatgatccagcagtacctgaaggtggagagctgtgagagcagctcacacagcatggacgaggtgtccctgagcgccttcggggagtggaccgagatccccggcgctcaccacatcatcccctcgggcttcatgcgggttgtggagctgctggcggagggcatccctgcccacgtcatccagctagggaaacctgtccgctgcattcactgggaccaggcctcagcccgccccagaggccctgagattgagccccggggtgagggcgaccacaatcacgacactggggagggtggccagggtggagaggagccccgggggggcaggtgggatgaggatgagcagtggtcggtggtggtggagtgcgaggactgtgagctgatcccggcggaccatgtgattgtgaccgtgtcgctaggtgtgctaaagaggcagtacaccagtttcttccggccaggcctgcccacagagaaggtggctgccatccaccgcctgggcattggcaccaccgacaagatctttctggaattcgaggagcccttctggggccctgagtgcaacagcctacagtttgtgtgggaggacgaagcagagagccacaccctcacctacccacctgagctctggtaccgcaagatctgcggctttgatgtcctctacccgcctgagcgctacggccatgtgctgagcggctggatctgcggggaggaggccctcgtcatggagaagtgtgatgacgaggcagtggccgagatctgcacggagatgctgcgtcagttcacagggaaccccaacattccaaaacctcggcgaatcttgcgctcggcctggggcagcaacccttacttccgcggctcctattcatacacgcaggtgggctccagcggggcggatgtggagaagctggccaagcccctgccgtacacggagagctcaaagacagcgcccatgcaggtgctgttttccggtgaggccacccaccgcaagtactattccaccacccacggtgctctgctgtccggccagcgtgaggctgcccgcctcattgagatgtaccgagacctcttccagcaggggacctgagggctgtcctcgctgctgagaagagccactaactcgtgacctccagcctgccccttgctgacgagtccagcggatcctctagagtcagcctcc

SEQ ID NO: 327238 - DNA, 1940 bp, Homo sapiens
agggatccagcagtctccggcttcaggggcttctagcttcccggctcccggcggggcgggcccggggaggagctcggcgggtccccgcccagaggcggagcggagggccgggccggagcggggtgggtaggggacgcgaggcggagcggggccccacacaggccgcggcggctggctcgggcccctacggtcccggcggcggctggaggaggaagccaggcggctggcggaggaggagagacggaggaggccgagaccggagcgccgctcgccgcagacttacttccccggctcagcagggaaaggttcctagaaggtgagcgcggacggtatgcaaagttgtgaatccagtggtgacagtgcggatgaccctctcagtcgcggcctacggagaaggggacagcctcgtgtggtggtgatcggcgccggcttggctggcctggctgcagccaaagcacttcttgagcagggtttcacggatgtcactgtgcttgaggcttccagccacatcggaggccgtgtgcagagtgtgaaacttggacacgccacctttgagctgggagccacctggatccatggctcccatgggaaccctatctatcatctagcagaagccaacggcctcctggaagagacaaccgatggggaacgcagcgtgggccgcatcagcctctattccaagaatggcgtggcctgctaccttaccaaccacggccgcaggatccccaaggacgtggttgaggaattcagcgatttatacaacgaggtctataacttgacccaggagttcttccggcacgataaaccagtcaatgctgaaagtcaaaatagcgtgggggtgttcacccgagaggaggtgcgtaaccgcatcaggaatgaccctgacgacccagaggctaccaagcgcctgaagctcgccatgatccagcagtacctgaaggtggagagctgtgagagcagctcacacagcatggacgaggtgtccctgagcgccttcggggagtggaccgagatccccggcgctcaccacatcatcccctcgggcttcatgcgggttgtggagctgctggcggagggcatccctgcccacgtcatccagctagggaaacctgtccgctgcattcactgggaccaggcctcagcccgccccagaggccctgagattgagccccggggtgagggcgaccacaatcacgacactggggagggtggccagggtggagaggagccccgggggggcaggtgggatgaggatgagcagtggtcggtggtggtggagtgcgaggactgtgagctgatcccggcggaccatgtgattgtgaccgtgtcgctaggtgtgctaaagaggcagtacaccagtttcttccggccaggcctgcccacagagaaggtggctgccatccaccgcctgggcattggcaccaccgacaagatctttctggaattcgaggagcccttctggggccctgagtgcaacagcctacagtttgtgtgggaggacgaagcagagagccacaccctcacctacccacctgagctctggtaccgcaagatctgcggctttgatgtcctctacccgcctgagcgctacggccatgtgctgagcggctggatctgcggggaggaggccctcgtcatggagaagtgtgatgacgaggcagtggccgagatctgcacggagatgctgcgtcagttcacagggaaccccaacattccaaaacctcggcgaatcttgcgctcggcctggggcagcaacccttacttccgcggctcctattcatacacgcaggtgggctccagcggggcggatgtggagaagctggccaagcccctgccgtacacggagagctcaaagacagcgcaccgtgggtggtggaatagtacttgcggtgggtggcctcaccggaaaacagcacttgcatgggcgctgtctttgagct

SEQ ID NO: 327239 - DNA, 1588 bp, Homo sapiens
agggatccagcagtctccggcttcaggggcttctagcttcccggctcccggcggggcgggcccggggaggagctcggcgggtccccgcccagaggcggagcggagggccgggccggagcggggtgggtaggggacgcgaggcggagcggggccccacacaggccgcggcggctggctcgggcccctacggtcccggcggcggctggaggaggaagccaggcggctggcggaggaggagagacggaggaggccgagaccggagcgccgctcgccgcagacttacttccccggctcagcagggaaaggttcctagaaggtgagcgcggacggtatgcaaagttgtgaatccagtggtgacagtgcggatgaccctctcagtcgcggcctacggagaaggggacagcctcgtgtggtggtgatcggcgccggcttggctggcctggctgcagccaaagcacttcttgagcagggtttcacggatgtcactgtgcttgaggcttccagccacatcggaggccgtgtgcagagtgtgaaacttggacacgccacctttgagctgggagccacctggatccatggctcccatgggaaccctatctatcatctagcagaagccaacggcctcctggaagagacaaccgatggggaacgcagcgtgggccgcatcagcctctattccaagaatggcgtggcctgctaccttaccaaccacggccgcaggatccccaaggacgtggttgaggaattcagcgatttatacaacgaggtctataacttgacccaggagttcttccggcacgataaaccagtcaatgctgaaagtcaaaatagcgtgggggtgttcacccgagaggaggtgcgtaaccgcatcaggaatgaccctgacgacccagaggctaccaagcgcctgaagctcgccatgatccagcagtacctgaaggtggagagctgtgagagcagctcacacagcatggacgaggtgtccctgagcgccttcggggagtggaccgagatccccggcgctcaccacatcatcccctcgggcttcatgcgggttgtggagctgctggcggagggcatccctgcccacgtcatccagctagggaaacctgtccgctgcattcactgggaccaggcctcagcccgccccagaggccctgagattgagccccggggtgagggcgaccacaatcacggtgctctgctgtccggccagcgtgaggctgcccgcctcattgagatgtaccgagacctcttccagcaggggacctgagggctgtcctcgctgctgagaagagccactaactcgtgacctccagcctgccccttgctgccgtgtgctcctgccttcctgatcctctgtagaaaggatttttatcttctgtagagctagccgccctgactgccttcagacctggccctgtagcttttctttttctccaggctgggccgtgagcaggtgggccgttgagttacctctgtgctggatcccgtgcccccacttgcctaccctctgtcctgccttgttattgtaagtgccttcaatactttgcattttgggataataaaaaaggctccctcccctgcc

SEQ ID NO: 327240 - DNA, 720 bp, Homo sapiens
agaacccccgatattaggcggggaaacatgattatgtgtcatgtgttttcagatagataggaaaagtaaggtggagcgttttgccgggggtcacaggaggcgctgaggaaccccaacattccaaaacctcggcgaatcttgcgctcggcctggggcagcaacccttacttccgcggctcctattcatacacgcaggtgggctccagcggggcggatgtggagaagctggccaagcccctgccgtacacggagagctcaaagacagcgcccatgcaggtgctgttttccggtgaggccacccaccgcaagtactattccaccacccacggtgctctgctgtccggccagcgtgaggctgcccgcctcattgagatgtaccgagacctcttccagcaggggacctgagggctgtcctcgctgctgagaagagccactaactcgtgacctccagcctgccccttgctgccgtgtgctcctgccttcctgatcctctgtagaaaggatttttatcttctgtagagctagccgccctgactgccttcagacctggccctgtagcttttctttttctccaggctgggccgtgagcaggtgggccgttgagttacctctgtgctggatcccgtgcccccacttgcctaccctctgtcctgccttgttattgtaagtgccttcaatactttgcattttgggataataaaaaaggctccctcccctgcc

SEQ ID NO: 327241 - DNA, 2205 bp, Homo sapiens
ctttctgtgctgatcttggaggcagagtggctgcctgcattcattccacggtccattccacagcttgttccaaagacagtctgctcatgatgtagcttctgcacttgacaaactattttcatgcacgaggcccttgaaaatgttgacagtcttgtgacatccatggagggccttatttgacggtcacaaaggagcggttcctagaaggtgagcgcggacggtatgcaaagttgtgaatccagtggtgacagtgcggatgaccctctcagtcgcggcctacggagaaggggacagcctcgtgtggtggtgatcggcgccggcttggctggcctggctgcagccaaagcacttcttgagcagggtttcacggatgtcactgtgcttgaggcttccagccacatcggaggccgtgtgcagagtgtgaaacttggacacgccacctttgagctgggagccacctggatccatggctcccatgggaaccctatctatcatctagcagaagccaacggcctcctggaagagacaaccgatggggaacgcagcgtgggccgcatcagcctctattccaagaatggcgtggcctgctaccttaccaaccacggccgcaggatccccaaggacgtggttgaggaattcagcgatttatacaacgaggtctataacttgacccaggagttcttccggcacgataaaccagtcaatgctgaaagtcaaaatagcgtgggggtgttcacccgagaggaggtgcgtaaccgcatcaggaatgaccctgacgacccagaggctaccaagcgcctgaagctcgccatgatccagcagtacctgaaggtggagagctgtgagagcagctcacacagcatggacgaggtgtccctgagcgccttcggggagtggaccgagatccccggcgctcaccacatcatcccctcgggcttcatgcgggttgtggagctgctggcggagggcatccctgcccacgtcatccagctagggaaacctgtccgctgcattcactgggaccaggcctcagcccgccccagaggccctgagattgagccccggggtgagggcgaccacaatcacgacactggggagggtggccagggtggagaggagccccgggggggcaggtgggatgaggatgagcagtggtcggtggtggtggagtgcgaggactgtgagctgatcccggcggaccatgtgattgtgaccgtgtcgctaggtgtgctaaagaggcagtacaccagtttcttccggccaggcctgcccacagagaaggtggctgccatccaccgcctgggcattggcaccaccgacaagatctttctggaattcgaggagcccttctggggccctgagtgcaacagcctacagtttgtgtgggaggacgaagcagagagccacaccctcacctacccacctgagctctggtaccgcaagatctgcggctttgatgtcctctacccgcctgagcgctacggccatgtgctgagcggctggatctgcggggaggaggccctcgtcatggagaagtgtgatgacgaggcagtggccgagatctgcacggagatgctgcgtcagttcacagggaaccccaacattccaaaacctcggcgaatcttgcgctcggcctggggcagcaacccttacttccgcggctcctattcatacacgcaggtgggctccagcggggcggatgtggagaagctggccaagcccctgccgtacacggagagctcaaagacagcgcccatgcaggtgctgttttccggtgaggccacccaccgcaagtactattccaccacccacggtgctctgctgtccggccagcgtgaggctgcccgcctcattgagatgtaccgagacctcttccagcaggggacctgagggctgtcctcgctgctgagaagagccactaactcgtgacctccagcctgccccttgctgccgtgtgctcctgccttcctgatcctctgtagaaaggatttttatcttctgtagagctagccgccctgactgccttcagacctggccctgtagcttttctttttctccaggctgggccgtgagcaggtgggccgttgagttacctctgtgctggatcccgtgcccccacttgcctaccctctgtcctgccttgttattgtaagtgccttcaatactttgcattttgggataataaaaaaggctccctcccctgcc

SEQ ID NO: 327242 - DNA, 2314 bp, Homo sapiens
agggatccagcagtctccggcttcaggggcttctagcttcccggctcccggcggggcgggcccggggaggagctcggcgggtccccgcccagaggcggagcggagggccgggccggagcggggtgggtaggggacgcgaggcggagcggggccccacacaggccgcggcggctggctcgggcccctacggtcccggcggcggctggaggaggaagccaggcggctggcggaggaggagagacggaggaggccgagaccggagcgccgctcgccgcagacttacttccccggctcagcagggaaaggttcctagaaggtgagcgcggacggtatgcaaagttgtgaatccagtggtgacagtgcggatgaccctctcagtcgcggcctacggagaaggggacagcctcgtgtggtggtgatcggcgccggcttggctggcctggctgcagccaaagcacttcttgagcagggtttcacggatgtcactgtgcttgaggcttccagccacatcggaggccgtgtgcagagtgtgaaacttggacacgccacctttgagctgggagccacctggatccatggctcccatgggaaccctatctatcatctagcagaagccaacggcctcctggaagagacaaccgatggggaacgcagcgtgggccgcatcagcctctattccaagaatggcgtggcctgctaccttaccaaccacggccgcaggatccccaaggacgtggttgaggaattcagcgatttatacaacgaggtctataacttgacccaggagttcttccggcacgataaaccagtcaatgctgaaagtcaaaatagcgtgggggtgttcacccgagaggaggtgcgtaaccgcatcaggaatgaccctgacgacccagaggctaccaagcgcctgaagctcgccatgatccagcagtacctgaaggtggagagctgtgagagcagctcacacagcatggacgaggtgtccctgagcgccttcggggagtggaccgagatccccggcgctcaccacatcatcccctcgggcttcatgcgggttgtggagctgctggcggagggcatccctgcccacgtcatccagctagggaaacctgtccgctgcattcactgggaccaggcctcagcccgccccagaggccctgagattgagccccggggtgagggcgaccacaatcacgacactggggagggtggccagggtggagaggagccccgggggggcaggtgggatgaggatgagcagtggtcggtggtggtggagtgcgaggactgtgagctgatcccggcggaccatgtgattgtgaccgtgtcgctaggtgtgctaaagaggcagtacaccagtttcttccggccaggcctgcccacagagaaggtggctgccatccaccgcctgggcattggcaccaccgacaagatctttctggaattcgaggagcccttctggggccctgagtgcaacagcctacagtttgtgtgggaggacgaagcagagagccacaccctcacctacccacctgagctctggtaccgcaagatctgcggctttgatgtcctctacccgcctgagcgctacggccatgtgctgagcggctggatctgcggggaggaggccctcgtcatggagaagtgtgatgacgaggcagtggccgagatctgcacggagatgctgcgtcagttcacagggaaccccaacattccaaaacctcggcgaatcttgcgctcggcctggggcagcaacccttacttccgcggctcctattcatacacgcaggtgggctccagcggggcggatgtggagaagctggccaagcccctgccgtacacggagagctcaaagacagcgcccatgcaggtgctgttttccggtgaggccacccaccgcaagtactattccaccacccacggtgctctgctgtccggccagcgtgaggctgcccgcctcattgagatgtaccgagacctcttccagcaggggacctgagggctgtcctcgctgctgagaagagccactaactcgtgacctccagcctgccccttgctgccgtgtgctcctgccttcctgatcctctgtagaaaggatttttatcttctgtagagctagccgccctgactgccttcagacctggccctgtagcttttctttttctccaggctgggccgtgagcaggtgggccgttgagttacctctgtgctggatcccgtgcccccacttgcctaccctctgtcctgccttgttattgtaagtgccttcaatactttgcattttgggataataaaaaaggctccctcccctgcc

SEQ ID NO: 327243 - DNA, 2155 bp, Homo sapiens
agggatccagcagtctccggcttcaggggcttctagcttcccggctcccggcggggcgggcccggggaggagctcggcgggtccccgcccagaggcggagcggagggccgggccggagcggggtgggtaggggacgcgaggcggagcggggccccacacaggccgcggcggctggctcgggcccctacggtcccggcggcggctggaggaggaagccaggcggctggcggaggaggagagacggaggaggccgagaccggagcgccgctcgccgcagacttacttccccggctcagcagggaaaggttcctagaaggtgagcgcggacggtatgcaaagttgtgaatccagtggtgacagtgcggatgaccctctcagtcgcggcctacggagaaggggacagcctcgtgtggtggtgatcggcgccggcttggctggcctggctgcagccaaagcacttcttgagcagggtttcacggatgtcactgtgcttgaggcttccagccacatcggaggccgtgtgcagagtgtgaaacttggacacgccacctttgagctgggagccacctggatccatggctcccatgggaaccctatctatcatctagcagaagccaacggcctcctggaagagacaaccgatggggaacgcagcgtgggccgcatcagcctctattccaagaatggcgtggcctgctaccttaccaaccacggccgcaggatccccaaggacgtggttgaggaattcagcgatttatacaacgaggtctataacttgacccaggagttcttccggcacgataaaccagtcaatgctgaaagtcaaaatagcgtgggggtgttcacccgagaggaggtgcgtaaccgcatcaggaatgaccctgacgacccagaggctaccaagcgcctgaagctcgccatgatccagcagtacctgaaggtggagagctgtgagagcagctcacacagcatggacgaggtgtccctgagcgccttcggggagtggaccgagatccccggcgctcaccacatcatcccctcgggcttcatgcgggttgtggagctgctggcggagggcatccctgcccacgtcatccagctagggaaacctgtccgctgcattcactgggaccaggcctcagcccgccccagaggccctgagattgagccccggggtgtgctaaagaggcagtacaccagtttcttccggccaggcctgcccacagagaaggtggctgccatccaccgcctgggcattggcaccaccgacaagatctttctggaattcgaggagcccttctggggccctgagtgcaacagcctacagtttgtgtgggaggacgaagcagagagccacaccctcacctacccacctgagctctggtaccgcaagatctgcggctttgatgtcctctacccgcctgagcgctacggccatgtgctgagcggctggatctgcggggaggaggccctcgtcatggagaagtgtgatgacgaggcagtggccgagatctgcacggagatgctgcgtcagttcacagggaaccccaacattccaaaacctcggcgaatcttgcgctcggcctggggcagcaacccttacttccgcggctcctattcatacacgcaggtgggctccagcggggcggatgtggagaagctggccaagcccctgccgtacacggagagctcaaagacagcgcccatgcaggtgctgttttccggtgaggccacccaccgcaagtactattccaccacccacggtgctctgctgtccggccagcgtgaggctgcccgcctcattgagatgtaccgagacctcttccagcaggggacctgagggctgtcctcgctgctgagaagagccactaactcgtgacctccagcctgccccttgctgccgtgtgctcctgccttcctgatcctctgtagaaaggatttttatcttctgtagagctagccgccctgactgccttcagacctggccctgtagcttttctttttctccaggctgggccgtgagcaggtgggccgttgagttacctctgtgctggatcccgtgcccccacttgcctaccctctgtcctgccttgttattgtaagtgccttcaatactttgcattttgggataataaaaaaggctccctcccctgcc

SEQ ID NO: 327244 - DNA, 2359 bp, Homo sapiens
gaggaatggtcacatttatgagttaactggaagaaagagacagagaaggagtgtcaagagaggtgaaagccaagagcaggtgccaaagaaagcgagtacacttctaaggaaggaggaaatggtcagtgagtcaaaatattcccaagaggggtccagctagcgaggaggaaagctgtgatggggtgcaggagtggaggagaaacgtggcaactgccgaataaacacaccaaccagggaagacggccaaggctgggcccagaatatctggaatggaacccatcttccttttgcagcaggaagtggagttggaagctgagttgactgtggaatttccgagcttggaggatgttgttcctagaaggtgagcgcggacggtatgcaaagttgtgaatccagtggtgacagtgcggatgaccctctcagtcgcggcctacggagaaggggacagcctcgtgtggtggtgatcggcgccggcttggctggcctggctgcagccaaagcacttcttgagcagggtttcacggatgtcactgtgcttgaggcttccagccacatcggaggccgtgtgcagagtgtgaaacttggacacgccacctttgagctgggagccacctggatccatggctcccatgggaaccctatctatcatctagcagaagccaacggcctcctggaagagacaaccgatggggaacgcagcgtgggccgcatcagcctctattccaagaatggcgtggcctgctaccttaccaaccacggccgcaggatccccaaggacgtggttgaggaattcagcgatttatacaacgaggtctataacttgacccaggagttcttccggcacgataaaccagtcaatgctgaaagtcaaaatagcgtgggggtgttcacccgagaggaggtgcgtaaccgcatcaggaatgaccctgacgacccagaggctaccaagcgcctgaagctcgccatgatccagcagtacctgaaggtggagagctgtgagagcagctcacacagcatggacgaggtgtccctgagcgccttcggggagtggaccgagatccccggcgctcaccacatcatcccctcgggcttcatgcgggttgtggagctgctggcggagggcatccctgcccacgtcatccagctagggaaacctgtccgctgcattcactgggaccaggcctcagcccgccccagaggccctgagattgagccccggggtgagggcgaccacaatcacgacactggggagggtggccagggtggagaggagccccgggggggcaggtgggatgaggatgagcagtggtcggtggtggtggagtgcgaggactgtgagctgatcccggcggaccatgtgattgtgaccgtgtcgctaggtgtgctaaagaggcagtacaccagtttcttccggccaggcctgcccacagagaaggtggctgccatccaccgcctgggcattggcaccaccgacaagatctttctggaattcgaggagcccttctggggccctgagtgcaacagcctacagtttgtgtgggaggacgaagcagagagccacaccctcacctacccacctgagctctggtaccgcaagatctgcggctttgatgtcctctacccgcctgagcgctacggccatgtgctgagcggctggatctgcggggaggaggccctcgtcatggagaagtgtgatgacgaggcagtggccgagatctgcacggagatgctgcgtcagttcacagggaaccccaacattccaaaacctcggcgaatcttgcgctcggcctggggcagcaacccttacttccgcggctcctattcatacacgcaggtgggctccagcggggcggatgtggagaagctggccaagcccctgccgtacacggagagctcaaagacagcgcccatgcaggtgctgttttccggtgaggccacccaccgcaagtactattccaccacccacggtgctctgctgtccggccagcgtgaggctgcccgcctcattgagatgtaccgagacctcttccagcaggggacctgagggctgtcctcgctgctgagaagagccactaactcgtgacctccagcctgccccttgctgccgtgtgctcctgccttcctgatcctctgtagaaaggatttttatcttctgtagagctagccgccctgactgccttcagacctggccctgtagcttttctttttctccaggctgggccgtgagcaggtgggccgttgagttacctctgtgctggatcccgtgcccccacttgcctaccctctgtcctgccttgttattgtaagtgccttcaatactttgcattttgggataataaaaaaggctccctcccctgcc

SEQ ID NO: 327245 - DNA, 2242 bp, Homo sapiens
agggatccagcagtctccggcttcaggggcttctagcttcccggctcccggcggggcgggcccggggaggagctcggcgggtccccgcccagaggcggagcggagggccgggccggagcggggtgggtaggggacgcgaggcggagcggggccccacacaggccgcggcggctggctcgggcccctacggtcccggcggcggctggaggaggaagccaggcggctggcggaggaggagagacggaggaggccgagaccggagcgccgctcgccgcagacttacttccccggctcagcagggaaaggttcctagaaggtgagcgcggacggtatgcaaagttgtgaatccagtggtgacagtgcggatgaccctctcagtcgcggcctacggagaaggggacagcctcgtgtggtggtgatcggcgccggcttggctggcctggctgcagccaaagcacttcttgagcagggtttcacggatgtcactgtgcttgaggcttccagccacatcggaggccgtgtgcagagtgtgaaacttggacacgccacctttgagctgggagccacctggatccatggctcccatgggaaccctatctatcatctagcagaagccaacggcctcctggaagagacaaccgatggggaacgcagcgtgggccgcatcagcctctattccaagaatggcgtggcctgctaccttaccaaccacggccgcaggatccccaaggacgtggttgaggaattcagcgatttatacaacgaggtctataacttgacccaggagttcttccggcacgataaaccagtcaatgctgaaagtcaaaatagcgtgggggtgttcacccgagaggaggtgcgtaaccgcatcaggaatgaccctgacgacccagaggctaccaagcgcctgaagctcgccatgatccagcagtacctgaaggtggagagctgtgagagcagctcacacagcatggacgaggtgtccctgagcgccttcggggagtggaccgagatccccggcgctcaccacatcatcccctcgggcttcatgcgggttgtggagctgctggcggagggcatccctgcccacgtcatccagctagggaaacctgtccgctgcattcactgggaccaggcctcagcccgccccagaggccctgagattgagccccggggtgagggcgaccacaatcacgacactggggagggtggccagggtggagaggagccccgggggggcaggtgggatgaggatgagcagtggtcggtggtggtggagtgcgaggactgtgagctgatcccggcggaccatgtgattgtgaccgtgtcgctaggtgtgctaaagaggcagtacaccagtttcttccggccaggcctgcccacagagaaggtggctgccatccaccgcctgggcattggcaccaccgacaagatctttctggaattcgaggagcccttctggggccctgagtgcaacagcctacagtttgtgtgggaggacgaagcagagagccacaccctcacctacccacctgagctctggtaccgcaagatctgcggctttgatgtcctctacccgcctgagcgctacggccatgtgctgagcggctggatctgcggggaggaggccctcgtcatggagaagtgtgatgacgaggcagtggccgagatctgcacggagatgctgcgtcagttcacagggaaccccaacattccaaaacctcggcgaatcttgcgctcggcctggggcagcaacccttacttccgcggctcctattcatacacgcagcccatgcaggtgctgttttccggtgaggccacccaccgcaagtactattccaccacccacggtgctctgctgtccggccagcgtgaggctgcccgcctcattgagatgtaccgagacctcttccagcaggggacctgagggctgtcctcgctgctgagaagagccactaactcgtgacctccagcctgccccttgctgccgtgtgctcctgccttcctgatcctctgtagaaaggatttttatcttctgtagagctagccgccctgactgccttcagacctggccctgtagcttttctttttctccaggctgggccgtgagcaggtgggccgttgagttacctctgtgctggatcccgtgcccccacttgcctaccctctgtcctgccttgttattgtaagtgccttcaatactttgcattttgggataataaaaaaggctccctcccctgcc

SEQ ID NO: 327246 - DNA, 1759 bp, Homo sapiens
agggatccagcagtctccggcttcaggggcttctagcttcccggctcccggcggggcgggcccggggaggagctcggcgggtccccgcccagaggcggagcggagggccgggccggagcggggtgggtaggggacgcgaggcggagcggggccccacacaggccgcggcggctggctcgggcccctacggtcccggcggcggctggaggaggaagccaggcggctggcggaggaggagagacggaggaggccgagaccggagcgccgctcgccgcagacttacttccccggctcagcagggaaaggttcctagaaggtgagcgcggacggtatgcaaagttgtgaatccagtggtgacagtgcggatgaccctctcagtcgcggcctacggagaaggggacagcctcgtgtggtggtgatcggcgccggcttggctggcctggctgcagccaaagcacttcttgagcagggtttcacggatgtcactgtgcttgaggcttccagccacatcggaggccgtgtgcagagtgtgaaacttggacacgccacctttgagctgggagccacctggatccatggctcccatgggaaccctatctatcatctagcagaagccaacggcctcctggaagagacaaccgatggggaacgcagcgtgggccgcatcagcctctattccaagaatggcgtggcctgctaccttaccaaccacggccgcaggatccccaaggacgtggttgaggaattcagcgatttatacaacgaggtctataacttgacccaggagttcttccggcacgataaaccagtcaatgctgaaagtcaaaatagcgtgggggtgttcacccgagaggaggtgcgtaaccgcatcaggaatgaccctgacgacccagaggctaccaagcgcctgaagctcgccatgatccagcagtacctgaaggtggagagctgtgagagcagctcacacagcatggacgaggtgtccctgagcgccttcggggagtggaccgagatccccggcgctcaccacatcatcccctcgggcttcatgcgggttgtggagctgctggcggagggcatccctgcccacgtcatccagctagggaaacctgtccgctgcattcactgggaccaggcctcagcccgccccagaggccctgagattgagccccggggtgagggcgaccacaatcacgacactggggagggtggccagggtggagaggagccccgggggggcaggtgggatgaggatgagcagtggtcggtggtggtggagtgcgaggactgtgagctgatcccggcggaccatgtgattgtgaccgtgtcgctaggtgtgctaaagaggcagtacaccagtttcttccggccaggcctgcccacagagaaggtggctgccatccaccgcctgggcattggcaccaccgacaagatctttctggaattcgaggagcccttctggggccctgagtgcaacagcctacagtttgtgtgggaggacgaagcagagagccacaccctcacctacccacctgagctctggtaccgcaagatctgcggctttgatgtcctctacccgcctgagcgctacggccatgtgctgagcggctggatctgcggggaggaggccctcgtcatggagaagtgtgatgacgaggcagtggccgagatctgcacggagatgctgcgtcagttcacagaggtgcgccacgtgccccacgacccgcttcccccaccctgcttcttcctcacctgccct

SEQ ID NO: 327247 - DNA, 713 bp, Homo sapiens
aaggtcactcccaaggatttcgctgggccctcgtcatggagaagtgtgatgacgaggcagtggccgagatctgcacggagatgctgcgtcagttcacagggaaccccaacattccaaaacctcggcgaatcttgcgctcggcctggggcagcaacccttacttccgcggctcctattcatacacgcaggtgggctccagcggggcggatgtggagaagctggccaagcccctgccgtacacggagagctcaaagacagcgcccatgcaggtgctgttttccggtgaggccacccaccgcaagtactattccaccacccacggtgctctgctgtccggccagcgtgaggctgcccgcctcattgagatgtaccgagacctcttccagcaggggacctgagggctgtcctcgctgctgagaagagccactaactcgtgacctccagcctgccccttgctgccgtgtgctcctgccttcctgatcctctgtagaaaggatttttatcttctgtagagctagccgccctgactgccttcagacctggccctgtagcttttctttttctccaggctgggccgtgagcaggtgggccgttgagttacctctgtgctggatcccgtgcccccacttgcctaccctctgtcctgccttgttattgtaagtgccttcaatactttgcattttgggataataaaaaaggctccctcccctgcc

SEQ ID NO: 327248 - DNA, 872 bp, Homo sapiens
gctgggagctaccagagtatttgaccttgggcacagctggggtggccccgatggcgctgctgtctgctgatggtctccacagcttccccagcgaggccttcctggaaggagtgctgagcagcaaagctctgtggtcacgactcaggacaaaggggaaccagctgaacagagcctttcatgtgacaacaaaaaacgacctggctcaaacatcacgacaggcatctgtggagcctgggaaatgacctttctcatggggagaacacagaacacacaaagctttctcttaaaagtctacaaaattataatctgataacaacagaacgttttggtattttgagtaataggtgtcacatcggaattgatatttgccaaatttggcatgataattgaatgctttttgcttatttatatttcatattttagttgttttctaataaccaaaaacatttgtgtatttttaataatagtagaggtaaatgaaattttacatgtcagtaaaaaaactgaaagatgatgcttgtaatttcaagtcgattaaagaaaattattaataaaacaataaaatacaaattatacattttatattgtgatacttaaagtagatgacctggtttatccctgaagagaaagcatggatgcataaaccagaccatattgtaaatatttcaaattcattggtaaacattgttttaagaaggtgattagcaaatattgtttcaagaaggtgattaagaaggtgatgcaaaatttggagtactttctgttttgtatttttcgtgactatttgtgagcacttggtgcttaagacacactcaaagaggtactgacaatttatcatattctaaagcaataaaacaggttgaaaatatcta

SEQ ID NO: 327249 - DNA, 278 bp, Homo sapiens
taaatatttattgagttattttaacagccacccaatgatgatgaatactgttatctccattttaaagacaagagaaactgaggtataaatagattatgtatcttacgttcagtcatgtcactaccactaaatggcagattcaggatctgtctgacttccaagttcttaacaacaatatattttttttctcttttcactccatctaggcctctgtttttgcagttctgcagcacatcaacgcttgattccaaattcagattgttaatcatgttcttgtc

SEQ ID NO: 327250 - DNA, 1060 bp, Homo sapiens
  misc_feature (864)..(864): n is a, c, g, or t
ccaccccacaccaccaccacacaccacatagcaggtgagacgcggttaatcggccgagggtaccctggactacctgcactcggagaagaacgtggtgtaccgggacctcaagctggagaacctcatgctggacaaggacgggcacattaagatcacagacttcgggctgtgcaaggaggggatcaaggacggtgccaccatgaagaccttttgcggcacacctgagtacctggcccccgaggtgctggaggacaatgactacggccgtgcagtggactggtgggggctgggcgtggtcatgtacgagatgatgtgcggtcgcctgcccttctacaaccaggaccatgagaagctttttgagctcatcctcatggaggagatccgcttcccgcgcacgcttggtcccgaggccaagtccttgctttcagggctgctcaagaaggaccccaagcagaggcttggcgggggctccgaggacgccaaggagatcatgcagcatcgcttctttgccggtatcgtgtggcagcacgtgtacgagaagaagctcagcccacccttcaagccccaggtcacgtcggagactgacaccaggtattttgatgaggagttcacggcccagatgatcaccatcacaccacctgaccaagatgacagcatggagtgtgtggacagcgagcgcaggccccacttcccccagttctcctactcggccagcggcacggcctgaggcggcggtggactgcgctggacgatagcttggagggatggagaggcggcctcgtgccatgatctgtatttaatggtttttatttctcgggtgcatttgagagaagccacgctgtcctctcgagcccagatggaaangttttgtgtgggagacctccacgagggggttgggaaaaaataatcgggttaattattaaccagtgggtcccgggtgggtaggctaaaaacgataagtgggaaagtaggttggagtgcgcaggattgggggaggatgagggtccaatgtgaacgcgggtgggaaagattattggcgggataactggagagacacatg

SEQ ID NO: 327251 - DNA, 807 bp, Homo sapiens
gtgcagggacagggacagcacctacttttctggcacatgggggagtccgccctggagggaggcagctctttctgcatgagtcgccatcctgggtgctcatctttcagggaccctaggagccctggccatcaccccagctgatggggtctgccagctgggttcggaagcctgcactctgagatgctgggtgccctgtcaccaggtgtgcttctgccccgttcccagcctgcccctcccctgaatgcctgtcctaggctgtgtgcactggtcgggctgggcagccctgggacccagctgggcacctgttctcccattaacacagggtgccctggtcctggtccccgttcctgccttgaggcctgccaccctcctgccctgccctccaagggtatggggggcctgggcagtgctcaacctctgcccagccttgaccagagaccttgctaattgacaatggacaatgctggtgcccagcccagactctggggtggggcagtgcttgagggggtccttgactgtgggacctgaggggctctctggcagctcctcacgtgtgcacatcaccttatagtcacccttcatcctgggtcattgagagtcctgtctgcagccagatgccagcaggctgtggtcctgtagtccctgagccatggaggcagggtgggctcatcctgtgcaccttgttccacagtctccctctttcccaatttacaagaagaccaataagaaaaataagaaaacaagaaagaaaaaggaaaaataaagttatcacctcctggtagcagggagggtctctcagagctgggc

SEQ ID NO: 327252 - DNA, 501 bp, Homo sapiens
catctgccacccgtgcaggtgctggaggacaatgactacggccgtgcagtggactggtgggggctgggcgtggtcatgtacgagatgatgtgcggtcgcctgcccttctacaaccaggaccatgagaagctttttgagctcatcctcatggaggagatccgcttcccgcgcacgcttggtcccgaggccaagtccttgctttcagggctgctcaagaaggaccccaagcagaggcttggcgggggctccgaggacgccaaggagatcatgcagcatcgcttctttgccggtatcgtgtggcagcacgtgtacgagaagaagaggtgcggctgctccccgcatattcacgcgcacgcatgctccccacatatccacactcacgcatgcacgtggcacgctcgccagatttcccacacactcaccctcacgagcctgctgcagtcctggtacaaggagggccttgctgcaccaacctcagcgcctggtgctcagaggctctgg

SEQ ID NO: 327253 - DNA, 529 bp, Homo sapiens
  misc_feature (523)..(524): n is a, c, g, or t
ggcacgaggggcggccgagcaccgagcgctgggcaccgggcaccgagcggcggcggcacgcgaggcccggccccgagcagcgcccccgcccgccgcggcctccagcccggccccgcccagcgccggcccgcggggatgcggagcggcgggcgccggaggccgcggcccggctaggcccgcgctcgcgcccggacgcggcggcccgaggctgtggccaggccagctgggctcggggagcgccagcctgagaggagcgcgtgagcgtcgcgggagcctcgggcaccatgagcgacgtggctattgtgaaggagggttggctgcacaaacgaggggatggtttatgttgaatgtttagtttttcttctgcatgatacgtcatgttgtgggatctttagaaaacttcatactgtatgaataagaaaataaaatatttgaaacttgcaaaaaaaaaaaaaaaaaaaaaaaaaaaaaaaaaaaaaaaaaaacacaaaaaaaaaaaaaaaaaaaaaaagggggggggggnntaaaa

SEQ ID NO: 327254 - DNA, 221 bp, Homo sapiens
tcagtgtcgtcagagccccctgtgcctgaggcgtgcgcggctcggagccctgccctcggagtcctgcggtgccttcctcgagtctggcctgctttccatcctgctaagtacttggggcatttccctctttgggtaaggtgtggtcttccctgtcctggcattagacacaaggcagtgggccttcctgccattctaagtgtagcttaagacaatcagtgcaa

SEQ ID NO: 327255 - DNA, 2897 bp, Homo sapiens
ggcacgaggggcggccgagcaccgagcgctgggcaccgggcaccgagcggcggcggcacgcgaggcccggccccgagcagcgcccccgcccgccgcggcctccagcccggccccgcccagcgccggcccgcggggatgcggagcggcgggcgccggaggccgcggcccggctaggcccgcgctcgcgcccggacgcggcggcccgtctggggagcagggaggagccctgtgccctgtcccaggatccatgggtaggaacaccatggacagggagagcaaacggggccatctgtcaccaggggcttagggaaggccgagccagcctgggtcaaagaagtcaaaggggctgcctggaggaggcagcctgtcagctggtgcatcagaggctgtggccaggccagctgggctcggggagcgccagcctgagaggagcgcgtgagcgtcgcgggagcctcgggcaccatgagcgacgtggctattgtgaaggagggttggctgcacaaacgaggggagtacatcaagacctggcggccacgctacttcctcctcaagaatgatggcaccttcattggctacaaggagcggccgcaggatgtggaccaacgtgaggctcccctcaacaacttctctgtggcgcagtgccagctgatgaagacggagcggccccggcccaacaccttcatcatccgctgcctgcagtggaccactgtcatcgaacgcaccttccatgtggagactcctgaggagcgggaggagtggacaaccgccatccagactgtggctgacggcctcaagaagcaggaggaggaggagatggacttccggtcgggctcacccagtgacaactcaggggctgaagagatggaggtgtccctggccaagcccaagcaccgcgtgaccatgaacgagtttgagtacctgaagctgctgggcaagggcactttcggcaaggtgatcctggtgaaggagaaggccacaggccgctactacgccatgaagatcctcaagaaggaagtcatcgtggccaaggacgaggtggcccacacactcaccgagaaccgcgtcctgcagaactccaggcaccccttcctcacagccctgaagtactctttccagacccacgaccgcctctgctttgtcatggagtacgccaacgggggcgagctgttcttccacctgtcccgggagcgtgtgttctccgaggaccgggcccgcttctatggcgctgagattgtgtcagccctggactacctgcactcggagaagaacgtggtgtaccgggacctcaagctggagaacctcatgctggacaaggacgggcacattaagatcacagacttcgggctgtgcaaggaggggatcaaggacggtgccaccatgaagaccttttgcggcacacctgagtacctggcccccgaggtgctggaggacaatgactacggccgtgcagtggactggtgggggctgggcgtggtcatgtacgagatgatgtgcggtcgcctgcccttctacaaccaggaccatgagaagctttttgagctcatcctcatggaggagatccgcttcccgcgcacgcttggtcccgaggccaagtccttgctttcagggctgctcaagaaggaccccaagcagaggcttggcgggggctccgaggacgccaaggagatcatgcagcatcgcttctttgccggtatcgtgtggcagcacgtgtacgagaagaagctcagcccacccttcaagccccaggtcacgtcggagactgacaccaggtattttgatgaggagttcacggcccagatgatcaccatcacaccacctgaccaagatgacagcatggagtgtgtggacagcgagcgcaggccccacttcccccagttctcctactcggccagcggcacggcctgaggcggcggtggactgcgctggacgatagcttggagggatggagaggcggcctcgtgccatgatctgtatttaatggtttttatttctcgggtgcatttgagagaagccacgctgtcctctcgagcccagatggaaagacgtttttgtgctgtgggcagcaccctcccccgcagcggggtagggaagaaaactatcctgcgggttttaatttatttcatccagtttgttctccgggtgtggcctcagccctcagaacaatccgattcacgtagggaaatgttaaggacttctgcagctatgcgcaatgtggcattggggggccgggcaggtcctgcccatgtgtcccctcactctgtcagccagccgccctgggctgtctgtcaccagctatctgtcatctctctggggccctgggcctcagttcaacctggtggcaccagatgcaacctcactatggtatgctggccagcaccctctcctgggggtggcaggcacacagcagccccccagcactaaggccgtgtctctgaggacgtcatcggaggctgggcccctgggatgggaccagggatgggggatgggccagggtttacccagtgggacagaggagcaaggtttaaatttgttattgtgtattatgttgttcaaatgcattttgggggtttttaatctttgtgacaggaaagccctcccccttccccttctgtgtcacagttcttggtgactgtcccaccgggagcctccccctcagatgatctctccacggtagcacttgaccttttcgacgcttaacctttccgctgtcgccccaggccctccctgactccctgtgggggtggccatccctgggcccctccacgcctcctggccagacgctgccgctgccgctgcaccacggcgtttttttacaacattcaactttagtatttttactattataatataatatggaaccttccctccaaattcttcaataaaagttgcttttcaaa

SEQ ID NO: 327256 - DNA, 2617 bp, Homo sapiens
gtggagcccccaggcacgtgcagtgggtctctggctcacccagggcgaggagctgcccttagccaggcgtggcctcacattcagcttcctttgcttctcccagaggctgtggccaggccagctgggctcggggagcgccagcctgagaggagcgcgtgagcgtcgcgggagcctcgggcaccatgagcgacgtggctattgtgaaggagggttggctgcacaaacgaggggagtacatcaagacctggcggccacgctacttcctcctcaagaatgatggcaccttcattggctacaaggagcggccgcaggatgtggaccaacgtgaggctcccctcaacaacttctctgtggcgcagtgccagctgatgaagacggagcggccccggcccaacaccttcatcatccgctgcctgcagtggaccactgtcatcgaacgcaccttccatgtggagactcctgaggagcgggaggagtggacaaccgccatccagactgtggctgacggcctcaagaagcaggaggaggaggagatggacttccggtcgggctcacccagtgacaactcaggggctgaagagatggaggtgtccctggccaagcccaagcaccgcgtgaccatgaacgagtttgagtacctgaagctgctgggcaagggcactttcggcaaggtgatcctggtgaaggagaaggccacaggccgctactacgccatgaagatcctcaagaaggaagtcatcgtggccaaggacgaggtggcccacacactcaccgagaaccgcgtcctgcagaactccaggcaccccttcctcacagccctgaagtactctttccagacccacgaccgcctctgctttgtcatggagtacgccaacgggggcgagctgttcttccacctgtcccgggagcgtgtgttctccgaggaccgggcccgcttctatggcgctgagattgtgtcagccctggactacctgcactcggagaagaacgtggtgtaccgggacctcaagctggagaacctcatgctggacaaggacgggcacattaagatcacagacttcgggctgtgcaaggaggggatcaaggacggtgccaccatgaagaccttttgcggcacacctgagtacctggcccccgaggtgctggaggacaatgactacggccgtgcagtggactggtgggggctgggcgtggtcatgtacgagatgatgtgcggtcgcctgcccttctacaaccaggaccatgagaagctttttgagctcatcctcatggaggagatccgcttcccgcgcacgcttggtcccgaggccaagtccttgctttcagggctgctcaagaaggaccccaagcagaggcttggcgggggctccgaggacgccaaggagatcatgcagcatcgcttctttgccggtatcgtgtggcagcacgtgtacgagaagaagctcagcccacccttcaagccccaggtcacgtcggagactgacaccaggtattttgatgaggagttcacggcccagatgatcaccatcacaccacctgaccaagatgacagcatggagtgtgtggacagcgagcgcaggccccacttcccccagttctcctactcggccagcggcacggcctgaggcggcggtggactgcgctggacgatagcttggagggatggagaggcggcctcgtgccatgatctgtatttaatggtttttatttctcgggtgcatttgagagaagccacgctgtcctctcgagcccagatggaaagacgtttttgtgctgtgggcagcaccctcccccgcagcggggtagggaagaaaactatcctgcgggttttaatttatttcatccagtttgttctccgggtgtggcctcagccctcagaacaatccgattcacgtagggaaatgttaaggacttctgcagctatgcgcaatgtggcattggggggccgggcaggtcctgcccatgtgtcccctcactctgtcagccagccgccctgggctgtctgtcaccagctatctgtcatctctctggggccctgggcctcagttcaacctggtggcaccagatgcaacctcactatggtatgctggccagcaccctctcctgggggtggcaggcacacagcagccccccagcactaaggccgtgtctctgaggacgtcatcggaggctgggcccctgggatgggaccagggatgggggatgggccagggtttacccagtgggacagaggagcaaggtttaaatttgttattgtgtattatgttgttcaaatgcattttgggggtttttaatctttgtgacaggaaagccctcccccttccccttctgtgtcacagttcttggtgactgtcccaccgggagcctccccctcagatgatctctccacggtagcacttgaccttttcgacgcttaacctttccgctgtcgccccaggccctccctgactccctgtgggggtggccatccctgggcccctccacgcctcctggccagacgctgccgctgccgctgcaccacggcgtttttttacaacattcaactttagtatttttactattataatataatatggaaccttccctccaaattcttcaataaaagttgcttttcaaa

SEQ ID NO: 327257 - DNA, 2409 bp, Homo sapiens
gctgctctagaggatcctcagggagtacatcaagacctggcggccacgctacttcctcctcaagaatgatggcaccttcattggctacaaggagcggccgcaggatgtggaccaacgtgaggctcccctcaacaacttctctgtggcgcagtgccagctgatgaagacggagcggccccggcccaacaccttcatcatccgctgcctgcagtggaccactgtcatcgaacgcaccttccatgtggagactcctgaggagcgggaggagtggacaaccgccatccagactgtggctgacggcctcaagaagcaggaggaggaggagatggacttccggtcgggctcacccagtgacaactcaggggctgaagagatggaggtgtccctggccaagcccaagcaccgcgtgaccatgaacgagtttgagtacctgaagctgctgggcaagggcactttcggcaaggtgatcctggtgaaggagaaggccacaggccgctactacgccatgaagatcctcaagaaggaagtcatcgtggccaaggacgaggtggcccacacactcaccgagaaccgcgtcctgcagaactccaggcaccccttcctcacagccctgaagtactctttccagacccacgaccgcctctgctttgtcatggagtacgccaacgggggcgagctgttcttccacctgtcccgggagcgtgtgttctccgaggaccgggcccgcttctatggcgctgagattgtgtcagccctggactacctgcactcggagaagaacgtggtgtaccgggacctcaagctggagaacctcatgctggacaaggacgggcacattaagatcacagacttcgggctgtgcaaggaggggatcaaggacggtgccaccatgaagaccttttgcggcacacctgagtacctggcccccgaggtgctggaggacaatgactacggccgtgcagtggactggtgggggctgggcgtggtcatgtacgagatgatgtgcggtcgcctgcccttctacaaccaggaccatgagaagctttttgagctcatcctcatggaggagatccgcttcccgcgcacgcttggtcccgaggccaagtccttgctttcagggctgctcaagaaggaccccaagcagaggcttggcgggggctccgaggacgccaaggagatcatgcagcatcgcttctttgccggtatcgtgtggcagcacgtgtacgagaagaagctcagcccacccttcaagccccaggtcacgtcggagactgacaccaggtattttgatgaggagttcacggcccagatgatcaccatcacaccacctgaccaagatgacagcatggagtgtgtggacagcgagcgcaggccccacttcccccagttctcctactcggccagcggcacggcctgaggcggcggtggactgcgctggacgatagcttggagggatggagaggcggcctcgtgccatgatctgtatttaatggtttttatttctcgggtgcatttgagagaagccacgctgtcctctcgagcccagatggaaagacgtttttgtgctgtgggcagcaccctcccccgcagcggggtagggaagaaaactatcctgcgggttttaatttatttcatccagtttgttctccgggtgtggcctcagccctcagaacaatccgattcacgtagggaaatgttaaggacttctgcagctatgcgcaatgtggcattggggggccgggcaggtcctgcccatgtgtcccctcactctgtcagccagccgccctgggctgtctgtcaccagctatctgtcatctctctggggccctgggcctcagttcaacctggtggcaccagatgcaacctcactatggtatgctggccagcaccctctcctgggggtggcaggcacacagcagccccccagcactaaggccgtgtctctgaggacgtcatcggaggctgggcccctgggatgggaccagggatgggggatgggccagggtttacccagtgggacagaggagcaaggtttaaatttgttattgtgtattatgttgttcaaatgcattttgggggtttttaatctttgtgacaggaaagccctcccccttccccttctgtgtcacagttcttggtgactgtcccaccgggagcctccccctcagatgatctctccacggtagcacttgaccttttcgacgcttaacctttccgctgtcgccccaggccctccctgactccctgtgggggtggccatccctgggcccctccacgcctcctggccagacgctgccgctgccgctgcaccacggcgtttttttacaacattcaactttagtatttttactattataatataatatggaaccttccctccaaattcttcaataaaagttgcttttcaaa

SEQ ID NO: 327258 - DNA, 2350 bp, Homo sapiens
tagctagtacgggccgggggttaatcggccgagggcggccgcaggatgtggaccaacgtgaggctcccctcaacaacttctctgtggcgcagtgccagctgatgaagacggagcggccccggcccaacaccttcatcatccgctgcctgcagtggaccactgtcatcgaacgcaccttccatgtggagactcctgaggagcgggaggagtggacaaccgccatccagactgtggctgacggcctcaagaagcaggaggaggaggagatggacttccggtcgggctcacccagtgacaactcaggggctgaagagatggaggtgtccctggccaagcccaagcaccgcgtgaccatgaacgagtttgagtacctgaagctgctgggcaagggcactttcggcaaggtgatcctggtgaaggagaaggccacaggccgctactacgccatgaagatcctcaagaaggaagtcatcgtggccaaggacgaggtggcccacacactcaccgagaaccgcgtcctgcagaactccaggcaccccttcctcacagccctgaagtactctttccagacccacgaccgcctctgctttgtcatggagtacgccaacgggggcgagctgttcttccacctgtcccgggagcgtgtgttctccgaggaccgggcccgcttctatggcgctgagattgtgtcagccctggactacctgcactcggagaagaacgtggtgtaccgggacctcaagctggagaacctcatgctggacaaggacgggcacattaagatcacagacttcgggctgtgcaaggaggggatcaaggacggtgccaccatgaagaccttttgcggcacacctgagtacctggcccccgaggtgctggaggacaatgactacggccgtgcagtggactggtgggggctgggcgtggtcatgtacgagatgatgtgcggtcgcctgcccttctacaaccaggaccatgagaagctttttgagctcatcctcatggaggagatccgcttcccgcgcacgcttggtcccgaggccaagtccttgctttcagggctgctcaagaaggaccccaagcagaggcttggcgggggctccgaggacgccaaggagatcatgcagcatcgcttctttgccggtatcgtgtggcagcacgtgtacgagaagaagctcagcccacccttcaagccccaggtcacgtcggagactgacaccaggtattttgatgaggagttcacggcccagatgatcaccatcacaccacctgaccaagatgacagcatggagtgtgtggacagcgagcgcaggccccacttcccccagttctcctactcggccagcggcacggcctgaggcggcggtggactgcgctggacgatagcttggagggatggagaggcggcctcgtgccatgatctgtatttaatggtttttatttctcgggtgcatttgagagaagccacgctgtcctctcgagcccagatggaaagacgtttttgtgctgtgggcagcaccctcccccgcagcggggtagggaagaaaactatcctgcgggttttaatttatttcatccagtttgttctccgggtgtggcctcagccctcagaacaatccgattcacgtagggaaatgttaaggacttctgcagctatgcgcaatgtggcattggggggccgggcaggtcctgcccatgtgtcccctcactctgtcagccagccgccctgggctgtctgtcaccagctatctgtcatctctctggggccctgggcctcagttcaacctggtggcaccagatgcaacctcactatggtatgctggccagcaccctctcctgggggtggcaggcacacagcagccccccagcactaaggccgtgtctctgaggacgtcatcggaggctgggcccctgggatgggaccagggatgggggatgggccagggtttacccagtgggacagaggagcaaggtttaaatttgttattgtgtattatgttgttcaaatgcattttgggggtttttaatctttgtgacaggaaagccctcccccttccccttctgtgtcacagttcttggtgactgtcccaccgggagcctccccctcagatgatctctccacggtagcacttgaccttttcgacgcttaacctttccgctgtcgccccaggccctccctgactccctgtgggggtggccatccctgggcccctccacgcctcctggccagacgctgccgctgccgctgcaccacggcgtttttttacaacattcaactttagtatttttactattataatataatatggaaccttccctccaaattcttcaataaaagttgcttttcaaa

SEQ ID NO: 327259 - DNA, 3227 bp, Homo sapiens
ctctttgtctccagcgcccagcactgggcctggcaaaacctgagacgcccggtacatgttggccaaatgaatgaaccagattcagaccggcaggggcgctgtggtttaggaggggcctggggtttctcccaggaggtttttgggcttgcgctggagggctctggactcccgtttgcgccagtggcctgcatcctggtcctgtcttcctcatgtttgaatttctttgctttcctagtctggggagcagggaggagccctgtgccctgtcccaggatccatgggtaggaacaccatggacagggagagcaaacggggccatctgtcaccaggggcttagggaaggccgagccagcctgggtcaaagaagtcaaaggggctgcctggaggaggcagcctgtcagctggtgcatcagaggctgtggccaggccagctgggctcggggagcgccagcctgagaggagcgcgtgagcgtcgcgggagcctcgggcaccatgagcgacgtggctattgtgaaggagggttggctgcacaaacgaggggagtacatcaagacctggcggccacgctacttcctcctcaagaatgatggcaccttcattggctacaaggagcggccgcaggatgtggaccaacgtgaggctcccctcaacaacttctctgtggcgcagtgccagctgatgaagacggagcggccccggcccaacaccttcatcatccgctgcctgcagtggaccactgtcatcgaacgcaccttccatgtggagactcctgaggagcgggaggagtggacaaccgccatccagactgtggctgacggcctcaagaagcaggaggaggaggagatggacttccggtcgggctcacccagtgacaactcaggggctgaagagatggaggtgtccctggccaagcccaagcaccgcgtgaccatgaacgagtttgagtacctgaagctgctgggcaagggcactttcggcaaggtgatcctggtgaaggagaaggccacaggccgctactacgccatgaagatcctcaagaaggaagtcatcgtggccaaggacgaggtggcccacacactcaccgagaaccgcgtcctgcagaactccaggcaccccttcctcacagccctgaagtactctttccagacccacgaccgcctctgctttgtcatggagtacgccaacgggggcgagctgttcttccacctgtcccgggagcgtgtgttctccgaggaccgggcccgcttctatggcgctgagattgtgtcagccctggactacctgcactcggagaagaacgtggtgtaccgggacctcaagctggagaacctcatgctggacaaggacgggcacattaagatcacagacttcgggctgtgcaaggaggggatcaaggacggtgccaccatgaagaccttttgcggcacacctgagtacctggcccccgaggtgctggaggacaatgactacggccgtgcagtggactggtgggggctgggcgtggtcatgtacgagatgatgtgcggtcgcctgcccttctacaaccaggaccatgagaagctttttgagctcatcctcatggaggagatccgcttcccgcgcacgcttggtcccgaggccaagtccttgctttcagggctgctcaagaaggaccccaagcagaggcttggcgggggctccgaggacgccaaggagatcatgcagcatcgcttctttgccggtatcgtgtggcagcacgtgtacgagaagaagctcagcccacccttcaagccccaggtcacgtcggagactgacaccaggtattttgatgaggagttcacggcccagatgatcaccatcacaccacctgaccaagatgacagcatggagtgtgtggacagcgagcgcaggccccacttcccccagttctcctactcggccagcggcacggcctgaggcggcggtggactgcgctggacgatagcttggagggatggagaggcggcctcgtgccatgatctgtatttaatggtttttatttctcgggtgcatttgagagaagccacgctgtcctctcgagcccagatggaaagacgtttttgtgctgtgggcagcaccctcccccgcagcggggtagggaagaaaactatcctgcgggttttaatttatttcatccagtttgttctccgggtgtggcctcagccctcagaacaatccgattcacgtagggaaatgttaaggacttctgcagctatgcgcaatgtggcattggggggccgggcaggtcctgcccatgtgtcccctcactctgtcagccagccgccctgggctgtctgtcaccagctatctgtcatctctctggggccctgggcctcagttcaacctggtggcaccagatgcaacctcactatggtatgctggccagcaccctctcctgggggtggcaggcacacagcagccccccagcactaaggccgtgtctctgaggacgtcatcggaggctgggcccctgggatgggaccagggatgggggatgggccagggtttacccagtgggacagaggagcaaggtttaaatttgttattgtgtattatgttgttcaaatgcattttgggggtttttaatctttgtgacaggaaagccctcccccttccccttctgtgtcacagttcttggtgactgtcccaccgggagcctccccctcagatgatctctccacggtagcacttgaccttttcgacgcttaacctttccgctgtcgccccaggccctccctgactccctgtgggggtggccatccctgggcccctccacgcctcctggccagacgctgccgctgccgctgcaccacggcgtttttttacaacattcaactttagtatttttactattataatataatatggaaccttccctccaaattcttcaataaaagttgcttttcaaaaaatttttggctcactttgctgggtggaagagtgggtggccagggagggagtggggagtcctgggagggaagcagcatcctcagagcagctggtcctccccagctcctcctggtgggcaccgccaccccaacaggtttggggacaggctgtgtggtgggccgaggcgggagtatacaggcctgttcccaggggcagcctcccatggaaggtgttccacccccatctccagaggcctggcctgaggggagatgggaggccctggctggcctgcccccgttgggatccacctcttcttccct

SEQ ID NO: 327260 - DNA, 2904 bp, Homo sapiens
ctctttgtctccagcgcccagcactgggcctggcaaaacctgagacgcccggtacatgttggccaaatgaatgaaccagattcagaccggcaggggcgctgtggtttaggaggggcctggggtttctcccaggaggtttttgggcttgcgctggagggctctggactcccgtttgcgccagtggcctgcatcctggtcctgtcttcctcatgtttgaatttctttgctttcctagtctggggagcagggaggagccctgtgccctgtcccaggatccatgggtaggaacaccatggacagggagagcaaacggggccatctgtcaccaggggcttagggaaggccgagccagcctgggtcaaagaagtcaaaggggctgcctggaggaggcagcctgtcagctggtgcatcagaggctgtggccaggccagctgggctcggggagcgccagcctgagaggagcgcgtgagcgtcgcgggagcctcgggcaccatgagcgacgtggctattgtgaaggagggttggctgcacaaacgaggggagtacatcaagacctggcggccacgctacttcctcctcaagaatgatggcaccttcattggctacaaggagcggccgcaggatgtggaccaacgtgaggctcccctcaacaacttctctgtggcgcagtgccagctgatgaagacggagcggccccggcccaacaccttcatcatccgctgcctgcagtggaccactgtcatcgaacgcaccttccatgtggagactcctgaggagcgggaggagtggacaaccgccatccagactgtggctgacggcctcaagaagcaggaggaggaggagatggacttccggtcgggctcacccagtgacaactcaggggctgaagagatggaggtgtccctggccaagcccaagcaccgcgtgaccatgaacgagtttgagtacctgaagctgctgggcaagggcactttcggcaaggtgatcctggtgaaggagaaggccacaggccgctactacgccatgaagatcctcaagaaggaagtcatcgtggccaaggacgaggtggcccacacactcaccgagaaccgcgtcctgcagaactccaggcaccccttcctcacagccctgaagtactctttccagacccacgaccgcctctgctttgtcatggagtacgccaacgggggcgagctgttcttccacctgtcccgggagcgtgtgttctccgaggaccgggcccgcttctatggcgctgagattgtgtcagccctggactacctgcactcggagaagaacgtggtgtaccgggacctcaagctggagaacctcatgctggacaaggacgggcacattaagatcacagacttcgggctgtgcaaggaggggatcaaggacggtgccaccatgaagaccttttgcggcacacctgagtacctggcccccgaggtgctggaggacaatgactacggccgtgcagtggactggtgggggctgggcgtggtcatgtacgagatgatgtgcggtcgcctgcccttctacaaccaggaccatgagaagctttttgagctcatcctcatggaggagatccgcttcccgcgcacgcttggtcccgaggccaagtccttgctttcagggctgctcaagaaggaccccaagcagaggcttggcgggggctccgaggacgccaaggagatcatgcagcatcgcttctttgccggtatcgtgtggcagcacgtgtacgagaagaagctcagcccacccttcaagccccaggtcacgtcggagactgacaccaggtattttgatgaggagttcacggcccagatgatcaccatcacaccacctgaccaagatgacagcatggagtgtgtggacagcgagcgcaggccccacttcccccagttctcctactcggccagcggcacggcctgaggcggcggtggactgcgctggacgatagcttggagggatggagaggcggcctcgtgccatgatctgtatttaatggtttttatttctcgggtgcatttgagagaagccacgctgtcctctcgagcccagatggaaagacgtttttgtgctgtgggcagcaccctcccccgcagcggggtagggaagaaaactatcctgcgggttttaatttatttcatccagtttgttctccgggtgtggcctcagccctcagaacaatccgattcacgtagggaaatgttaaggacttctgcagctatgcgcaatgtggcattggggggccgggcaggtcctgcccatgtgtcccctcactctgtcagccagccgccctgggctgtctgtcaccagctatctgtcatctctctggggccctgggcctcagttcaacctggtggcaccagatgcaacctcactatggtatgctggcaggcacacagcagccccccagcactaaggccgtgtctctgaggacgtcatcggaggctgggcccctgggatgggaccagggatgggggatgggccagggtttacccagtgggacagaggagcaaggtttaaatttgttattgtgtattatgttgttcaaatgcattttgggggtttttaatctttgtgacaggaaagccctcccccttccccttctgtgtcacagttcttggtgactgtcccaccgggagcctccccctcagatgatctctccacggtagcacttgaccttttcgacgcttaacctttccgctgtcgccccaggccctccctgactccctgtgggggtggccatccctgggcccctccacgcctcctggccagacgctgccgctgccgctgcaccacggcgtttttttacaacattcaactttagtatttttactattataatataatatggaaccttccctccaaattcttcaataaaagttgcttttcaaa

SEQ ID NO: 327261 - DNA, 3002 bp, Homo sapiens
ctctttgtctccagcgcccagcactgggcctggcaaaacctgagacgcccggtacatgttggccaaatgaatgaaccagattcagaccggcaggggcgctgtggtttaggaggggcctggggtttctcccaggaggtttttgggcttgcgctggagggctctggactcccgtttgcgccagtggcctgcatcctggtcctgtcttcctcatgtttgaatttctttgctttcctagtctggggagcagggaggagccctgtgccctgtcccaggatccatgggtaggaacaccatggacagggagagcaaacggggccatctgtcaccaggggcttagggaaggccgagccagcctgggtcaaagaagtcaaaggggctgcctggaggaggcagcctgtcagctggtgcatcagaggctgtggccaggccagctgggctcggggagcgccagcctgagaggagcgcgtgagcgtcgcgggagcctcgggcaccatgagcgacgtggctattgtgaaggagggttggctgcacaaacgaggggagtacatcaagacctggcggccacgctacttcctcctcaagaatgatggcaccttcattggctacaaggagcggccgcaggatgtggaccaacgtgaggctcccctcaacaacttctctgtggcgcagtgccagctgatgaagacggagcggccccggcccaacaccttcatcatccgctgcctgcagtggaccactgtcatcgaacgcaccttccatgtggagactcctgaggagcgggaggagtggacaaccgccatccagactgtggctgacggcctcaagaagcaggaggaggaggagatggacttccggtcgggctcacccagtgacaactcaggggctgaagagatggaggtgtccctggccaagcccaagcaccgcgtgaccatgaacgagtttgagtacctgaagctgctgggcaagggcactttcggcaaggtgatcctggtgaaggagaaggccacaggccgctactacgccatgaagatcctcaagaaggaagtcatcgtggccaaggacgaggtggcccacacactcaccgagaaccgcgtcctgcagaactccaggcaccccttcctcacagccctgaagtactctttccagacccacgaccgcctctgctttgtcatggagtacgccaacgggggcgagctgttcttccacctgtcccgggagcgtgtgttctccgaggaccgggcccgcttctatggcgctgagattgtgtcagccctggactacctgcactcggagaagaacgtggtgtaccgggacctcaaggtgcgctggcgggcaggcaggggggcagggccctgggggcctggcggcactgacctgaggccacctttcccctagctggagaacctcatgctggacaaggacgggcacattaagatcacagacttcgggctgtgcaaggaggggatcaaggacggtgccaccatgaagaccttttgcggcacacctgagtacctggcccccgaggtgctggaggacaatgactacggccgtgcagtggactggtgggggctgggcgtggtcatgtacgagatgatgtgcggtcgcctgcccttctacaaccaggaccatgagaagctttttgagctcatcctcatggaggagatccgcttcccgcgcacgcttggtcccgaggccaagtccttgctttcagggctgctcaagaaggaccccaagcagaggcttggcgggggctccgaggacgccaaggagatcatgcagcatcgcttctttgccggtatcgtgtggcagcacgtgtacgagaagaagctcagcccacccttcaagccccaggtcacgtcggagactgacaccaggtattttgatgaggagttcacggcccagatgatcaccatcacaccacctgaccaagatgacagcatggagtgtgtggacagcgagcgcaggccccacttcccccagttctcctactcggccagcggcacggcctgaggcggcggtggactgcgctggacgatagcttggagggatggagaggcggcctcgtgccatgatctgtatttaatggtttttatttctcgggtgcatttgagagaagccacgctgtcctctcgagcccagatggaaagacgtttttgtgctgtgggcagcaccctcccccgcagcggggtagggaagaaaactatcctgcgggttttaatttatttcatccagtttgttctccgggtgtggcctcagccctcagaacaatccgattcacgtagggaaatgttaaggacttctgcagctatgcgcaatgtggcattggggggccgggcaggtcctgcccatgtgtcccctcactctgtcagccagccgccctgggctgtctgtcaccagctatctgtcatctctctggggccctgggcctcagttcaacctggtggcaccagatgcaacctcactatggtatgctggccagcaccctctcctgggggtggcaggcacacagcagccccccagcactaaggccgtgtctctgaggacgtcatcggaggctgggcccctgggatgggaccagggatgggggatgggccagggtttacccagtgggacagaggagcaaggtttaaatttgttattgtgtattatgttgttcaaatgcattttgggggtttttaatctttgtgacaggaaagccctcccccttccccttctgtgtcacagttcttggtgactgtcccaccgggagcctccccctcagatgatctctccacggtagcacttgaccttttcgacgcttaacctttccgctgtcgccccaggccctccctgactccctgtgggggtggccatccctgggcccctccacgcctcctggccagacgctgccgctgccgctgcaccacggcgtttttttacaacattcaactttagtatttttactattataatataatatggaaccttccctccaaattcttcaataaaagttgcttttcaaa

SEQ ID NO: 327262 - DNA, 3022 bp, Homo sapiens
ctctttgtctccagcgcccagcactgggcctggcaaaacctgagacgcccggtacatgttggccaaatgaatgaaccagattcagaccggcaggggcgctgtggtttaggaggggcctggggtttctcccaggaggtttttgggcttgcgctggagggctctggactcccgtttgcgccagtggcctgcatcctggtcctgtcttcctcatgtttgaatttctttgctttcctagtctggggagcagggaggagccctgtgccctgtcccaggatccatgggtaggaacaccatggacagggagagcaaacggggccatctgtcaccaggggcttagggaaggccgagccagcctgggtcaaagaagtcaaaggggctgcctggaggaggcagcctgtcagctggtgcatcagaggctgtggccaggccagctgggctcggggagcgccagcctgagaggagcgcgtgagcgtcgcgggagcctcgggcaccatgagcgacgtggctattgtgaaggagggttggctgcacaaacgaggggagtacatcaagacctggcggccacgctacttcctcctcaagaatgatggcaccttcattggctacaaggagcggccgcaggatgtggaccaacgtgaggctcccctcaacaacttctctgtggcgcagtgccagctgatgaagacggagcggccccggcccaacaccttcatcatccgctgcctgcagtggaccactgtcatcgaacgcaccttccatgtggagactcctgaggagcgggaggagtggacaaccgccatccagactgtggctgacggcctcaagaagcaggaggaggaggagatggacttccggtcgggctcacccagtgacaactcaggggctgaagagatggaggtgtccctggccaagcccaagcaccgcgtgaccatgaacgagtttgagtacctgaagctgctgggcaagggcactttcggcaaggtgatcctggtgaaggagaaggccacaggccgctactacgccatgaagatcctcaagaaggaagtcatcgtggccaaggacgaggtggcccacacactcaccgagaaccgcgtcctgcagaactccaggcaccccttcctcacagccctgaagtactctttccagacccacgaccgcctctgctttgtcatggagtacgccaacgggggcgagctgttcttccacctgtcccgggagcgtgtgttctccgaggaccgggcccgcttctatggcgctgagattgtgtcagccctggactacctgcactcggagaagaacgtggtgtaccgggacctcaagctggagaacctcatgctggacaaggacgggcacattaagatcacagacttcgggctgtgcaaggaggggatcaaggacggtgccaccatgaagaccttttgcggcacacctgagtacctggcccccgaggtgctggaggacaatgactacggccgtgcagtggactggtgggggctgggcgtggtcatgtacgagatgatgtgcggtcgcctgcccttctacaaccaggaccatgagaagctttttgagctcatcctcatggaggagatccgcttcccgcgcacgcttggtcccgaggccaagtccttgctttcagggctgctcaagaaggaccccaagcagaggcttggcgggggctccgaggacgccaaggagatcatgcagcatcgcttctttgccggtatcgtgtggcagcacgtgtacgagaagaagggaccctaggagccctggccatcaccccagctgatggggtctgccagctgggttcggaagcctgcactctgagatgctgggtgccctgtcaccagctcagcccacccttcaagccccaggtcacgtcggagactgacaccaggtattttgatgaggagttcacggcccagatgatcaccatcacaccacctgaccaagatgacagcatggagtgtgtggacagcgagcgcaggccccacttcccccagttctcctactcggccagcggcacggcctgaggcggcggtggactgcgctggacgatagcttggagggatggagaggcggcctcgtgccatgatctgtatttaatggtttttatttctcgggtgcatttgagagaagccacgctgtcctctcgagcccagatggaaagacgtttttgtgctgtgggcagcaccctcccccgcagcggggtagggaagaaaactatcctgcgggttttaatttatttcatccagtttgttctccgggtgtggcctcagccctcagaacaatccgattcacgtagggaaatgttaaggacttctgcagctatgcgcaatgtggcattggggggccgggcaggtcctgcccatgtgtcccctcactctgtcagccagccgccctgggctgtctgtcaccagctatctgtcatctctctggggccctgggcctcagttcaacctggtggcaccagatgcaacctcactatggtatgctggccagcaccctctcctgggggtggcaggcacacagcagccccccagcactaaggccgtgtctctgaggacgtcatcggaggctgggcccctgggatgggaccagggatgggggatgggccagggtttacccagtgggacagaggagcaaggtttaaatttgttattgtgtattatgttgttcaaatgcattttgggggtttttaatctttgtgacaggaaagccctcccccttccccttctgtgtcacagttcttggtgactgtcccaccgggagcctccccctcagatgatctctccacggtagcacttgaccttttcgacgcttaacctttccgctgtcgccccaggccctccctgactccctgtgggggtggccatccctgggcccctccacgcctcctggccagacgctgccgctgccgctgcaccacggcgtttttttacaacattcaactttagtatttttactattataatataatatggaaccttccctccaaattcttcaataaaagttgcttttcaaa

SEQ ID NO: 327263 - DNA, 1875 bp, Homo sapiens
agactttccaggcccccgtgccctctggtggctggtcccttccctgtgcaatgccgagacccggtctgagaaaccccagccctgcaggccatgggggcagaggcccgagccacggctgtgcctcaggttgcgcctcccgcagctgttcttccacctgtcccgggagcgtgtgttctccgaggaccgggcccgcttctatggcgctgagattgtgtcagccctggactacctgcactcggagaagaacgtggtgtaccgggacctcaagctggagaacctcatgctggacaaggacgggcacattaagatcacagacttcgggctgtgcaaggaggggatcaaggacggtgccaccatgaagaccttttgcggcacacctgagtacctggcccccgaggtgctggaggacaatgactacggccgtgcagtggactggtgggggctgggcgtggtcatgtacgagatgatgtgcggtcgcctgcccttctacaaccaggaccatgagaagctttttgagctcatcctcatggaggagatccgcttcccgcgcacgcttggtcccgaggccaagtccttgctttcagggctgctcaagaaggaccccaagcagaggcttggcgggggctccgaggacgccaaggagatcatgcagcatcgcttctttgccggtatcgtgtggcagcacgtgtacgagaagaagctcagcccacccttcaagccccaggtcacgtcggagactgacaccaggtattttgatgaggagttcacggcccagatgatcaccatcacaccacctgaccaagatgacagcatggagtgtgtggacagcgagcgcaggccccacttcccccagttctcctactcggccagcggcacggcctgaggcggcggtggactgcgctggacgatagcttggagggatggagaggcggcctcgtgccatgatctgtatttaatggtttttatttctcgggtgcatttgagagaagccacgctgtcctctcgagcccagatggaaagacgtttttgtgctgtgggcagcaccctcccccgcagcggggtagggaagaaaactatcctgcgggttttaatttatttcatccagtttgttctccgggtgtggcctcagccctcagaacaatccgattcacgtagggaaatgttaaggacttctgcagctatgcgcaatgtggcattggggggccgggcaggtcctgcccatgtgtcccctcactctgtcagccagccgccctgggctgtctgtcaccagctatctgtcatctctctggggccctgggcctcagttcaacctggtggcaccagatgcaacctcactatggtatgctggccagcaccctctcctgggggtggcaggcacacagcagccccccagcactaaggccgtgtctctgaggacgtcatcggaggctgggcccctgggatgggaccagggatgggggatgggccagggtttacccagtgggacagaggagcaaggtttaaatttgttattgtgtattatgttgttcaaatgcattttgggggtttttaatctttgtgacaggaaagccctcccccttccccttctgtgtcacagttcttggtgactgtcccaccgggagcctccccctcagatgatctctccacggtagcacttgaccttttcgacgcttaacctttccgctgtcgccccaggccctccctgactccctgtgggggtggccatccctgggcccctccacgcctcctggccagacgctgccgctgccgctgcaccacggcgtttttttacaacattcaactttagtatttttactattataatataatatggaaccttccctccaaattcttcaataaaagttgcttttcaaa

SEQ ID NO: 327264 - DNA, 2518 bp, Homo sapiens
ctctttgtctccagcgcccagcactgggcctggcaaaacctgagacgcccggtacatgttggccaaatgaatgaaccagattcagaccggcaggggcgctgtggtttaggaggggcctggggtttctcccaggaggtttttgggcttgcgctggagggctctggactcccgtttgcgccagtggcctgcatcctggtcctgtcttcctcatgtttgaatttctttgctttcctagtctggggagcagggaggagccctgtgccctgtcccaggatccatgggtaggaacaccatggacagggagagcaaacggggccatctgtcaccaggggcttagggaaggccgagccagcctgggtcaaagaagtcaaaggggctgcctggaggaggcagcctgtcagctggtgcatcagaggctgtggccaggccagctgggctcggggagcgccagcctgagaggagcgcgtgagcgtcgcgggagcctcgggcaccatgagcgacgtggctattgtgaaggagggttggctgcacaaacgaggggagtacatcaagacctggcggccacgctacttcctcctcaagaatgatggcaccttcattggctacaaggagcggccgcaggatgtggaccaacgtgaggctcccctcaacaacttctctgtggcgcagtgccagctgatgaagacggagcggccccggcccaacaccttcatcatccgctgcctgcagtggaccactgtcatcgaacgcaccttccatgtggagactcctgaggagcgggaggagtggacaaccgccatccagactgtggctgacggcctcaagaagcaggaggaggaggagatggacttccggtcgggctcacccagtgacaactcaggggctgaagagatggaggtgtccctggccaagcccaagcaccgcgtgaccatgaacgagtttgagtacctgaagctgctgggcaagggcactttcggcaaggtgatcctggtgaaggagaaggccacaggccgctactacgccatgaagatcctcaagaaggaagtcatcgtggccaaggacgaggtggcccacacactcaccgagaaccgcgtcctgcagaactccaggcaccccttcctcacagccctgaagtactctttccagacccacgaccgcctctgctttgtcatggagtacgccaacgggggcgagctgttcttccacctgtcccgggagcgtgtgttctccgaggaccgggcccgcttctatggcgctgagattgtgtcagccctggactacctgcactcggagaagaacgtggtgtaccgggacctcaagctggagaacctcatgctggacaaggacgggcacattaagatcacagacttcgggctgtgcaaggaggggatcaaggacggtgccaccatgaagaccttttgcggcacacctgagtacctggcccccgaggtgctggaggacaatgactacggccgtgcagtggactggtgggggctgggcgtggtcatgtacgagatgatgtgcggtcgcctgcccttctacaaccaggaccatgagaagctttttgagctcatcctcatggaggagatccgcttcccgcgcacgcttggtcccgaggccaagtccttgctttcagggctgctcaagaaggaccccaagcagaggcttggcgggggctccgaggacgccaaggagatcatgcagcatcgcttctttgccggtatcgtgtggcagcacgtgtacgagaagaagctcagcccacccttcaagccccaggtcacgtcggagactgacaccaggtattttgatgaggagttcacggcccagatgatcaccatcacaccacctgaccaagatgacagcatggagtgtgtggacagcgagcgcaggccccacttcccccagttctcctactcggccagcggcacggcctgaggcggcggtggactgcgcctggtggcaccagatgcaacctcactatggtatgctggccagcaccctctcctgggggtggcaggcacacagcagccccccagcactaaggccgtgtctctgaggacgtcatcggaggctgggcccctgggatgggaccagggatgggggatgggccagggtttacccagtgggacagaggagcaaggtttaaatttgttattgtgtattatgttgttcaaatgcattttgggggtttttaatctttgtgacaggaaagccctcccccttccccttctgtgtcacagttcttggtgactgtcccaccgggagcctccccctcagatgatctctccacggtagcacttgaccttttcgacgcttaacctttccgctgtcgccccaggccctccctgactccctgtgggggtggccatccctgggcccctccacgcctcctggccagacgctgccgctgccgctgcaccacggcgtttttttacaacattcaactttagtatttttactattataatataatatggaaccttccctccaaattcttcaataaaagttgcttttcaaa

SEQ ID NO: 327265 - DNA, 1695 bp, Homo sapiens
agtagccattccggaatggcgcacggtagccattccctcttctcccctgtacgtgaccgtcaacccctgaaactcgccatcaccacttcatgctcgccacctccaggccgaggatccagagtcgatccggacgtctcgccagctgtgcaaggaggggatcaaggacggtgccaccatgaagaccttttgcggcacacctgagtacctggcccccgaggtgctggaggacaatgactacggccgtgcagtggactggtgggggctgggcgtggtcatgtacgagatgatgtgcggtcgcctgcccttctacaaccaggaccatgagaagctttttgagctcatcctcatggaggagatccgcttcccgcgcacgcttggtcccgaggccaagtccttgctttcagggctgctcaagaaggaccccaagcagaggcttggcgggggctccgaggacgccaaggagatcatgcagcatcgcttctttgccggtatcgtgtggcagcacgtgtacgagaagaagctcagcccacccttcaagccccaggtcacgtcggagactgacaccaggtattttgatgaggagttcacggcccagatgatcaccatcacaccacctgaccaagatgacagcatggagtgtgtggacagcgagcgcaggccccacttcccccagttctcctactcggccagcggcacggcctgaggcggcggtggactgcgctggacgatagcttggagggatggagaggcggcctcgtgccatgatctgtatttaatggtttttatttctcgggtgcatttgagagaagccacgctgtcctctcgagcccagatggaaagacgtttttgtgctgtgggcagcaccctcccccgcagcggggtagggaagaaaactatcctgcgggttttaatttatttcatccagtttgttctccgggtgtggcctcagccctcagaacaatccgattcacgtagggaaatgttaaggacttctgcagctatgcgcaatgtggcattggggggccgggcaggtcctgcccatgtgtcccctcactctgtcagccagccgccctgggctgtctgtcaccagctatctgtcatctctctggggccctgggcctcagttcaacctggtggcaccagatgcaacctcactatggtatgctggccagcaccctctcctgggggtggcaggcacacagcagccccccagcactaaggccgtgtctctgaggacgtcatcggaggctgggcccctgggatgggaccagggatgggggatgggccagggtttacccagtgggacagaggagcaaggtttaaatttgttattgtgtattatgttgttcaaatgcattttgggggtttttaatctttgtgacaggaaagccctcccccttccccttctgtgtcacagttcttggtgactgtcccaccgggagcctccccctcagatgatctctccacggtagcacttgaccttttcgacgcttaacctttccgctgtcgccccaggccctccctgactccctgtgggggtggccatccctgggcccctccacgcctcctggccagacgctgccgctgccgctgcaccacggcgtttttttacaacattcaactttagtatttttactattataatataatatggaaccttccctccaaattcttcaataaaagttgcttttcaaa

SEQ ID NO: 327266 - DNA, 1956 bp, Homo sapiens
ctctttgtctccagcgcccagcactgggcctggcaaaacctgagacgcccggtacatgttggccaaatgaatgaaccagattcagaccggcaggggcgctgtggtttaggaggggcctggggtttctcccaggaggtttttgggcttgcgctggagggctctggactcccgtttgcgccagtggcctgcatcctggtcctgtcttcctcatgtttgaatttctttgctttcctagtctggggagcagggaggagccctgtgccctgtcccaggatccatgggtaggaacaccatggacagggagagcaaacggggccatctgtcaccaggggcttagggaaggccgagccagcctgggtcaaagaagtcaaaggggctgcctggaggaggcagcctgtcagctggtgcatcagaggctgtggccaggccagctgggctcggggagcgccagcctgagaggagcgcgtgagcgtcgcgggagcctcgggcaccatgagcgacgtggctattgtgaaggagggttggctgcacaaacgaggggagtacatcaagacctggcggccacgctacttcctcctcaagaatgatggcaccttcattggctacaaggagcggccgcaggatgtggaccaacgtgaggctcccctcaacaacttctctgtggcgcagtgccagctgatgaagacggagcggccccggcccaacaccttcatcatccgctgcctgcagtggaccactgtcatcgaacgcaccttccatgtggagactcctgaggagcgggaggagtggacaaccgccatccagagtcacgtcggagactgacaccaggtattttgatgaggagttcacggcccagatgatcaccatcacaccacctgaccaagatgacagcatggagtgtgtggacagcgagcgcaggccccacttcccccagttctcctactcggccagcggcacggcctgaggcggcggtggactgcgctggacgatagcttggagggatggagaggcggcctcgtgccatgatctgtatttaatggtttttatttctcgggtgcatttgagagaagccacgctgtcctctcgagcccagatggaaagacgtttttgtgctgtgggcagcaccctcccccgcagcggggtagggaagaaaactatcctgcgggttttaatttatttcatccagtttgttctccgggtgtggcctcagccctcagaacaatccgattcacgtagggaaatgttaaggacttctgcagctatgcgcaatgtggcattggggggccgggcaggtcctgcccatgtgtcccctcactctgtcagccagccgccctgggctgtctgtcaccagctatctgtcatctctctggggccctgggcctcagttcaacctggtggcaccagatgcaacctcactatggtatgctggccagcaccctctcctgggggtggcaggcacacagcagccccccagcactaaggccgtgtctctgaggacgtcatcggaggctgggcccctgggatgggaccagggatgggggatgggccagggtttacccagtgggacagaggagcaaggtttaaatttgttattgtgtattatgttgttcaaatgcattttgggggtttttaatctttgtgacaggaaagccctcccccttccccttctgtgtcacagttcttggtgactgtcccaccgggagcctccccctcagatgatctctccacggtagcacttgaccttttcgacgcttaacctttccgctgtcgccccaggccctccctgactccctgtgggggtggccatccctgggcccctccacgcctcctggccagacgctgccgctgccgctgcaccacggcgtttttttacaacattcaactttagtatttttactattataatataatatggaaccttccctccaaattcttcaataaaagttgcttttcaaa

SEQ ID NO: 327267 - DNA, 1977 bp, Homo sapiens
ctctttgtctccagcgcccagcactgggcctggcaaaacctgagacgcccggtacatgttggccaaatgaatgaaccagattcagaccggcaggggcgctgtggtttaggaggggcctggggtttctcccaggaggtttttgggcttgcgctggagggctctggactcccgtttgcgccagtggcctgcatcctggtcctgtcttcctcatgtttgaatttctttgctttcctagtctggggagcagggaggagccctgtgccctgtcccaggatccatgggtaggaacaccatggacagggagagcaaacggggccatctgtcaccaggggcttagggaaggccgagccagcctgggtcaaagaagtcaaaggggctgcctggaggaggcagcctgtcagctggtgcatcagaggctgtggccaggccagctgggctcggggagcgccagcctgagaggagcgcgtgagcgtcgcgggagcctcgggcaccatgagcgacgtggctattgtgaaggagggttggctgcacaaacgaggggagtacatcaagacctggcggccacgctacttcctcctcaagaatgatggcaccttcattggctacaaggagcggccgcaggatgtggaccaacgtgaggctcccctcaacaacttctctgtggcgcagtgccagctgatgaagacggagcggccccggcccaacaccttcatcatccgctgcctgcagtggaccactgtcatcgaacgcaccttccatgtggagactcctgaggagcgggaggagtggacaaccgccatccagactgtggctgacggcctcaagaagcaggaggaggaggagatggacttccggtcgggctcacccagtgacaactcaggggctgaagagatggaggtgtccctggccaagcccaagcaccgcgtgaccatgaacgagtttgagtacctgaagctgctgggcaagggcactttcggcaaggtgatcctggtgaaggagaaggccacaggccgctactacgccatgaagatcctcaagaaggaagtcatcgtggccaaggacgaggtggcccacacactcaccgagaaccgcgtcctgcagaactccaggcaccccttcctcacagccctgaagtactctttccagacccacgaccgcctctgctttgtcatggagtacgccaacgggggcgagctgttcttccacctgtcccgggagcgtgtgttctccgaggaccgggcccgcttctatggcgctgagattgtgtcagccctggactacctgcactcggagaagaacgtggtgtaccgggacctcaagctggagaacctcatgctggacaaggacgggcacattaagatcacagacttcgggctgtgcaaggaggggatcaaggacggtgccaccatgaagaccttttgcggcacacctgagtacctggcccccgaggtgctggaggacaatgactacggccgtgcagtggactggtgggggctgggcgtggtcatgtacgagatgatgtgcggtcgcctgcccttctacaaccaggaccatgagaagctttttgagctcatcctcatggaggagatccgcttcccgcgcacgcttggtcccgaggccaagtccttgctttcagggctgctcaagaaggaccccaagcagaggcttggcgggggctccgaggacgccaaggagatcatgcagcatcgcttctttgccggtatcgtgtggcagcacgtgtacgagaagaagtcgccccggctacggatggggtggtggaggctgtggtgctggtagtggttgtggcggcggcggcatgtggctgctgtggagccggtggtgccgcatgctgcatgactggttactgcgaggcctctacaccacgcagctctgaggtgaccattgatgcgtgcagttggcagcaggctgacgcatgctctgcatgatcatgctgcagctcgcgccaagttggtccgg

SEQ ID NO: 327268 - DNA, 1829 bp, Homo sapiens
ctctttgtctccagcgcccagcactgggcctggcaaaacctgagacgcccggtacatgttggccaaatgaatgaaccagattcagaccggcaggggcgctgtggtttaggaggggcctggggtttctcccaggaggtttttgggcttgcgctggagggctctggactcccgtttgcgccagtggcctgcatcctggtcctgtcttcctcatgtttgaatttctttgctttcctagtctggggagcagggaggagccctgtgccctgtcccaggatccatgggtaggaacaccatggacagggagagcaaacggggccatctgtcaccaggggcttagggaaggccgagccagcctgggtcaaagaagtcaaaggggctgcctggaggaggcagcctgtcagctggtgcatcagaggctgtggccaggccagctgggctcggggagcgccagcctgagaggagcgcgtgagcgtcgcgggagcctcgggcaccatgagcgacgtggctattgtgaaggagggttggctgcacaaacgaggggagtacatcaagacctggcggccacgctacttcctcctcaagaatgatggcaccttcattggctacaaggagcggccgcaggatgtggaccaacgtgaggctcccctcaacaacttctctgtggcgcagtgccagctgatgaagacggagcggccccggcccaacaccttcatcatccgctgcctgcagtggaccactgtcatcgaacgcaccttccatgtggagactcctgaggagcgggaggagtggacaaccgccatccagactgtggctgacggcctcaagaagcaggaggaggaggagatggacttccggtcgggctcacccagtgacaactcaggggctgaagagatggaggtgtccctggccaagcccaagcaccgcgtgaccatgaacgagtttgagtacctgaagctgctgggcaagggcactttcggcaaggtgatcctggtgaaggagaaggccacaggccgctactacgccatgaagatcctcaagaaggaagtcatcgtggccaaggacgaggtggcccacacactcaccgagaaccgcgtcctgcagaactccaggcaccccttcctcacagccctgaagtactctttccagacccacgaccgcctctgctttgtcatggagtacgccaacgggggcgagctgttcttccacctgtcccgggagcgtgtgttctccgaggaccgggcccgcttctatggcgctgagattgtgtcagccctggactacctgcactcggagaagaacgtggtgtaccgggacctcaagctggagaacctcatgctggacaaggacgggcacattaagatcacagacttcgggctgtgcaaggaggggatcaaggacggtgccaccatgaagaccttttgcggcacacctgagtacctggcccccgaggtgctggaggacaatgactacggccgtgcagtggactggtgggggctgggcgtggtcatgtacgagatgatgtgcggtcgcctgcccttctacaaccaggaccatgagaagctttttgagctcatcctcatggaggagatccgcttcccgcgcacgcttggtcccgaggccaagtccttgctttcagggctgctcaagaaggaccccaagcagaggcttggcgggggctccgaggacgccaaggagatcatgcagcatcgcttctttgccggtatcgtgtggcagcacgtgtacgagaagaagtatcgtagatagaagcatcagcacaccgcgttctagcctgctaggacaccgccagagttttccccaagataatccta

SEQ ID NO: 327269 - DNA, 923 bp, Homo sapiens
ggaggaaggcacacgcgagaggcatactatgacactcctagaaggcgccgaggtcactgccgtgtggggcgccacgagagggctcctgccgggagagtggtggggacgaaaacatatccgtgaggtggttatcaagatgcaatctactcgagctttgttctccgggtgtggcctcagccctcagaacaatccgattcacgtagggaaatgttaaggacttctgcagctatgcgcaatgtggcattggggggccgggcaggtcctgcccatgtgtcccctcactctgtcagccagccgccctgggctgtctgtcaccagctatctgtcatctctctggggccctgggcctcagttcaacctggtggcaccagatgcaacctcactatggtatgctggccagcaccctctcctgggggtggcaggcacacagcagccccccagcactaaggccgtgtctctgaggacgtcatcggaggctgggcccctgggatgggaccagggatgggggatgggccagggtttacccagtgggacagaggagcaaggtttaaatttgttattgtgtattatgttgttcaaatgcattttgggggtttttaatctttgtgacaggaaagccctcccccttccccttctgtgtcacagttcttggtgactgtcccaccgggagcctccccctcagatgatctctccacggtagcacttgaccttttcgacgcttaacctttccgctgtcgccccaggccctccctgactccctgtgggggtggccatccctgggcccctccacgcctcctggccagacgctgccgctgccgctgcaccacggcgtttttttacaacattcaactttagtatttttactattataatataatatggaaccttccctccaaattcttcaataaaagttgcttttcaaa

SEQ ID NO: 327270 - DNA, 1484 bp, Homo sapiens
  misc_feature (1380)..(1380): n is a, c, g, or t
ctctttgtctccagcgcccagcactgggcctggcaaaacctgagacgcccggtacatgttggccaaatgaatgaaccagattcagaccggcaggggcgctgtggtttaggaggggcctggggtttctcccaggaggtttttgggcttgcgctggagggctctggactcccgtttgcgccagtggcctgcatcctggtcctgtcttcctcatgtttgaatttctttgctttcctagtctggggagcagggaggagccctgtgccctgtcccaggatccatgggtaggaacaccatggacagggagagcaaacggggccatctgtcaccaggggcttagggaaggccgagccagcctgggtcaaagaagtcaaaggggctgcctggaggaggcagcctgtcagctggtgcatcagaggctgtggccaggccagctgggctcggggagcgccagcctgagaggagcgcgtgagcgtcgcgggagcctcgggcaccatgagcgacgtggctattgtgaaggagggttggctgcacaaacgaggggagtacatcaagacctggcggccacgctacttcctcctcaagaatgatggcaccttcattggctacaaggagcggccgcaggatgtggaccaacgtgaggctcccctcaacaacttctctgtggcgcagtgccagctgatgaagacggagcggccccggcccaacaccttcatcatccgctgcctgcagtggaccactgtcatcgaacgcaccttccatgtggagactcctgaggagcgggaggagtggacaaccgccatccagactgtggctgacggcctcaagaagcaggaggaggaggagatggacttccggtcgggctcacccagtgacaactcaggggctgaagagatggaggtgtccctggccaagcccaagcaccgcgtgaccatgaacgagtttgagtacctgaagctgctgggcaagggcactttcggcaaggtgatcctggtgaaggagaaggccacaggccgctactacgccatgaagatcctcaagaaggaagtcatcgtggccaaggacgaggtggcccacacactcaccgagaaccgcgtcctgcagaactccaggcaccccttcctcacagccctgaagtactctttccagacccacgaccgcctctgctttgtcatggagtacgccaacgggggcgagctgttcttccacctgtcccgggagcgtgtgttctccgaggaccgggcccgcttctatggcgctgagattgtgtcagccctggactacctgcactcggagaagaacgtggtgtaccgggacctcaagctggagaacctcatgctggacaaggacgggcacattaagatcacagacttcgggtccggncgggccatgaaaactttggggccactgagtctggcccgcggtttgggacacgctcaagcggcggacgggggcgggggggtaaaaaaattgggcccttcaacaaa

SEQ ID NO: 327271 - DNA, 1383 bp, Homo sapiens
ctctttgtctccagcgcccagcactgggcctggcaaaacctgagacgcccggtacatgttggccaaatgaatgaaccagattcagaccggcaggggcgctgtggtttaggaggggcctggggtttctcccaggaggtttttgggcttgcgctggagggctctggactcccgtttgcgccagtggcctgcatcctggtcctgtcttcctcatgtttgaatttctttgctttcctagtctggggagcagggaggagccctgtgccctgtcccaggatccatgggtaggaacaccatggacagggagagcaaacggggccatctgtcaccaggggcttagggaaggccgagccagcctgggtcaaagaagtcaaaggggctgcctggaggaggcagcctgtcagctggtgcatcagaggctgtggccaggccagctgggctcggggagcgccagcctgagaggagcgcgtgagcgtcgcgggagcctcgggcaccatgagcgacgtggctattgtgaaggagggttggctgcacaaacgaggggagtacatcaagacctggcggccacgctacttcctcctcaagaatgatggcaccttcattggctacaaggagcggccgcaggatgtggaccaacgtgaggctcccctcaacaacttctctgtggcgcagtgccagctgatgaagacggagcggccccggcccaacaccttcatcatccgctgcctgcagtggaccactgtcatcgaacgcaccttccatgtggagactcctgaggagcgggaggagtggacaaccgccatccagactgtggctgacggcctcaagaagcaggaggaggaggagatggacttccggtcgggctcacccagtgacaactcaggggctgaagagatggaggtgtccctggccaagcccaagcaccgcgtgaccatgaacgagtttgagtacctgaagctgctgggcaagggcactttcggcaaggtgatcctggtgaaggagaaggccacaggccgctactacgccatgaagatcctcaagaaggaagtcatcgtggccaaggacgaggtggcccacacactcaccgagaaccgcgtcctgcagaactccaggcaccccttcctcacagccctgaagtactctttccagacccacgaccgcctctgctttgtcatggagtacgccaacgggggcgagctgttcttccacctgtcccgggagcgtgtgttctccgaggaccgggcccgcttctatggcgctgagattgtgtcagccctggactacctgcactcggagaagaacgtggtgtaccgggacctcaagctggagaacctcatgctggacaaggacgaccacacgaccacgaagaattccggccgtggtcgt

SEQ ID NO: 327272 - DNA, 1212 bp, Homo sapiens
ctctttgtctccagcgcccagcactgggcctggcaaaacctgagacgcccggtacatgttggccaaatgaatgaaccagattcagaccggcaggggcgctgtggtttaggaggggcctggggtttctcccaggaggtttttgggcttgcgctggagggctctggactcccgtttgcgccagtggcctgcatcctggtcctgtcttcctcatgtttgaatttctttgctttcctagtctggggagcagggaggagccctgtgccctgtcccaggatccatgggtaggaacaccatggacagggagagcaaacggggccatctgtcaccaggggcttagggaaggccgagccagcctgggtcaaagaagtcaaaggggctgcctggaggaggcagcctgtcagctggtgcatcagaggctgtggccaggccagctgggctcggggagcgccagcctgagaggagcgcgtgagcgtcgcgggagcctcgggcaccatgagcgacgtggctattgtgaaggagggttggctgcacaaacgaggggagtacatcaagacctggcggccacgctacttcctcctcaagaatgatggcaccttcattggctacaaggagcggccgcaggatgtggaccaacgtgaggctcccctcaacaacttctctgtggcgcagtgccagctgatgaagacggagcggccccggcccaacaccttcatcatccgctgcctgcagtggaccactgtcatcgaacgcaccttccatgtggagactcctgaggagcgggaggagtggacaaacgacatccaaggtcacagtcgtgagagtgacagcatggtatttagatgaggagttcatcggccacgatggatactaccattcgagcaaccaacgctggaactcaacaaatggacagccattggacgtgtgtggggacaagagaggcgccaggccacctactatccactcctagttctgcgctactcaggcgcacggcgagcgacaggtccttgaagtggccggactgtgttgagacccttgtctgggctgtgaaccggataacgcgtttggtgaaagagggaaattgtggaggaataggggtacgccgccaattacgggtggcaccaattggaggttgatgtataactattacagttggggaaatcatggtaaataagtcaaatacaggaagtttgccaattgttggagggaagtaaa

SEQ ID NO: 327273 - DNA, 2719 bp, Homo sapiens
ggcacgaggggcggccgagcaccgagcgctgggcaccgggcaccgagcggcggcggcacgcgaggcccggccccgagcagcgcccccgcccgccgcggcctccagcccggccccgcccagcgccggcccgcggggatgcggagcggcgggcgccggaggccgcggcccggctaggcccgcgctcgcgcccggacgcggcggcccgaggctgtggccaggccagctgggctcggggagcgccagcctgagaggagcgcgtgagcgtcgcgggagcctcgggcaccatgagcgacgtggctattgtgaaggagggttggctgcacaaacgaggggagtacatcaagacctggcggccacgctacttcctcctcaagaatgatggcaccttcattggctacaaggagcggccgcaggatgtggaccaacgtgaggctcccctcaacaacttctctgtggcgcagtgccagctgatgaagacggagcggccccggcccaacaccttcatcatccgctgcctgcagtggaccactgtcatcgaacgcaccttccatgtggagactcctgaggagcgggaggagtggacaaccgccatccagactgtggctgacggcctcaagaagcaggaggaggaggagatggacttccggtcgggctcacccagtgacaactcaggggctgaagagatggaggtgtccctggccaagcccaagcaccgcgtgaccatgaacgagtttgagtacctgaagctgctgggcaagggcactttcggcaaggtgatcctggtgaaggagaaggccacaggccgctactacgccatgaagatcctcaagaaggaagtcatcgtggccaaggacgaggtggcccacacactcaccgagaaccgcgtcctgcagaactccaggcaccccttcctcacagccctgaagtactctttccagacccacgaccgcctctgctttgtcatggagtacgccaacgggggcgagctgttcttccacctgtcccgggagcgtgtgttctccgaggaccgggcccgcttctatggcgctgagattgtgtcagccctggactacctgcactcggagaagaacgtggtgtaccgggacctcaagctggagaacctcatgctggacaaggacgggcacattaagatcacagacttcgggctgtgcaaggaggggatcaaggacggtgccaccatgaagaccttttgcggcacacctgagtacctggcccccgaggtgctggaggacaatgactacggccgtgcagtggactggtgggggctgggcgtggtcatgtacgagatgatgtgcggtcgcctgcccttctacaaccaggaccatgagaagctttttgagctcatcctcatggaggagatccgcttcccgcgcacgcttggtcccgaggccaagtccttgctttcagggctgctcaagaaggaccccaagcagaggcttggcgggggctccgaggacgccaaggagatcatgcagcatcgcttctttgccggtatcgtgtggcagcacgtgtacgagaagaagctcagcccacccttcaagccccaggtcacgtcggagactgacaccaggtattttgatgaggagttcacggcccagatgatcaccatcacaccacctgaccaagatgacagcatggagtgtgtggacagcgagcgcaggccccacttcccccagttctcctactcggccagcggcacggcctgaggcggcggtggactgcgctggacgatagcttggagggatggagaggcggcctcgtgccatgatctgtatttaatggtttttatttctcgggtgcatttgagagaagccacgctgtcctctcgagcccagatggaaagacgtttttgtgctgtgggcagcaccctcccccgcagcggggtagggaagaaaactatcctgcgggttttaatttatttcatccagtttgttctccgggtgtggcctcagccctcagaacaatccgattcacgtagggaaatgttaaggacttctgcagctatgcgcaatgtggcattggggggccgggcaggtcctgcccatgtgtcccctcactctgtcagccagccgccctgggctgtctgtcaccagctatctgtcatctctctggggccctgggcctcagttcaacctggtggcaccagatgcaacctcactatggtatgctggccagcaccctctcctgggggtggcaggcacacagcagccccccagcactaaggccgtgtctctgaggacgtcatcggaggctgggcccctgggatgggaccagggatgggggatgggccagggtttacccagtgggacagaggagcaaggtttaaatttgttattgtgtattatgttgttcaaatgcattttgggggtttttaatctttgtgacaggaaagccctcccccttccccttctgtgtcacagttcttggtgactgtcccaccgggagcctccccctcagatgatctctccacggtagcacttgaccttttcgacgcttaacctttccgctgtcgccccaggccctccctgactccctgtgggggtggccatccctgggcccctccacgcctcctggccagacgctgccgctgccgctgcaccacggcgtttttttacaacattcaactttagtatttttactattataatataatatggaaccttccctccaaattcttcaataaaagttgcttttcaaa

SEQ ID NO: 327274 - DNA, 792 bp, Homo sapiens
aagtattatcaggtgccgagatctcgggtgtaaatgcatgcagaggcgcgatgtgaaaaggatgactggtcgtcgctgtgcaaggaggggatcaaggacggtgccaccatgaagaccttttgcggcacacctgagtacctggcccccgaggtgctggaggacaatgactacggccgtgcagtggactggtgggggctgggcgtggtcatgtacgagatgatgtgcggtcgcctgcccttctacaaccaggaccatgagaagctttttgagctcatcctcatggaggagatccgcttcccgcgcacgcttggtcccgaggccaagtccttgctttcagggctgctcaagaaggaccccaagcagaggcttggcgggggctccgaggacgccaaggagatcatgcagcatcgcttctttgccggtatcgtgtggcagcacgtgtacgagaagaagctcagcccacccttcaagccccaggtcacgtcggagactgacaccaggtattttgatgaggagttcacggcccagatgatcaccatcacaccacctgaccaagatgacagcatggagtgtgtggacagcgagcgcaggccccacttcccccagttctcctactcggccagcggcacggcctgaggcggcggtggactgcgctggacgatagcttggagggatggagaggcggcctcgtgccggtccggtttaaggggcaattcccggggcgttggaaacccgtgcctctcggccgatggaaacgtttgtctgtgggcctccccggcgggggaaacctgg

SEQ ID NO: 327275 - DNA, 2927 bp, Homo sapiens
ctctttgtctccagcgcccagcactgggcctggcaaaacctgagacgcccggtacatgttggccaaatgaatgaaccagattcagaccggcaggggcgctgtggtttaggaggggcctggggtttctcccaggaggtttttgggcttgcgctggagggctctggactcccgtttgcgccagtggcctgcatcctggtcctgtcttcctcatgtttgaatttctttgctttcctagtctggggagcagggaggagccctgtgccctgtcccaggatccatgggtaggaacaccatggacagggagagcaaacggggccatctgtcaccaggggcttagggaaggccgagccagcctgggtcaaagaagtcaaaggggctgcctggaggaggcagcctgtcagctggtgcatcagaggctgtggccaggccagctgggctcggggagcgccagcctgagaggagcgcgtgagcgtcgcgggagcctcgggcaccatgagcgacgtggctattgtgaaggagggttggctgcacaaacgaggggagtacatcaagacctggcggccacgctacttcctcctcaagaatgatggcaccttcattggctacaaggagcggccgcaggatgtggaccaacgtgaggctcccctcaacaacttctctgtggcgcagtgccagctgatgaagacggagcggccccggcccaacaccttcatcatccgctgcctgcagtggaccactgtcatcgaacgcaccttccatgtggagactcctgaggagcgggaggagtggacaaccgccatccagactgtggctgacggcctcaagaagcaggaggaggaggagatggacttccggtcgggctcacccagtgacaactcaggggctgaagagatggaggtgtccctggccaagcccaagcaccgcgtgaccatgaacgagtttgagtacctgaagctgctgggcaagggcactttcggcaaggtgatcctggtgaaggagaaggccacaggccgctactacgccatgaagatcctcaagaaggaagtcatcgtggccaaggacgaggtggcccacacactcaccgagaaccgcgtcctgcagaactccaggcaccccttcctcacagccctgaagtactctttccagacccacgaccgcctctgctttgtcatggagtacgccaacgggggcgagctgttcttccacctgtcccgggagcgtgtgttctccgaggaccgggcccgcttctatggcgctgagattgtgtcagccctggactacctgcactcggagaagaacgtggtgtaccgggacctcaagctggagaacctcatgctggacaaggacgggcacattaagatcacagacttcgggctgtgcaaggaggggatcaaggacggtgccaccatgaagaccttttgcggcacacctgagtacctggcccccgaggtgctggaggacaatgactacggccgtgcagtggactggtgggggctgggcgtggtcatgtacgagatgatgtgcggtcgcctgcccttctacaaccaggaccatgagaagctttttgagctcatcctcatggaggagatccgcttcccgcgcacgcttggtcccgaggccaagtccttgctttcagggctgctcaagaaggaccccaagcagaggcttggcgggggctccgaggacgccaaggagatcatgcagcatcgcttctttgccggtatcgtgtggcagcacgtgtacgagaagaagctcagcccacccttcaagccccaggtcacgtcggagactgacaccaggtattttgatgaggagttcacggcccagatgatcaccatcacaccacctgaccaagatgacagcatggagtgtgtggacagcgagcgcaggccccacttcccccagttctcctactcggccagcggcacggcctgaggcggcggtggactgcgctggacgatagcttggagggatggagaggcggcctcgtgccatgatctgtatttaatggtttttatttctcgggtgcatttgagagaagccacgctgtcctctcgagcccagatggaaagacgtttttgtgctgtgggcagcaccctcccccgcagcggggtagggaagaaaactatcctgcgggttttaatttatttcatccagtttgttctccgggtgtggcctcagccctcagaacaatccgattcacgtagggaaatgttaaggacttctgcagctatgcgcaatgtggcattggggggccgggcaggtcctgcccatgtgtcccctcactctgtcagccagccgccctgggctgtctgtcaccagctatctgtcatctctctggggccctgggcctcagttcaacctggtggcaccagatgcaacctcactatggtatgctggccagcaccctctcctgggggtggcaggcacacagcagccccccagcactaaggccgtgtctctgaggacgtcatcggaggctgggcccctgggatgggaccagggatgggggatgggccagggtttacccagtgggacagaggagcaaggtttaaatttgttattgtgtattatgttgttcaaatgcattttgggggtttttaatctttgtgacaggaaagccctcccccttccccttctgtgtcacagttcttggtgactgtcccaccgggagcctccccctcagatgatctctccacggtagcacttgaccttttcgacgcttaacctttccgctgtcgccccaggccctccctgactccctgtgggggtggccatccctgggcccctccacgcctcctggccagacgctgccgctgccgctgcaccacggcgtttttttacaacattcaactttagtatttttactattataatataatatggaaccttccctccaaattcttcaataaaagttgcttttcaaa

SEQ ID NO: 327276 - DNA, 2621 bp, Homo sapiens
tcagtgtcgtcagagccccctgtgcctgaggcgtgcgcggctcggagccctgccctcggagtcctgcggtgccttcctcgagtctggcctgctttccatcctgctaaaggctgtggccaggccagctgggctcggggagcgccagcctgagaggagcgcgtgagcgtcgcgggagcctcgggcaccatgagcgacgtggctattgtgaaggagggttggctgcacaaacgaggggagtacatcaagacctggcggccacgctacttcctcctcaagaatgatggcaccttcattggctacaaggagcggccgcaggatgtggaccaacgtgaggctcccctcaacaacttctctgtggcgcagtgccagctgatgaagacggagcggccccggcccaacaccttcatcatccgctgcctgcagtggaccactgtcatcgaacgcaccttccatgtggagactcctgaggagcgggaggagtggacaaccgccatccagactgtggctgacggcctcaagaagcaggaggaggaggagatggacttccggtcgggctcacccagtgacaactcaggggctgaagagatggaggtgtccctggccaagcccaagcaccgcgtgaccatgaacgagtttgagtacctgaagctgctgggcaagggcactttcggcaaggtgatcctggtgaaggagaaggccacaggccgctactacgccatgaagatcctcaagaaggaagtcatcgtggccaaggacgaggtggcccacacactcaccgagaaccgcgtcctgcagaactccaggcaccccttcctcacagccctgaagtactctttccagacccacgaccgcctctgctttgtcatggagtacgccaacgggggcgagctgttcttccacctgtcccgggagcgtgtgttctccgaggaccgggcccgcttctatggcgctgagattgtgtcagccctggactacctgcactcggagaagaacgtggtgtaccgggacctcaagctggagaacctcatgctggacaaggacgggcacattaagatcacagacttcgggctgtgcaaggaggggatcaaggacggtgccaccatgaagaccttttgcggcacacctgagtacctggcccccgaggtgctggaggacaatgactacggccgtgcagtggactggtgggggctgggcgtggtcatgtacgagatgatgtgcggtcgcctgcccttctacaaccaggaccatgagaagctttttgagctcatcctcatggaggagatccgcttcccgcgcacgcttggtcccgaggccaagtccttgctttcagggctgctcaagaaggaccccaagcagaggcttggcgggggctccgaggacgccaaggagatcatgcagcatcgcttctttgccggtatcgtgtggcagcacgtgtacgagaagaagctcagcccacccttcaagccccaggtcacgtcggagactgacaccaggtattttgatgaggagttcacggcccagatgatcaccatcacaccacctgaccaagatgacagcatggagtgtgtggacagcgagcgcaggccccacttcccccagttctcctactcggccagcggcacggcctgaggcggcggtggactgcgctggacgatagcttggagggatggagaggcggcctcgtgccatgatctgtatttaatggtttttatttctcgggtgcatttgagagaagccacgctgtcctctcgagcccagatggaaagacgtttttgtgctgtgggcagcaccctcccccgcagcggggtagggaagaaaactatcctgcgggttttaatttatttcatccagtttgttctccgggtgtggcctcagccctcagaacaatccgattcacgtagggaaatgttaaggacttctgcagctatgcgcaatgtggcattggggggccgggcaggtcctgcccatgtgtcccctcactctgtcagccagccgccctgggctgtctgtcaccagctatctgtcatctctctggggccctgggcctcagttcaacctggtggcaccagatgcaacctcactatggtatgctggccagcaccctctcctgggggtggcaggcacacagcagccccccagcactaaggccgtgtctctgaggacgtcatcggaggctgggcccctgggatgggaccagggatgggggatgggccagggtttacccagtgggacagaggagcaaggtttaaatttgttattgtgtattatgttgttcaaatgcattttgggggtttttaatctttgtgacaggaaagccctcccccttccccttctgtgtcacagttcttggtgactgtcccaccgggagcctccccctcagatgatctctccacggtagcacttgaccttttcgacgcttaacctttccgctgtcgccccaggccctccctgactccctgtgggggtggccatccctgggcccctccacgcctcctggccagacgctgccgctgccgctgcaccacggcgtttttttacaacattcaactttagtatttttactattataatataatatggaaccttccctccaaattcttcaataaaagttgcttttcaaa

SEQ ID NO: 327277 - DNA, 2797 bp, Homo sapiens
cagcccctgtggccatagctggggcccgagctgctgctggtgcctgctggggactggctggtttagggctgcctcctccaggaaggctgtgcagactggcccagacctcttcccagcctcctgtccatggtactccatcccctgcgtccagctggcccagcccgttttcagacacagctcggggtggctcttctgagaggggcgctgtggtggggcgagtctgccttcccgttgacccagggccgtttctgtcgctggccctaagaaacagctcccgtaccgcgcctgccccctgggactcaggcatcccaggcacatctgtcctggcacacccagttcctgcctggctgcctggcgagggtctgacgggtagagtgtgcgtggctctcaccacccgcacgtctgtaggggagtacatcaagacctggcggccacgctacttcctcctcaagaatgatggcaccttcattggctacaaggagcggccgcaggatgtggaccaacgtgaggctcccctcaacaacttctctgtggcgcagtgccagctgatgaagacggagcggccccggcccaacaccttcatcatccgctgcctgcagtggaccactgtcatcgaacgcaccttccatgtggagactcctgaggagcgggaggagtggacaaccgccatccagactgtggctgacggcctcaagaagcaggaggaggaggagatggacttccggtcgggctcacccagtgacaactcaggggctgaagagatggaggtgtccctggccaagcccaagcaccgcgtgaccatgaacgagtttgagtacctgaagctgctgggcaagggcactttcggcaaggtgatcctggtgaaggagaaggccacaggccgctactacgccatgaagatcctcaagaaggaagtcatcgtggccaaggacgaggtggcccacacactcaccgagaaccgcgtcctgcagaactccaggcaccccttcctcacagccctgaagtactctttccagacccacgaccgcctctgctttgtcatggagtacgccaacgggggcgagctgttcttccacctgtcccgggagcgtgtgttctccgaggaccgggcccgcttctatggcgctgagattgtgtcagccctggactacctgcactcggagaagaacgtggtgtaccgggacctcaagctggagaacctcatgctggacaaggacgggcacattaagatcacagacttcgggctgtgcaaggaggggatcaaggacggtgccaccatgaagaccttttgcggcacacctgagtacctggcccccgaggtgctggaggacaatgactacggccgtgcagtggactggtgggggctgggcgtggtcatgtacgagatgatgtgcggtcgcctgcccttctacaaccaggaccatgagaagctttttgagctcatcctcatggaggagatccgcttcccgcgcacgcttggtcccgaggccaagtccttgctttcagggctgctcaagaaggaccccaagcagaggcttggcgggggctccgaggacgccaaggagatcatgcagcatcgcttctttgccggtatcgtgtggcagcacgtgtacgagaagaagctcagcccacccttcaagccccaggtcacgtcggagactgacaccaggtattttgatgaggagttcacggcccagatgatcaccatcacaccacctgaccaagatgacagcatggagtgtgtggacagcgagcgcaggccccacttcccccagttctcctactcggccagcggcacggcctgaggcggcggtggactgcgctggacgatagcttggagggatggagaggcggcctcgtgccatgatctgtatttaatggtttttatttctcgggtgcatttgagagaagccacgctgtcctctcgagcccagatggaaagacgtttttgtgctgtgggcagcaccctcccccgcagcggggtagggaagaaaactatcctgcgggttttaatttatttcatccagtttgttctccgggtgtggcctcagccctcagaacaatccgattcacgtagggaaatgttaaggacttctgcagctatgcgcaatgtggcattggggggccgggcaggtcctgcccatgtgtcccctcactctgtcagccagccgccctgggctgtctgtcaccagctatctgtcatctctctggggccctgggcctcagttcaacctggtggcaccagatgcaacctcactatggtatgctggccagcaccctctcctgggggtggcaggcacacagcagccccccagcactaaggccgtgtctctgaggacgtcatcggaggctgggcccctgggatgggaccagggatgggggatgggccagggtttacccagtgggacagaggagcaaggtttaaatttgttattgtgtattatgttgttcaaatgcattttgggggtttttaatctttgtgacaggaaagccctcccccttccccttctgtgtcacagttcttggtgactgtcccaccgggagcctccccctcagatgatctctccacggtagcacttgaccttttcgacgcttaacctttccgctgtcgccccaggccctccctgactccctgtgggggtggccatccctgggcccctccacgcctcctggccagacgctgccgctgccgctgcaccacggcgtttttttacaacattcaactttagtatttttactattataatataatatggaaccttccctccaaattcttcaataaaagttgcttttcaaa

SEQ ID NO: 327278 - DNA, 2981 bp, Homo sapiens
  misc_feature (2975)..(2976): n is a, c, g, or t
ctctttgtctccagcgcccagcactgggcctggcaaaacctgagacgcccggtacatgttggccaaatgaatgaaccagattcagaccggcaggggcgctgtggtttaggaggggcctggggtttctcccaggaggtttttgggcttgcgctggagggctctggactcccgtttgcgccagtggcctgcatcctggtcctgtcttcctcatgtttgaatttctttgctttcctagtctggggagcagggaggagccctgtgccctgtcccaggatccatgggtaggaacaccatggacagggagagcaaacggggccatctgtcaccaggggcttagggaaggccgagccagcctgggtcaaagaagtcaaaggggctgcctggaggaggcagcctgtcagctggtgcatcagaggctgtggccaggccagctgggctcggggagcgccagcctgagaggagcgcgtgagcgtcgcgggagcctcgggcaccatgagcgacgtggctattgtgaaggagggttggctgcacaaacgaggggagtacatcaagacctggcggccacgctacttcctcctcaagaatgatggcaccttcattggctacaaggagcggccgcaggatgtggaccaacgtgaggctcccctcaacaacttctctgtggcgcagtgccagctgatgaagacggagcggccccggcccaacaccttcatcatccgctgcctgcagtggaccactgtcatcgaacgcaccttccatgtggagactcctgaggagcgggaggagtggacaaccgccatccagactgtggctgacggcctcaagaagcaggaggaggaggagatggacttccggtcgggctcacccagtgacaactcaggggctgaagagatggaggtgtccctggccaagcccaagcaccgcgtgaccatgaacgagtttgagtacctgaagctgctgggcaagggcactttcggcaaggtgatcctggtgaaggagaaggccacaggccgctactacgccatgaagatcctcaagaaggaagtcatcgtggccaaggacgaggtggcccacacactcaccgagaaccgcgtcctgcagaactccaggcaccccttcctcacagccctgaagtactctttccagacccacgaccgcctctgctttgtcatggagtacgccaacgggggcgagctgttcttccacctgtcccgggagcgtgtgttctccgaggaccgggcccgcttctatggcgctgagattgtgtcagccctggactacctgcactcggagaagaacgtggtgtaccgggacctcaagctggagaacctcatgctggacaaggacgggcacattaagatcacagacttcgggctgtgcaaggaggggatcaaggacggtgccaccatgaagaccttttgcggcacacctgagtacctggcccccgaggtgctggaggacaatgactacggccgtgcagtggactggtgggggctgggcgtggtcatgtacgagatgatgtgcggtcgcctgcccttctacaaccaggaccatgagaagctttttgagctcatcctcatggaggagatccgcttcccgcgcacgcttggtcccgaggccaagtccttgctttcagggctgctcaagaaggaccccaagcagaggcttggcgggggctccgaggacgccaaggagatcatgcagcatcgcttctttgccggtatcgtgtggcagcacgtgtacgagaagaagctcagcccacccttcaagccccaggtcacgtcggagactgacaccaggtattttgatgaggagttcacggcccagatgatcaccatcacaccacctgaccaagatgacagcatggagtgtgtggacagcgagcgcaggccccacttcccccagttctcctactcggccagcggcacggcctgaggcggcggtggactgcgctggacgatagcttggagggatggagaggcggcctcgtgccatgatctgtatttaatggtttttatttctcgggtgcatttgagagaagccacgctgtcctctcgagcccagatggaaagacgtttttgtgctgtgggcagcaccctcccccgcagcggggtagggaagaaaactatcctgcgggttttaatttatttcatccagtttgttctccgggtgtggcctcagccctcagaacaatccgattcacgtagggaaatgttaaggacttctgcagctatgcgcaatgtggcattggggggccgggcaggtcctgcccatgtgtcccctcactctgtcagccagccgccctgggctgtctgtcaccagctatctgtcatctctctggggccctgggcctcagttcaacctggtggcaccagatgcaacctcactatggtatgctggccagcaccctctcctgggggtggcaggcacacagcagccccccagcactaaggccgtgtctctgaggacgtcatcggaggctgggcccctgggatgggaccagggatgggggatgggccagggtttacccagtgggacagaggagcaaggtttaaatttgttattgtgtattatgttgttcaaatgcattttgggggtttttaatctttgtgacaggaaagccctcccccttccccttctgtgtcacagttcttggtgactgtcccaccgggagcctccccctcagatgatctctccacggtagcacttgaccttttcgacgcttaacctttccgctgtcgccccaggccctccctgactccctgtgggggtggccatccctgggcccctccacgcctcctggccagacgctgccgctgccgctgcaccacggcgtttttttacaacattcaactttagtatttttactattataatataatatggaaccttccctccaaattcttcaataaaagttgcttttcaaaaaaaaaaaaacacaaaaaaaaaaaaaaaaaaaaaaagggggggggggnntaaaa

SEQ ID NO: 327279 - DNA, 2239 bp, Homo sapiens
ggacgcgtgggtcgcggacgcgtgggatccgctgcctgcagtggaccactgtcatcgaacgcaccttccatgtggagactcctgaggagcgggaggagtggacaaccgccatccagactgtggctgacggcctcaagaagcaggaggaggaggagatggacttccggtcgggctcacccagtgacaactcaggggctgaagagatggaggtgtccctggccaagcccaagcaccgcgtgaccatgaacgagtttgagtacctgaagctgctgggcaagggcactttcggcaaggtgatcctggtgaaggagaaggccacaggccgctactacgccatgaagatcctcaagaaggaagtcatcgtggccaaggacgaggtggcccacacactcaccgagaaccgcgtcctgcagaactccaggcaccccttcctcacagccctgaagtactctttccagacccacgaccgcctctgctttgtcatggagtacgccaacgggggcgagctgttcttccacctgtcccgggagcgtgtgttctccgaggaccgggcccgcttctatggcgctgagattgtgtcagccctggactacctgcactcggagaagaacgtggtgtaccgggacctcaagctggagaacctcatgctggacaaggacgggcacattaagatcacagacttcgggctgtgcaaggaggggatcaaggacggtgccaccatgaagaccttttgcggcacacctgagtacctggcccccgaggtgctggaggacaatgactacggccgtgcagtggactggtgggggctgggcgtggtcatgtacgagatgatgtgcggtcgcctgcccttctacaaccaggaccatgagaagctttttgagctcatcctcatggaggagatccgcttcccgcgcacgcttggtcccgaggccaagtccttgctttcagggctgctcaagaaggaccccaagcagaggcttggcgggggctccgaggacgccaaggagatcatgcagcatcgcttctttgccggtatcgtgtggcagcacgtgtacgagaagaagctcagcccacccttcaagccccaggtcacgtcggagactgacaccaggtattttgatgaggagttcacggcccagatgatcaccatcacaccacctgaccaagatgacagcatggagtgtgtggacagcgagcgcaggccccacttcccccagttctcctactcggccagcggcacggcctgaggcggcggtggactgcgctggacgatagcttggagggatggagaggcggcctcgtgccatgatctgtatttaatggtttttatttctcgggtgcatttgagagaagccacgctgtcctctcgagcccagatggaaagacgtttttgtgctgtgggcagcaccctcccccgcagcggggtagggaagaaaactatcctgcgggttttaatttatttcatccagtttgttctccgggtgtggcctcagccctcagaacaatccgattcacgtagggaaatgttaaggacttctgcagctatgcgcaatgtggcattggggggccgggcaggtcctgcccatgtgtcccctcactctgtcagccagccgccctgggctgtctgtcaccagctatctgtcatctctctggggccctgggcctcagttcaacctggtggcaccagatgcaacctcactatggtatgctggccagcaccctctcctgggggtggcaggcacacagcagccccccagcactaaggccgtgtctctgaggacgtcatcggaggctgggcccctgggatgggaccagggatgggggatgggccagggtttacccagtgggacagaggagcaaggtttaaatttgttattgtgtattatgttgttcaaatgcattttgggggtttttaatctttgtgacaggaaagccctcccccttccccttctgtgtcacagttcttggtgactgtcccaccgggagcctccccctcagatgatctctccacggtagcacttgaccttttcgacgcttaacctttccgctgtcgccccaggccctccctgactccctgtgggggtggccatccctgggcccctccacgcctcctggccagacgctgccgctgccgctgcaccacggcgtttttttacaacattcaactttagtatttttactattataatataatatggaaccttccctccaaattcttcaataaaagttgcttttcaaa

SEQ ID NO: 327280 - DNA, 2872 bp, Homo sapiens
ctctttgtctccagcgcccagcactgggcctggcaaaacctgagacgcccggtacatgttggccaaatgaatgaaccagattcagaccggcaggggcgctgtggtttaggaggggcctggggtttctcccaggaggtttttgggcttgcgctggagggctctggactcccgtttgcgccagtggcctgcatcctggtcctgtcttcctcatgtttgaatttctttgctttcctagtctggggagcagggaggagccctgtgccctgtcccaggatccatgggtaggaacaccatggacagggagagcaaacggggccatctgtcaccaggggcttagggaaggccgagccagcctgggtcaaagaagtcaaaggggctgcctggaggaggcagcctgtcagctggtgcatcagaggctgtggccaggccagctgggctcggggagcgccagcctgagaggagcgcgtgagcgtcgcgggagcctcgggcaccatgagcgacgtggctattgtgaaggagggttggctgcacaaacgaggggagtacatcaagacctggcggccacgctacttcctcctcaagaatgatggcaccttcattggctacaaggagcggccgcaggatgtggaccaacgtgaggctcccctcaacaacttctctgtggcgcagtgccagctgatgaagacggagcggccccggcccaacaccttcatcatccgctgcctgcagtggaccactgtcatcgaacgcaccttccatgtggagactcctgaggagcgggaggagtggacaaccgccatccagactgtggctgacggcctcaagaagcaggaggaggaggagatggacttccggtcgggctcacccagtgacaactcaggggctgaagagatggaggtgtccctggccaagcccaagcaccgcgtgaccatgaacgagtttgagtacctgaagctgctgggcaagggcactttcggcaaggtgatcctggtgaaggagaaggccacaggccgctactacgccatgaagatcctcaagaaggaagtcatcgtggccaaggacgaggtggcccacacactcaccgagaaccgcgtcctgcagaactccaggcaccccttcctcacagccctgaagtactctttccagacccacgaccgcctctgctttgtcatggagtacgccaacgggggcgagctgttcttccacctgtcccgggagcgtgtgttctccgaggaccgggcccgcttctatggcgctgagattgtgtcagccctggactacctgcactcggagaagaacgtggtgtaccgggacctcaagctggagaacctcatgctggacaaggacgggcacattaagatcacagacttcgggctgtgcaaggaggggatcaaggacggtgccaccatgaagaccttttgcggcacacctgagtacctggcccccgaggtgctggaggacaatgactacggccgtgcagtggactggtgggggctgggcgtggtcatgtacgagatgatgtgcggtcgcctgcccttctacaaccaggaccatgagaagctttttgagctcatcctcatggaggagatccgcttcccgcgcacgcttggtcccgaggccaagtccttgctttcagggctgctcaagaaggaccccaagcagaggcttggcgggggctccgaggacgccaaggagatcatgcagcatcgcttctttgccggtatcgtgtggcagcacgtgtacgagaagaagctcagcccacccttcaagccccaggtcacgtcggagactgacaccaggtattttgatgaggagttcacggcccagatgatcaccatcacaccacctgaccaagatgacagcatggagtgtgtggacagcgagcgcaggccccacttcccccagttctcctactcggccagcggcacggcctgaggcggcggtggactgcgctggacgatagcttggagggatggagaggcggcctcgtgccatgatctgtatttaatggtttttatttctcgggtgcatttgagagaagccacgctgtcctctcgagcccagatggaaatatcctgcgggttttaatttatttcatccagtttgttctccgggtgtggcctcagccctcagaacaatccgattcacgtagggaaatgttaaggacttctgcagctatgcgcaatgtggcattggggggccgggcaggtcctgcccatgtgtcccctcactctgtcagccagccgccctgggctgtctgtcaccagctatctgtcatctctctggggccctgggcctcagttcaacctggtggcaccagatgcaacctcactatggtatgctggccagcaccctctcctgggggtggcaggcacacagcagccccccagcactaaggccgtgtctctgaggacgtcatcggaggctgggcccctgggatgggaccagggatgggggatgggccagggtttacccagtgggacagaggagcaaggtttaaatttgttattgtgtattatgttgttcaaatgcattttgggggtttttaatctttgtgacaggaaagccctcccccttccccttctgtgtcacagttcttggtgactgtcccaccgggagcctccccctcagatgatctctccacggtagcacttgaccttttcgacgcttaacctttccgctgtcgccccaggccctccctgactccctgtgggggtggccatccctgggcccctccacgcctcctggccagacgctgccgctgccgctgcaccacggcgtttttttacaacattcaactttagtatttttactattataatataatatggaaccttccctccaaattcttcaataaaagttgcttttcaaa

SEQ ID NO: 327281 - DNA, 1876 bp, Homo sapiens
ttcatgtgtcccccgggtttggatatcgtcgaccgcgccgttcgatcgagaaccggctcctgcagatctccagggccctgaagtactctttccagacccacgaccgcctctgctttgtcatggagtacgccaacgggggcgagctgttcttccacctgtcccgggagcgtgtgttctccgaggaccgggcccgcttctatggcgctgagattgtgtcagccctggactacctgcactcggagaagaacgtggtgtaccgggacctcaagctggagaacctcatgctggacaaggacgggcacattaagatcacagacttcgggctgtgcaaggaggggatcaaggacggtgccaccatgaagaccttttgcggcacacctgagtacctggcccccgaggtgctggaggacaatgactacggccgtgcagtggactggtgggggctgggcgtggtcatgtacgagatgatgtgcggtcgcctgcccttctacaaccaggaccatgagaagctttttgagctcatcctcatggaggagatccgcttcccgcgcacgcttggtcccgaggccaagtccttgctttcagggctgctcaagaaggaccccaagcagaggcttggcgggggctccgaggacgccaaggagatcatgcagcatcgcttctttgccggtatcgtgtggcagcacgtgtacgagaagaagctcagcccacccttcaagccccaggtcacgtcggagactgacaccaggtattttgatgaggagttcacggcccagatgatcaccatcacaccacctgaccaagatgacagcatggagtgtgtggacagcgagcgcaggccccacttcccccagttctcctactcggccagcggcacggcctgaggcggcggtggactgcgctggacgatagcttggagggatggagaggcggcctcgtgccatgatctgtatttaatggtttttatttctcgggtgcatttgagagaagccacgctgtcctctcgagcccagatggaaagacgtttttgtgctgtgggcagcaccctcccccgcagcggggtagggaagaaaactatcctgcgggttttaatttatttcatccagtttgttctccgggtgtggcctcagccctcagaacaatccgattcacgtagggaaatgttaaggacttctgcagctatgcgcaatgtggcattggggggccgggcaggtcctgcccatgtgtcccctcactctgtcagccagccgccctgggctgtctgtcaccagctatctgtcatctctctggggccctgggcctcagttcaacctggtggcaccagatgcaacctcactatggtatgctggccagcaccctctcctgggggtggcaggcacacagcagccccccagcactaaggccgtgtctctgaggacgtcatcggaggctgggcccctgggatgggaccagggatgggggatgggccagggtttacccagtgggacagaggagcaaggtttaaatttgttattgtgtattatgttgttcaaatgcattttgggggtttttaatctttgtgacaggaaagccctcccccttccccttctgtgtcacagttcttggtgactgtcccaccgggagcctccccctcagatgatctctccacggtagcacttgaccttttcgacgcttaacctttccgctgtcgccccaggccctccctgactccctgtgggggtggccatccctgggcccctccacgcctcctggccagacgctgccgctgccgctgcaccacggcgtttttttacaacattcaactttagtatttttactattataatataatatggaaccttccctccaaattcttcaataaaagttgcttttcaaa

SEQ ID NO: 327282 - DNA, 2877 bp, Homo sapiens
ctctttgtctccagcgcccagcactgggcctggcaaaacctgagacgcccggtacatgttggccaaatgaatgaaccagattcagaccggcaggggcgctgtggtttaggaggggcctggggtttctcccaggaggtttttgggcttgcgctggagggctctggactcccgtttgcgccagtggcctgcatcctggtcctgtcttcctcatgtttgaatttctttgctttcctagtctggggagcagggaggagccctgtgccctgtcccaggatccatgggtaggaacaccatggacagggagagcaaacggggccatctgtcaccaggggcttagggaaggccgagccagcctgggtcaaagaagtcaaaggggctgcctggaggaggcagcctgtcagctggtgcatcagaggctgtggccaggccagctgggctcggggagcgccagcctgagaggagcgcgtgagcgtcgcgggagcctcgggcaccatgagcgacgtggctattgtgaaggagggttggctgcacaaacgaggggagtacatcaagacctggcggccacgctacttcctcctcaagaatgatggcaccttcattggctacaaggagcggccgcaggatgtggaccaacgtgaggctcccctcaacaacttctctgtggcgcagtgccagctgatgaagacggagcggccccggcccaacaccttcatcatccgctgcctgcagtggaccactgtcatcgaacgcaccttccatgtggagactcctgaggagcgggaggagtggacaaccgccatccagactgtggctgacggcctcaagaagcaggaggaggaggagatggacttccggtcgggctcacccagtgacaactcaggggctgaagagatggaggtgtccctggccaagcccaagcaccgcgtgaccatgaacgagtttgagtacctgaagctgctgggcaagggcactttcggcaaggtgatcctggtgaaggagaaggccacaggccgctactacgccatgaagatcctcaagaaggaagtcatcgtggccaaggacgaggtggcccacacactcaccgagaaccgcgtcctgcagaactccaggcaccccttcctcacagccctgaagtactctttccagacccacgaccgcctctgctttgtcatggagtacgccaacgggggcgagctgttcttccacctgtcccgggagcgtgtgttctccgaggaccgggcccgcttctatggcgctgagattgtgtcagccctggactacctgcactcggagaagaacgtggtgtaccgggacctcaagctggagaacctcatgctggacaaggacgggcacattaagatcacagacttcgggctgtgcaaggaggggatcaaggacggtgccaccatgaagaccttttgcggcacacctgagtacctggcccccgaggtgctggaggacaatgactacggccgtgcagtggactggtgggggctgggcgtggtcatgtacgagatgatgtgcggtcgcctgcccttctacaaccaggaccatgagaagctttttgagctcatcctcatggaggagatccgcttcccgcgcacgcttggtcccgaggccaagtccttgctttcagggctgctcaagaaggaccccaagcagaggcttggcgggggctccgaggacgccaaggagatcatgcagcatcgcttctttgccggtatcgtgtggcagcacgtgtacgagaagaagctcagcccacccttcaagccccaggtcacgtcggagactgacaccaggtattttgatgaggagttcacggcccagatgatcaccatcacaccacctgaccaagttctcctactcggccagcggcacggcctgaggcggcggtggactgcgctggacgatagcttggagggatggagaggcggcctcgtgccatgatctgtatttaatggtttttatttctcgggtgcatttgagagaagccacgctgtcctctcgagcccagatggaaagacgtttttgtgctgtgggcagcaccctcccccgcagcggggtagggaagaaaactatcctgcgggttttaatttatttcatccagtttgttctccgggtgtggcctcagccctcagaacaatccgattcacgtagggaaatgttaaggacttctgcagctatgcgcaatgtggcattggggggccgggcaggtcctgcccatgtgtcccctcactctgtcagccagccgccctgggctgtctgtcaccagctatctgtcatctctctggggccctgggcctcagttcaacctggtggcaccagatgcaacctcactatggtatgctggccagcaccctctcctgggggtggcaggcacacagcagccccccagcactaaggccgtgtctctgaggacgtcatcggaggctgggcccctgggatgggaccagggatgggggatgggccagggtttacccagtgggacagaggagcaaggtttaaatttgttattgtgtattatgttgttcaaatgcattttgggggtttttaatctttgtgacaggaaagccctcccccttccccttctgtgtcacagttcttggtgactgtcccaccgggagcctccccctcagatgatctctccacggtagcacttgaccttttcgacgcttaacctttccgctgtcgccccaggccctccctgactccctgtgggggtggccatccctgggcccctccacgcctcctggccagacgctgccgctgccgctgcaccacggcgtttttttacaacattcaactttagtatttttactattataatataatatggaaccttccctccaaattcttcaataaaagttgcttttcaaa

SEQ ID NO: 327283 - DNA, 1729 bp, Homo sapiens
aacaaatgatgtatgaggcgatcccggtgttatttcgtcacaggcttcgtagtgcgctgataattgtcgtggccctggactacctgcactcggagaagaacgtggtgtaccgggacctcaagctggagaacctcatgctggacaaggacgggcacattaagatcacagacttcgggctgtgcaaggaggggatcaaggacggtgccaccatgaagaccttttgcggcacacctgagtacctggcccccgaggtgctggaggacaatgactacggccgtgcagtggactggtgggggctgggcgtggtcatgtacgagatgatgtgcggtcgcctgcccttctacaaccaggaccatgagaagctttttgagctcatcctcatggaggagatccgcttcccgcgcacgcttggtcccgaggccaagtccttgctttcagggctgctcaagaaggaccccaagcagaggcttggcgggggctccgaggacgccaaggagatcatgcagcatcgcttctttgccggtatcgtgtggcagcacgtgtacgagaagaagctcagcccacccttcaagccccaggtcacgtcggagactgacaccaggtattttgatgaggagttcacggcccagatgatcaccatcacaccacctgaccaagatgacagcatggagtgtgtggacagcgagcgcaggccccacttcccccagttctcctactcggccagcggcacggcctgaggcggcggtggactgcgctggacgatagcttggagggatggagaggcggcctcgtgccatgatctgtatttaatggtttttatttctcgggtgcatttgagagaagccacgctgtcctctcgagcccagatggaaagacgtttttgtgctgtgggcagcaccctcccccgcagcggggtagggaagaaaactatcctgcgggttttaatttatttcatccagtttgttctccgggtgtggcctcagccctcagaacaatccgattcacgtagggaaatgttaaggacttctgcagctatgcgcaatgtggcattggggggccgggcaggtcctgcccatgtgtcccctcactctgtcagccagccgccctgggctgtctgtcaccagctatctgtcatctctctggggccctgggcctcagttcaacctggtggcaccagatgcaacctcactatggtatgctggccagcaccctctcctgggggtggcaggcacacagcagccccccagcactaaggccgtgtctctgaggacgtcatcggaggctgggcccctgggatgggaccagggatgggggatgggccagggtttacccagtgggacagaggagcaaggtttaaatttgttattgtgtattatgttgttcaaatgcattttgggggtttttaatctttgtgacaggaaagccctcccccttccccttctgtgtcacagttcttggtgactgtcccaccgggagcctccccctcagatgatctctccacggtagcacttgaccttttcgacgcttaacctttccgctgtcgccccaggccctccctgactccctgtgggggtggccatccctgggcccctccacgcctcctggccagacgctgccgctgccgctgcaccacggcgtttttttacaacattcaactttagtatttttactattataatataatatggaaccttccctccaaattcttcaataaaagttgcttttcaaa

SEQ ID NO: 327284 - DNA, 2262 bp, Homo sapiens
ctctttgtctccagcgcccagcactgggcctggcaaaacctgagacgcccggtacatgttggccaaatgaatgaaccagattcagaccggcaggggcgctgtggtttaggaggggcctggggtttctcccaggaggtttttgggcttgcgctggagggctctggactcccgtttgcgccagtggcctgcatcctggtcctgtcttcctcatgtttgaatttctttgctttcctagtctggggagcagggaggagccctgtgccctgtcccaggatccatgggtaggaacaccatggacagggagagcaaacggggccatctgtcaccaggggcttagggaaggccgagccagcctgggtcaaagaagtcaaaggggctgcctggaggaggcagcctgtcagctggtgcatcagaggctgtggccaggccagctgggctcggggagcgccagcctgagaggagcgcgtgagcgtcgcgggagcctcgggcaccatgagcgacgtggctattgtgaaggagggttggctgcacaaacgaggggagtacatcaagacctggcggccacgctacttcctcctcaagaatgatggcaccttcattggctacaaggagcggccgcaggatgtggaccaacgtgaggctcccctcaacaacttctctgtggcgcagtgccagctgatgaagacggagcggccccggcccaacaccttcatcatccgctgcctgcagtggaccactgtcatcgaacgcaccttccatgtggagactcctgaggagcgggaggagtggacaaccgccatccagactgtggctgacggcctcaagaagcaggaggaggaggagatggacttccggtcgggctcacccagtgacaactcaggggctgaagagatggaggtgtccctggccaagcccaagcaccgcgtgaccatgaacgagtttgagtacctgaagctgctgggcaagggcactttcggcaaggtgatcctggtgaaggagaaggccacaggccgctactacgccatgaagatcctcaagaaggaagtcatcgtggccaaggacgaggtggcccacacactcaccgagaaccgcgtcctgcagaactccaggcaccccttcctcacagccctgaagtactctttccagacccacgaccgcctctgctttgtcatggagtacgccaacgggggcgagctgttcttccacctgtcccgggagcgtgtgttctccgaggaccgggcccgcttctatggcgctgagattgtgtcagccctggactacctgcactcggagaagaacgtggtgtaccgggacctcaagctggagaacctcatgctggacaaggacgggcacattaagatcacagacttcgggctgtgcaaggaggggatcaaggacggtgccaccatgaagaccttttgcggcacacctgagtacctggcccccgaggtgctggaggacaatgactacggccgtgcagtggactggtgggggctgggcgtggtcatgtacgagatgatgtgcggtcgcctgcccttctacaaccaggaccatgagaagctttttgagctcatcctcatggaggagatccgcttcccgcgcacgcttggtcccgaggccaagtccttgctttcagggctgctcaagaaggaccccaagcagaggcttggcgggggctccgaggacgccaaggagatcatgcagcatcgcttctttgccggtatcgtgtggcagcacgtgtacgagaagaagctcagcccacccttcaagccccaggtcacgtcggagactgacaccaggtattttgatgaggagttcacggcccagatgatcaccatcacaccacctgaccaagatgacagcatggagtgtgtggacagcgagcgcaggccccacttcccccagttctcctactcggccagcggcacggcctgaggcggcggtggactgcgctggacgatagcttggagggatggagaggcggcctcgtgccatgatctgtatttaatggtttttatttctcgggtgcatttgagagaagccacgctgtcctctcgagcccagatggaaagacgtttttgtgctgtgggcagcaccctcccccgcagcggggtagggaagaaaactatcctgcgggttttaatttatttcatccagtttgttctccgggtgtggcctcagccctcagaacaatccgattcacgaaaaggggcaccagggggggtgtttgtggacaaataaatttgtaaagtccgaggatta

SEQ ID NO: 327285 - DNA, 2268 bp, Homo sapiens
  misc_feature (2072)..(2072): n is a, c, g, or t
ctctttgtctccagcgcccagcactgggcctggcaaaacctgagacgcccggtacatgttggccaaatgaatgaaccagattcagaccggcaggggcgctgtggtttaggaggggcctggggtttctcccaggaggtttttgggcttgcgctggagggctctggactcccgtttgcgccagtggcctgcatcctggtcctgtcttcctcatgtttgaatttctttgctttcctagtctggggagcagggaggagccctgtgccctgtcccaggatccatgggtaggaacaccatggacagggagagcaaacggggccatctgtcaccaggggcttagggaaggccgagccagcctgggtcaaagaagtcaaaggggctgcctggaggaggcagcctgtcagctggtgcatcagaggctgtggccaggccagctgggctcggggagcgccagcctgagaggagcgcgtgagcgtcgcgggagcctcgggcaccatgagcgacgtggctattgtgaaggagggttggctgcacaaacgaggggagtacatcaagacctggcggccacgctacttcctcctcaagaatgatggcaccttcattggctacaaggagcggccgcaggatgtggaccaacgtgaggctcccctcaacaacttctctgtggcgcagtgccagctgatgaagacggagcggccccggcccaacaccttcatcatccgctgcctgcagtggaccactgtcatcgaacgcaccttccatgtggagactcctgaggagcgggaggagtggacaaccgccatccagactgtggctgacggcctcaagaagcaggaggaggaggagatggacttccggtcgggctcacccagtgacaactcaggggctgaagagatggaggtgtccctggccaagcccaagcaccgcgtgaccatgaacgagtttgagtacctgaagctgctgggcaagggcactttcggcaaggtgatcctggtgaaggagaaggccacaggccgctactacgccatgaagatcctcaagaaggaagtcatcgtggccaaggacgaggtggcccacacactcaccgagaaccgcgtcctgcagaactccaggcaccccttcctcacagccctgaagtactctttccagacccacgaccgcctctgctttgtcatggagtacgccaacgggggcgagctgttcttccacctgtcccgggagcgtgtgttctccgaggaccgggcccgcttctatggcgctgagattgtgtcagccctggactacctgcactcggagaagaacgtggtgtaccgggacctcaagctggagaacctcatgctggacaaggacgggcacattaagatcacagacttcgggctgtgcaaggaggggatcaaggacggtgccaccatgaagaccttttgcggcacacctgagtacctggcccccgaggtgctggaggacaatgactacggccgtgcagtggactggtgggggctgggcgtggtcatgtacgagatgatgtgcggtcgcctgcccttctacaaccaggaccatgagaagctttttgagctcatcctcatggaggagatccgcttcccgcgcacgcttggtcccgaggccaagtccttgctttcagggctgctcaagaaggaccccaagcagaggcttggcgggggctccgaggacgccaaggagatcatgcagcatcgcttctttgccggtatcgtgtggcagcacgtgtacgagaagaagctcagcccacccttcaagccccaggtcacgtcggagactgacaccaggtattttgatgaggagttcacggcccagatgatcaccatcacaccacctgaccaagatgacagcatggagtgtgtggacagcgagcgcaggccccacttcccccagttctcctactcggccagcggcacggcctgaggcggcggtggactgcgctggacgatagcttggagggatggagaggcggcctcgtgccatgatctgtatttaatggtttttatttctcgggtgcatttgagagaagccacgctgtcctctcgagcccagatggaaangttttgtgtgggagacctccacgagggggttgggaaaaaataatcgggttaattattaaccagtgggtcccgggtgggtaggctaaaaacgataagtgggaaagtaggttggagtgcgcaggattgggggaggatgagggtccaatgtgaacgcgggtgggaaagattattggcgggataactggagagacacatg

SEQ ID NO: 327286 - DNA, 2133 bp, Homo sapiens
ctctttgtctccagcgcccagcactgggcctggcaaaacctgagacgcccggtacatgttggccaaatgaatgaaccagattcagaccggcaggggcgctgtggtttaggaggggcctggggtttctcccaggaggtttttgggcttgcgctggagggctctggactcccgtttgcgccagtggcctgcatcctggtcctgtcttcctcatgtttgaatttctttgctttcctagtctggggagcagggaggagccctgtgccctgtcccaggatccatgggtaggaacaccatggacagggagagcaaacggggccatctgtcaccaggggcttagggaaggccgagccagcctgggtcaaagaagtcaaaggggctgcctggaggaggcagcctgtcagctggtgcatcagaggctgtggccaggccagctgggctcggggagcgccagcctgagaggagcgcgtgagcgtcgcgggagcctcgggcaccatgagcgacgtggctattgtgaaggagggttggctgcacaaacgaggggagtacatcaagacctggcggccacgctacttcctcctcaagaatgatggcaccttcattggctacaaggagcggccgcaggatgtggaccaacgtgaggctcccctcaacaacttctctgtggcgcagtgccagctgatgaagacggagcggccccggcccaacaccttcatcatccgctgcctgcagtggaccactgtcatcgaacgcaccttccatgtggagactcctgaggagcgggaggagtggacaaccgccatccagactgtggctgacggcctcaagaagcaggaggaggaggagatggacttccggtcgggctcacccagtgacaactcaggggctgaagagatggaggtgtccctggccaagcccaagcaccgcgtgaccatgaacgagtttgagtacctgaagctgctgggcaagggcactttcggcaaggtgatcctggtgaaggagaaggccacaggccgctactacgccatgaagatcctcaagaaggaagtcatcgtggccaaggacgaggtggcccacacactcaccgagaaccgcgtcctgcagaactccaggcaccccttcctcacagccctgaagtactctttccagacccacgaccgcctctgctttgtcatggagtacgccaacgggggcgagctgttcttccacctgtcccgggagcgtgtgttctccgaggaccgggcccgcttctatggcgctgagattgtgtcagccctggactacctgcactcggagaagaacgtggtgtaccgggacctcaagctggagaacctcatgctggacaaggacgggcacattaagatcacagacttcgggctgtgcaaggaggggatcaaggacggtgccaccatgaagaccttttgcggcacacctgagtacctggcccccgaggtgctggaggacaatgactacggccgtgcagtggactggtgggggctgggcgtggtcatgtacgagatgatgtgcggtcgcctgcccttctacaaccaggaccatgagaagctttttgagctcatcctcatggaggagatccgcttcccgcgcacgcttggtcccgaggccaagtccttgctttcagggctgctcaagaaggaccccaagcagaggcttggcgggggctccgaggacgccaaggagatcatgcagcatcgcttctttgccggtatcgtgtggcagcacgtgtacgagaagaagctcagcccacccttcaagccccaggtcacgtcggagactgacaccaggtattttgatgaggagttcacggcccagatgatcaccatcacaccacctgaccaagttcttggtgactgtcccaccgggagcctccccctcagatgatctctccacggtagcacttgaccttttcgacgcttaacctttccgctgtcgccccaggccctccctgactccctgtgggggtggccatccctgggcccctccacgcctcctggccagacgctgccgctgccgctgcaccacggcgtttttttacaacattcaactttagtatttttactattataatataatatggaaccttccctccaaattcttcaataaaagttgcttttcaaa

SEQ ID NO: 327287 - DNA, 2452 bp, Homo sapiens
ctctttgtctccagcgcccagcactgggcctggcaaaacctgagacgcccggtacatgttggccaaatgaatgaaccagattcagaccggcaggggcgctgtggtttaggaggggcctggggtttctcccaggaggtttttgggcttgcgctggagggctctggactcccgtttgcgccagtggcctgcatcctggtcctgtcttcctcatgtttgaatttctttgctttcctagtctggggagcagggaggagccctgtgccctgtcccaggatccatgggtaggaacaccatggacagggagagcaaacggggccatctgtcaccaggggcttagggaaggccgagccagcctgggtcaaagaagtcaaaggggctgcctggaggaggcagcctgtcagctggtgcatcagaggctgtggccaggccagctgggctcggggagcgccagcctgagaggagcgcgtgagcgtcgcgggagcctcgggcaccatgagcgacgtggctattgtgaaggagggttggctgcacaaacgaggggagtacatcaagacctggcggccacgctacttcctcctcaagaatgatggcaccttcattggctacaaggagcggccgcaggatgtggaccaacgtgaggctcccctcaacaacttctctgtggcgcagtgccagctgatgaagacggagcggccccggcccaacaccttcatcatccgctgcctgcagtggaccactgtcatcgaacgcaccttccatgtggagactcctgaggagcgggaggagtggacaaccgccatccagactgtggctgacggcctcaagaagcaggaggaggaggagatggacttccggtcgggctcacccagtgacaactcaggggctgaagagatggaggtgtccctggccaagcccaagcaccgcgtgaccatgaacgagtttgagtacctgaagctgctgggcaagggcactttcggcaaggtgatcctggtgaaggagaaggccacaggccgctactacgccatgaagatcctcaagaaggaagtcatcgtggccaaggacgaggtggcccacacactcaccgagaaccgcgtcctgcagaactccaggcaccccttcctcacagccctgaagtactctttccagacccacgaccgcctctgctttgtcatggagtacgccaacgggggcgagctgttcttccacctgtcccgggagcgtgtgttctccgaggaccgggcccgcttctatggcgctgagattgtgtcagccctggactacctgcactcggagaagaacgtggtgtaccgggacctcaagctggagaacctcatgctggacaaggacgggcacattaagatcacagacttcgggctgtgcaaggaggggatcaaggacggtgccaccatgaagaccttttgcggcacacctgagtacctggcccccgaggtgctggaggacaatgactacggccgtgcagtggactggtgggggctgggcgtggtcatgtacgagatgatgtgcggtcgcctgcccttctacaaccaggaccatgagaagctttttgagctcatcctcatggaggagatccgcttcccgcgcacgcttggtcccgaggccaagtccttgctttcagggctgctcaagaaggaccccaagcagaggcttggcgggggctccgaggacgccaaggagatcatgcagcatcgcttctttgccggtatcgtgtggcagcacgtgtacgagaagaagggaccctaggagccctggccatcaccccagctgatggggtctgccagctgggttcggaagcctgcactctgagatgctgggtgccctgtcaccaggtgtgcttctgccccgttcccagcctgcccctcccctgaatgcctgtcctaggctgtgtgcactggtcgggctgggcagccctgggacccagctgggcacctgttctcccattaacacagggtgccctggtcctggtccccgttcctgccttgaggcctgccaccctcctgccctgccctccaagggtatggggggcctgggcagtgctcaacctctgcccagccttgaccagagaccttgctaattgacaatggacaatgctggtgcccagcccagactctggggtggggcagtgcttgagggggtccttgactgtgggacctgaggggctctctggcagctcctcacgtgtgcacatcaccttatagtcacccttcatcctgggtcattgagagtcctgtctgcagccagatgccagcaggctgtggtcctgtagtccctgagccatggaggcagggtgggctcatcctgtgcaccttgttccacagtctccctctttcccaatttacaagaagaccaataagaaaaataagaaaacaagaaagaaaaaggaaaaataaagttatcacctcctggtagcagggagggtctctcagagctgggc

SEQ ID NO: 327288 - DNA, 969 bp, Homo sapiens
  misc_feature (24)..(24): n is a, c, g, or t
cccaagctacggctaggtacgagnctgggtggcgcatgatctgtatttaatggtttttatttctcgggtgcatttgagagaagccacgctgtcctctcgagcccagatggaaagacgtttttgtgctgtgggcagcaccctcccccgcagcggggtagggaagaaaactatcctgcgggttttaatttatttcatccagtttgttctccgggtgtggcctcagccctcagaacaatccgattcacgtagggaaatgttaaggacttctgcagctatgcgcaatgtggcattggggggccgggcaggtcctgcccatgtgtcccctcactctgtcagccagccgccctgggctgtctgtcaccagctatctgtcatctctctggggccctgggcctcagttcaacctggtggcaccagatgcaacctcactatggtatgctggccagcaccctctcctgggggtggcaggcacacagcagccccccagcactaaggccgtgtctctgaggacgtcatcggaggctgggcccctgggatgggaccagggatgggggatgggccagggtttacccagtgggacagaggagcaaggtttaaatttgttattgtgtattatgttgttcaaatgcattttgggggtttttaatctttgtgacaggaaagccctcccccttccccttctgtgtcacagttcttggtgactgtcccaccgggagcctccccctcagatgatctctccacggtagcacttgaccttttcgacgcttaacctttccgctgtcgccccaggccctccctgactccctgtgggggtggccatccctgggcccctccacgcctcctggccagacgctgccgctgccgctgcaccacggcgtttttttacaacattcaactttagtatttttactattataatataatatggaaccttccctccaaattcttcaataaaagttgcttttcaaa

SEQ ID NO: 327289 - DNA, 1618 bp, Homo sapiens
ctctttgtctccagcgcccagcactgggcctggcaaaacctgagacgcccggtacatgttggccaaatgaatgaaccagattcagaccggcaggggcgctgtggtttaggaggggcctggggtttctcccaggaggtttttgggcttgcgctggagggctctggactcccgtttgcgccagtggcctgcatcctggtcctgtcttcctcatgtttgaatttctttgctttcctagtctggggagcagggaggagccctgtgccctgtcccaggatccatgggtaggaacaccatggacagggagagcaaacggggccatctgtcaccaggggcttagggaaggccgagccagcctgggtcaaagaagtcaaaggggctgcctggaggaggcagcctgtcagctggtgcatcagaggctgtggccaggccagctgggctcggggagcgccagcctgagaggagcgcgtgagcgtcgcgggagcctcgggcaccatgagcgacgtggctattgtgaaggagggttggctgcacaaacgaggggagtacatcaagacctggcggccacgctacttcctcctcaagaatgatggcaccttcattggctacaaggagcggccgcaggatgtggaccaacgtgaggctcccctcaacaacttctctgtggcgcagtgccagctgatgaagacggagcggccccggcccaacaccttcatcatccgctgcctgcagtggaccactgtcatcgaacgcaccttccatgtggagactcctgaggagcgggaggagtggacaaccgccatccagactgtggctgacggcctcaagaagcaggaggaggaggagatggacttccggtcgggctcacccagtgacaactcaggggctgaagagatggaggtgtccctggccaagcccaagcaccgcgtggcaatgtggcattggggggccgggcaggtcctgcccatgtgtcccctcactctgtcagccagccgccctgggctgtctgtcaccagctatctgtcatctctctggggccctgggcctcagttcaacctggtggcaccagatgcaacctcactatggtatgctggccagcaccctctcctgggggtggcaggcacacagcagccccccagcactaaggccgtgtctctgaggacgtcatcggaggctgggcccctgggatgggaccagggatgggggatgggccagggtttacccagtgggacagaggagcaaggtttaaatttgttattgtgtattatgttgttcaaatgcattttgggggtttttaatctttgtgacaggaaagccctcccccttccccttctgtgtcacagttcttggtgactgtcccaccgggagcctccccctcagatgatctctccacggtagcacttgaccttttcgacgcttaacctttccgctgtcgccccaggccctccctgactccctgtgggggtggccatccctgggcccctccacgcctcctggccagacgctgccgctgccgctgcaccacggcgtttttttacaacattcaactttagtatttttactattataatataatatggaaccttccctccaaattcttcaataaaagttgcttttcaaa

SEQ ID NO: 327290 - DNA, 1498 bp, Homo sapiens
ctctttgtctccagcgcccagcactgggcctggcaaaacctgagacgcccggtacatgttggccaaatgaatgaaccagattcagaccggcaggggcgctgtggtttaggaggggcctggggtttctcccaggaggtttttgggcttgcgctggagggctctggactcccgtttgcgccagtggcctgcatcctggtcctgtcttcctcatgtttgaatttctttgctttcctagtctggggagcagggaggagccctgtgccctgtcccaggatccatgggtaggaacaccatggacagggagagcaaacggggccatctgtcaccaggggcttagggaaggccgagccagcctgggtcaaagaagtcaaaggggctgcctggaggaggcagcctgtcagctggtgcatcagaggctgtggccaggccagctgggctcggggagcgccagcctgagaggagcgcgtgagcgtcgcgggagcctcgggcaccatgagcgacgtggctattgtgaaggagggttggctgcacaaacgaggggagtacatcaagacctggcggccacgctacttcctcctcaagaatgatggcaccttcattggctacaaggagcggccgcaggatgtggaccaacgtgaggctcccctcaacaacttctctgtggcgcagtgccagctgatgaagacggagcggccccggcccaacaccttcatcatccgctgcctgcagtggaccactgtcatcgaacgcaccttccatgtggagactcctgaggagcgggaggagtggacaaccgccatccagactgtggctgacggcctcaagaagcaggaggaggaggagatggacttccggtcgggctcacccagtgacaactcaggggctgaagagatggaggtgtccctggccaagcccaagcaccgcgtgaccatgaacgagtttgagtacctgaagctgctgggcaagggcactttcggcaaggtgatcctggtgaaggagaaggccacaggccgctactacgccatgaagatcctcaagaaggaagtcatcgtggccaaggacgaggtggcccacacactcaccgagaaccgcgtcctgcagaactccaggcaccccttcctcacagccctgaagtactctttccagacccacgaccgcctctgctttgtcatggagtacgccaacgggggcgagctgttcttccacctgtcccgggagcgtgtgttctccgaggaccgggcccgcttctatggcgctgagattgtgtcagccctggactacctgcactcggagaagaacgtggtgtaccgggacctcaagcggagaacccatgctggacaggcggcctttaatccgactcggctggcggggggtaggacaggcccgaaattgggacgaatcggccggtgcgaaacaggcacacggggcgggtacaaaatggccccaagcaaaaagacagagaacccaacgatttgaaaccggaccactggcaccccac

SEQ ID NO: 327291 - DNA, 682 bp, Homo sapiens
ggcagtgctctgagggcccaggtccctgtgtcaatctgtggggccctgtctcagtttcctggcagtatggcagcgtgctggccgtgctttaagaggttggcttcctactggagctgtgggtgggtggaggtggcagggaggtggggcaccggggtctgagctgtctacacccacagatgacagcatggagtgtgtggacagcgagcgcaggccccacttcccccagttctcctactcggccagcggcacggcctgaggcggcggtggactgcgctggacgatagcttggagggatggagaggcggcctcgtgccatgatctgtatttaatggtttttatttctcgggtgcatttgagagaagccacgctgtcctctcgagcccagatggaaagacgtttttgtgctgtgggcagcaccctcccccgcagcggggtagggaagaaaactatcctgcgggttttaatttatttcatccagtttgttctccgggtgtggcctcagccctcagaacaatccgattcacgtagggaaatgttaaggacttctgcagctatgcgcaatgtggcattggggggccgggcaggtcctgcccatgtgtcccctcactctgtcagccagccgccctgggctgtctgtcaccagctatctgtcatctctctggggccctgggcctcagttcaa

SEQ ID NO: 327292 - DNA, 1907 bp, Homo sapiens
  misc_feature (1)..(3): n is a, c, g, or t
  misc_feature (21)..(21): n is a, c, g, or t
nnnggatagatacggtgttantagatgttggctgaagctggggtaaaacagtcctcagtcctctgggcctttctgaggtcagggcttagcaccatgtgcgcttcctaatgagccaggcttactgggtttaaattgtttccttgatcaccataaaaagaattataaattttatagaatgggtgcttttattcaaacatgtttagagatgtggatattttggaaataattagaaatcaaaacatgccataaaacttctgttggctgaagagctatacataaaggataataggtgggtattttgcaagcaactgaactgggatcataaaataacaagtataactcttgcatggctagtaagttattatcactcagtttcaaacgcctagtcaagacattgagacagactagtggggaaagctgcatgatctctacactgtgcctctttagccgggcagcttgccctccagcttgagagtgagccccggtgttgactttgctgatttgtgcagtggcaggcctgcatgcaggtagcacttgcagtacttgggtctagctgctcttccactcccagcacctctgagatattttcagcaccagctgtgtgtcatttctagttactgagctttgtgtttctggagaggattttccacagatactgatgctgatttctctttctacccctctttctctcctcctttgcctctcccttcagtcggcagcacctcttcctcaccagcactgttaggaatcagagaccctcgctctgaatacgataggacccagccacctatgcagtattacaatagccaaggggatgccacacataaaggcctgtaccctggtaagacgccagttgggtgtgtgatacagtctcttgaaaagccgcatttccaggcgcttggccagtggcctgggaagtagcctgtgcttgtattgagacagtcccccagcagcaaaccatgttccagtcattccctttcctactttggggattgttgccttttctgcttgtttaaagtaaaacaagcatgtacttgtttgtatgtatgtatgtatgtagttgtacggtgggcacaaataaaaagagggctgtatccaaataaatcatttctggctgctcactggcacagtccctttgctccgtcccctcctggctcgagcagtctctgtgttttccacatgcatcagaaccgtcagcccagtgtcactttgcaggggccacatcttctagactggctcatctcttaaattcaaaccagagaatggagatcaatttcatttacattttcatggagaagagtttgaataaatagcaaaaggtataatgtgattcttctcaacgtgattattttttaagaataacaaaaataatgttacatagtgttaatatttttatatcctattcagaaagctgtgcatacaatttatttaaaggataccagcccaaagggttactaagatttcatactgttcccattctcaaccgtctggcgattataactactttagatgttccaaataagtcagtgtgagctaccccacaaaaagtactcttttctcaaacctgtctattaaaaataaataaaagctggtggcagctttactcctgctgggggggcagtctccattgtactgttgtctttgaaattgtgatttcacaggactatttactaatcgactgttgttactatggcaattaatagctcagaaaattgcagatgctacatttcaacaccaagctctgggcaaaaggaaatgcacataccaactgaagtgcatggttgcttccgatttgcagcagcctgctttatcttacagatcacctctttagcatgcatgcccttctgtatcttcttcgcttgcttcaataaactaatttgcctcaactacgtttcattttcctcatt

SEQ ID NO: 327293 - DNA, 5054 bp, Homo sapiens
ggccgggcgggagggctggcagcggggcgggcggcggcggcggcctctgggcagtagagggggctccggggctgagtccgcgtcgacgccggccgcggaggcggcaccatgggcaaggggtagaggggcaagttggccaccgccgccgccgggggtggtgggagagccgctccgggggcgggggccggtgggggagggaggggcgggcagccgcgccgccgcggcacttttttaattttttcgggtgccgcagcggcgacccctcggcgccgatgtccctgatccctggagcgacgacggccgctgcctaagctggaaagaggaatgccagctcctgagcaggcctcattggtggaggaggggcaaccacagacccgccaggaagctgcctccactggcccaggcatggaacccgagaccacagccaccactattctagcatccgtgaaggagcaggagcttcagtttcagcgactcacccgagaactggaagtggaaaggcagattgttgccagtcagctagaaagatgtaggcttggagcagaatcaccaagcatcgccagcaccagctcaactgagaagtcatttccttggagatcaacagacgtgccaaatactggtgtaagcaaacctagagtttctgacgctgtccagcccaacaactatctcatcaggacagagccagaacaaggaaccctctattcaccagaacagacatctctccatgaaagtgagggatcattgggtaactcaagaagttcaacacaaatgaattcttattccgacagtggataccaggaagcagggagtttccacaacagccagaacgtgagcaaggcagacaacagacagcagcattcattcataggatcaactaacaaccatgtggtgaggaattcaagagctgaaggacaaacactggttcagccatcagtagccaatcgggccatgagaagagttagttcagttccatctagagcacagtctccttcttatgttatcagcacaggcgtgtctccttcaagggggtctctgagaacttctctgggtagtggatttggctctccgtcagtgaccgacccccgacctctgaaccccagtgcatattcctccaccacattacctgctgcacgggcagcctctccgtactcacagagacccgcctccccaacagctatacggcggattgggtcagtcacctcccggcagacctccaatcccaacggaccaacccctcaataccaaaccaccgccagagtggggtccccactgaccctgacggatgcacagactcgagtagcttccccatcccaaggccaggtggggtcgtcgtcccccaaacgctcagggatgaccgccgtaccacagcatctgggaccttcactgcaaaggactgttcatgacatggagcaattcggacagcagcagtatgacatttatgagaggatggttccacccaggccagacagcctgacaggcttacggagttcctatgctagtcagcatagtcagcttgggcaagaccttcgttctgccgtgtctcccgacttgcacattactcctatatatgaggggaggacctattacagcccagtgtaccgcagcccaaaccatggaactgtggagctccaaggatcgcagacggcgttgtatcgcacaggttcaggtattggaaatctacaaaggacatccagccaacgaagtacccttacataccaaagaaataattatgctctgaacacaacagctacctacgcggagccctacaggcctatacaataccgagtgcaagagtgcaattataacaggcttcagcatgcagtgccggctgatgatggcaccacaagatccccatcaatagacagcattcagaaggaccccagggagtttgcctggcgtgatcctgagttgcctgaggtcattcacatgcttcagcaccagttcccatctgttcaggcaaatgcagcggcctacctgcagcacctgtgctttggtgacaacaaagtgaagatggaggtgtgtaggttagggggaatcaagcatctggttgaccttctggaccacagagttttggaagttcagaagaatgcttgtggtgcccttcgaaacctcgtttttggcaagtctacagatgaaaataaaatagcaatgaagaatgttggtgggatacctgccttgttgcgactgttgagaaaatctattgatgcagaagtaagggagcttgttacaggagttctttggaatttatcctcatgtgatgctgtaaaaatgacaatcattcgagatgctctctcaaccttaacaaacactgtgattgttccacattctggatggaataactcttcttttgatgatgatcataaaattaaatttcagacttcactagttctgcgtaacacgacaggttgcctaaggaacctcagctccgcgggggaagaagctcggaagcaaatgcggtcctgcgaggggctggtagactcactgttgtatgtgatccacacgtgtgtgaacacatccgattacgacagcaagacggtggagaactgcgtgtgcaccctgaggaacctgtcctatcggctggagctggaggtgccccaggcccggttactgggactgaacgaattggatgacttactaggaaaagagtctcccagcaaagactctgagccaagttgctgggggaagaagaagaaaaagaaaaagaggactccgcaagaagatcaatgggatggagttggtcctatcccaggactgtcgaagtcccccaaaggggttgagatgctgtggcacccatcggtggtaaaaccatatctgactcttctagcagaaagttccaacccagccaccttggaaggctctgcagggtctctccagaacctctctgctggcaactggaagtttgcagcatatatccgggcggccgtccgaaaagaaaaggggctccccatccttgtggagcttctgagaatggataacgatagagttgtttcttccgtggcaacagccttgaggaatatggcactagatgttcgcaacaaggagctcataggcaaatacgccatgcgagacctggtcaaccggctccccggcggcaatggccccagtgtcttgtctgatgagaccatggcagccatctgctgtgctctgcacgaggtcaccagcaaaaacatggagaacgcaaaagccctggccgactcaggaggcatagagaagctggtgaacataaccaaaggcaggggcgacagatcatctctgaaagtggtgaaggcagcagcccaggtcttgaatacattatggcaatatcgggacctccggagcatttataaaaaggatgggtggaatcagaaccattttattacacctgtgtcgacattggagcgagaccgattcaaatcacatccttccttgtctaccaccaaccaacagatgtcacccatcattcagtcagtcggcagcacctcttcctcaccagcactgttaggaatcagagaccctcgctctgaatacgataggacccagccacctatgcagtattacaatagccaaggggatgccacacataaaggcctgtaccctggctccagcaaaccttcaccaatttacatcagttcctattcctcaccagcaagagaacaaaatagacggctacagcatcaacagctgtattatagtcaagatgactccaacagaaagaactttgatgcatacagattgtatttgcagtctcctcatagctatgaagatccttattttgatgaccgagttcactttccagcttctactgattactcaacacagtatggactgaaatcgaccacaaattatgtagacttttattccactaaacgaccttcttatagagcagaacagtacccagggtccccagactcatgggtgtagcatcaagatgcccaacagaggaactctttctttctaaccttgttcagattgaggtgaaaagtccatcttgctgatttgatgattgaaatgtgaaagtgaagtggaaggaatgaatgaagtgtgttttttttttcttttttgaggaattatcagggaagtgaggaaatgtttgggagaggactttctaagctctatttaggtgttagatctaattacttatagattctgtagtctggtgaaggtgtgggtgacgtgatgagaggtttgagaaatgggtgaaatgaaatgggggatatgtaggtcaaatcaaattaaagatgatttttttaatgtgaataaagttatgttctgatagtttgtacagaaaaaataaaatggatgcccatgttttattgctattactaaatgtcaagattgtatgctattatgtcttgtaaatttcttttgttggtgtaaatatggaaatgccacattggttaagtgccatcatttgtaatgcaatgtgtcacttgaaaagagatttgaagaaactgacaacttcaaaaacaaatgagaagcccaaggaactgtgagcaattaaaagcaaaccgcgacaccctttgtctccaccacacatagtgtactttggaagcacaacgtccaggctggtaccgcagcgccatgcccattcctcgcctcgttcataggacacttcactgccattttctattcacataaaagaaaaataaatgtggaaatttcatccttggaaatgtgttctctattctttttaaattttctgtatgtatatggaaaagcagatttaataaacacaaatctaactgcatgttggaaacagcttaaatatatccaactattttggacttttcctagttttatatatactttgtgagatggaccacaccaaagaattaagctatgaactttccttctctgacaatctaggtatttttatttcttggaatctatttcaaatctagtacccttcacagttttatcatgtttttctatatggcagcccggccataactaaattgatataactaaattgataccttttttaggcatcatttttaagaactcagtaacttcataagaacagtggttgggcatttatttggttggcaccaatataataaaacaaattctaaatt

SEQ ID NO: 327294 - DNA, 4925 bp, Homo sapiens
ggccgggcgggagggctggcagcggggcgggcggcggcggcggcctctgggcagtagagggggctccggggctgagtccgcgtcgacgccggccgcggaggcggcaccatgggcaaggggtagaggggcaagttggccaccgccgccgccgggggtggtgggagagccgctccgggggcgggggccggtgggggagggaggggcgggcagccgcgccgccgcggcacttttttaattttttcgggtgccgcagcggcgacccctcggcgccgatgtccctgatccctggagcgacgacggccgctgcctaagctggaaagaggaatgccagctcctgagcaggcctcattggtggaggaggggcaaccacagacccgccaggaagctgcctccactggcccaggcatggaacccgagaccacagccaccactattctagcatccgtgaaggagcaggagcttcagtttcagcgactcacccgagaactggaagtggaaaggcagattgttgccagtcagctagaaagatgtaggcttggagcagaatcaccaagcatcgccagcaccagctcaactgagaagtcatttccttggagatcaacagacgtgccaaatactggtgtaagcaaacctagagtttctgacgctgtccagcccaacaactatctcatcaggacagagccagaacaaggaaccctctattcaccagaacagacatctctccatgaaagtgagggatcattgggtaactcaagaagttcaacacaaatgaattcttattccgacagtggataccaggaagcagggagtttccacaacagccagaacgtgagcaaggcagacaacagacagcagcattcattcataggatcaactaacaaccatgtggtgaggaattcaagagctgaaggacaaacactggttcagccatcagtagccaatcgggccatgagaagagttagttcagttccatctagagcacagtctccttcttatgttatcagcacaggcgtgtctccttcaagggggtctctgagaacttctctgggtagtggatttggctctccgtcagtgaccgacccccgacctctgaaccccagtgcatattcctccaccacattacctgctgcacgggcagcctctccgtactcacagagacccgcctccccaacagctatacggcggattgggtcagtcacctcccggcagacctccaatcccaacggaccaacccctcaataccaaaccaccgccagagtggggtccccactgaccctgacggatgcacagactcgagtagcttccccatcccaaggccaggtggggtcgtcgtcccccaaacgctcagggatgaccgccgtaccacagcatctgggaccttcactgcaaaggactgttcatgacatggagcaattcggacagcagcagtatgacatttatgagaggatggttccacccaggccagacagcctgacaggcttacggagttcctatgctagtcagcatagtcagcttgggcaagaccttcgttctgccgtgtctcccgacttgcacattactcctatatatgaggggaggacctattacagcccagtgtaccgcagcccaaaccatggaactgtggagctccaaggatcgcagacggcgttgtatcgcacaggttcaggtattggaaatctacaaaggacatccagccaacgaagtacccttacataccaaagaaataattatgctctgaacacaacagctacctacgcggagccctacaggcctatacaataccgagtgcaagagtgcaattataacaggcttcagcatgcagtgccggctgatgatggcaccacaagatccccatcaatagacagcattcagaaggaccccagggagtttgcctggcgtgatcctgagttgcctgaggtcattcacatgcttcagcaccagttcccatctgttcaggcaaatgcagcggcctacctgcagcacctgtgctttggtgacaacaaagtgaagatggaggtgtgtaggttagggggaatcaagcatctggttgaccttctggaccacagagttttggaagttcagaagaatgcttgtggtgcccttcgaaacctcgtttttggcaagtctacagatgaaaataaaatagcaatgaagaatgttggtgggatacctgccttgttgcgactgttgagaaaatctattgatgcagaagtaagggagcttgttacaggagttctttggaatttatcctcatgtgatgctgtaaaaatgacaatcattcgagatgctctctcaaccttaacaaacactgtgattgttccacattctggatggaataactcttcttttgatgatgatcataaaattaaatttcagacttcactagttctgcgtaacacgacaggttgcctaaggaacctcagctccgcgggggaagaagctcggaagcaaatgcggtcctgcgaggggctggtagactcactgttgtatgtgatccacacgtgtgtgaacacatccgattacgacagcaagacggtggagaactgcgtgtgcaccctgaggaacctgtcctatcggctggagctggaggtgccccaggcccggttactgggactgaacgaattggatgacttactaggaaaagagtctcccagcaaagactctgagccaagttgctgggggaagaagaagaaaaagaaaaagaggactccgcaagaagatcaatgggatggagttggtcctatcccaggactgtcgaagtcccccaaaggggttgagatgctgtggcacccatcggtggtaaaaccatatctgactcttctagcagaaagttccaacccagccaccttggaaggctctgcagggtctctccagaacctctctgctggcaactggaagtttgcagcatatatccgggcggccgtccgaaaagaaaaggggctccccatccttgtggagcttctgagaatggataacgatagagttgtttcttccgtggcaacagccttgaggaatatggcactagatgttcgcaacaaggagctcataggcaaatacgccatgcgagacctggtcaaccggctccccggcggcaatggccccagtgtcttgtctgatgagaccatggcagccatctgctgtgctctgcacgaggtcaccagcaaaaacatggagaacgcaaaagccctggccgactcaggaggcatagagaagctggtgaacataaccaaaggcaggggcgacagatcatctctgaaagtggtgaaggcagcagcccaggtcttgaatacattatggcaatatcgggacctccggagcatttataaaaaggatgggtggaatcagaaccattttattacacctgtgtcgacattggagcgagaccgattcaaatcacatccttccttgtctaccaccaaccaacagatgtcacccatcattcagtcaggctccagcaaaccttcaccaatttacatcagttcctattcctcaccagcaagagaacaaaatagacggctacagcatcaacagctgtattatagtcaagatgactccaacagaaagaactttgatgcatacagattgtatttgcagtctcctcatagctatgaagatccttattttgatgaccgagttcactttccagcttctactgattactcaacacagtatggactgaaatcgaccacaaattatgtagacttttattccactaaacgaccttcttatagagcagaacagtacccagggtccccagactcatgggtgtagcatcaagatgcccaacagaggaactctttctttctaaccttgttcagattgaggtgaaaagtccatcttgctgatttgatgattgaaatgtgaaagtgaagtggaaggaatgaatgaagtgtgttttttttttcttttttgaggaattatcagggaagtgaggaaatgtttgggagaggactttctaagctctatttaggtgttagatctaattacttatagattctgtagtctggtgaaggtgtgggtgacgtgatgagaggtttgagaaatgggtgaaatgaaatgggggatatgtaggtcaaatcaaattaaagatgatttttttaatgtgaataaagttatgttctgatagtttgtacagaaaaaataaaatggatgcccatgttttattgctattactaaatgtcaagattgtatgctattatgtcttgtaaatttcttttgttggtgtaaatatggaaatgccacattggttaagtgccatcatttgtaatgcaatgtgtcacttgaaaagagatttgaagaaactgacaacttcaaaaacaaatgagaagcccaaggaactgtgagcaattaaaagcaaaccgcgacaccctttgtctccaccacacatagtgtactttggaagcacaacgtccaggctggtaccgcagcgccatgcccattcctcgcctcgttcataggacacttcactgccattttctattcacataaaagaaaaataaatgtggaaatttcatccttggaaatgtgttctctattctttttaaattttctgtatgtatatggaaaagcagatttaataaacacaaatctaactgcatgttggaaacagcttaaatatatccaactattttggacttttcctagttttatatatactttgtgagatggaccacaccaaagaattaagctatgaactttccttctctgacaatctaggtatttttatttcttggaatctatttcaaatctagtacccttcacagttttatcatgtttttctatatggcagcccggccataactaaattgatataactaaattgataccttttttaggcatcatttttaagaactcagtaacttcataagaacagtggttgggcatttatttggttggcaccaatataataaaacaaattctaaatt

SEQ ID NO: 327295 - DNA, 5005 bp, Homo sapiens
ggccgggcgggagggctggcagcggggcgggcggcggcggcggcctctgggcagtagagggggctccggggctgagtccgcgtcgacgccggccgcggaggcggcaccatgggcaaggggtagaggggcaagttggccaccgccgccgccgggggtggtgggagagccgctccgggggcgggggccggtgggggagggaggggcgggcagccgcgccgccgcggcacttttttaattttttcgggtgccgcagcggcgacccctcggcgccgatgtccctgatccctggagcgacgacggccgctgcctaagctggaaagaggaatgccagctcctgagcaggcctcattggtggaggaggggcaaccacagacccgccaggaagctgcctccactggcccaggcatggaacccgagaccacagccaccactattctagcatccgtgaaggagcaggagcttcagtttcagcgactcacccgagaactggaagtggaaaggcagattgttgccagtcagctagaaagatgtaggcttggagcagaatcaccaagcatcgccagcaccagctcaactgagaagtcatttccttggagatcaacagacgtgccaaatactggtgtaagcaaacctagagtttctgacgctgtccagcccaacaactatctcatcaggacagagccagaacaaggaaccctctattcaccagaacagacatctctccatgaaagtgagggatcattgggtaactcaagaagttcaacacaaatgaattcttattccgacagtggataccaggaagcagggagtttccacaacagccagaacgtgagcaaggcagacaacagacagcagcattcattcataggatcaactaacaaccatgtggtgaggaattcaagagctgaaggacaaacactggttcagccatcagtagccaatcgggccatgagaagagttagttcagttccatctagagcacagtctccttcttatgttatcagcacaggcgtgtctccttcaagggggtctctgagaacttctctgggtagtggatttggctctccgtcagtgaccgacccccgacctctgaaccccagtgcatattcctccaccacattacctgctgcacgggcagcctctccgtactcacagagacccgcctccccaacagctatacggcggattgggtcagtcacctcccggcagacctccaatcccaacggaccaacccctcaataccaaaccaccgccagagtggggtccccactgaccctgacggatgcacagactcgagtagcttccccatcccaaggccaggtggggtcgtcgtcccccaaacgctcagggatgaccgccgtaccacagcatctgggaccttcactgcaaaggactgttcatgacatggagcaattcggacagcagcagtatgacatttatgagaggatggttccacccaggccagacagcctgacaggcttacggagttcctatgctagtcagcatagtcagcttgggcaagaccttcgttctgccgtgtctcccgacttgcacattactcctatatatgaggggaggacctattacagcccagtgtaccgcagcccaaaccatggaactgtggagctccaaggatcgcagacggcgttgtatcgcacaggttcaggtattggaaatctacaaaggacatccagccaacgaagtacccttacataccaaagaaataattatgctctgaacacaacagctacctacgcggagccctacaggcctatacaataccgagtgcaagagtgcaattataacaggcttcagcatgcagtgccggctgatgatggcaccacaagatccccatcaatagacagcattcagaaggaccccagggagtttgcctggcgtgatcctgagttgcctgaggtcattcacatgcttcagcaccagttcccatctgttcaggcaaatgcagcggcctacctgcagcacctgtgctttggtgacaacaaagtgaagatggaggtgtgtaggttagggggaatcaagcatctggttgaccttctggaccacagagttttggaagttcagaagaatgcttgtggtgcccttcgaaacctcgtttttggcaagtctacagatgaaaataaaatagcaatgaagaatgttggtgggatacctgccttgttgcgactgttgagaaaatctattgatgcagaagtaagggagcttgttacaggagttctttggaatttatcctcatgtgatgctgtaaaaatgacaatcattcgagatgctctctcaaccttaacaaacactgtgattgttccacattctggatggaataactcttcttttgatgatgatcataaaattaaatttcagacttcactagttctgcgtaacacgacaggttgcctaaggaacctcagctccgcgggggaagaagctcggaagcaaatgcggtcctgcgaggggctggtagactcactgttgtatgtgatccacacgtgtgtgaacacatccgattacgacagcaagacggtggagaactgcgtgtgcaccctgaggaacctgtcctatcggctggagctggaggtgccccaggcccggttactgggactgaacgaattggatgacttactaggaaaagagtctcccagcaaagactctgagccaagttgctgggggaagaagaagaaaaagaaaaagaggactccgcaagaagatcaatgggatggagttggtcctatcccaggactgtcgaagtcccccaaaggggttgagatgctgtggcacccatcggtggtaaaaccatatctgactcttctagcagaaagttccaacccagccaccttggaaggctctgcagggtctctccagaacctctctgctggcaactggaagtttgcagcatatatccgggcggccgtccgaaaagaaaaggggctccccatccttgtggagcttctgagaatggataacgatagagttgtttcttccgtggcaacagccttgaggaatatggcactagatgttcgcaacaaggagctcataggcaaatacgccatgcgagacctggtcaaccggctccccggcggcaatggccccagtgtcttgtctgatgagaccatggcagccatctgctgtgctctgcacgaggtcaccagcaaaaacatggagaacgcaaaagccctggccgactcaggaggcatagagaagctggtgaacataaccaaaggcaggggcgacagatcatctctgaaagtggtgaaggcagcagcccaggtcttgaatacattatggcaatatcgggacctccggagcatttataaaaaggagaccgattcaaatcacatccttccttgtctaccaccaaccaacagatgtcacccatcattcagtcagtcggcagcacctcttcctcaccagcactgttaggaatcagagaccctcgctctgaatacgataggacccagccacctatgcagtattacaatagccaaggggatgccacacataaaggcctgtaccctggctccagcaaaccttcaccaatttacatcagttcctattcctcaccagcaagagaacaaaatagacggctacagcatcaacagctgtattatagtcaagatgactccaacagaaagaactttgatgcatacagattgtatttgcagtctcctcatagctatgaagatccttattttgatgaccgagttcactttccagcttctactgattactcaacacagtatggactgaaatcgaccacaaattatgtagacttttattccactaaacgaccttcttatagagcagaacagtacccagggtccccagactcatgggtgtagcatcaagatgcccaacagaggaactctttctttctaaccttgttcagattgaggtgaaaagtccatcttgctgatttgatgattgaaatgtgaaagtgaagtggaaggaatgaatgaagtgtgttttttttttcttttttgaggaattatcagggaagtgaggaaatgtttgggagaggactttctaagctctatttaggtgttagatctaattacttatagattctgtagtctggtgaaggtgtgggtgacgtgatgagaggtttgagaaatgggtgaaatgaaatgggggatatgtaggtcaaatcaaattaaagatgatttttttaatgtgaataaagttatgttctgatagtttgtacagaaaaaataaaatggatgcccatgttttattgctattactaaatgtcaagattgtatgctattatgtcttgtaaatttcttttgttggtgtaaatatggaaatgccacattggttaagtgccatcatttgtaatgcaatgtgtcacttgaaaagagatttgaagaaactgacaacttcaaaaacaaatgagaagcccaaggaactgtgagcaattaaaagcaaaccgcgacaccctttgtctccaccacacatagtgtactttggaagcacaacgtccaggctggtaccgcagcgccatgcccattcctcgcctcgttcataggacacttcactgccattttctattcacataaaagaaaaataaatgtggaaatttcatccttggaaatgtgttctctattctttttaaattttctgtatgtatatggaaaagcagatttaataaacacaaatctaactgcatgttggaaacagcttaaatatatccaactattttggacttttcctagttttatatatactttgtgagatggaccacaccaaagaattaagctatgaactttccttctctgacaatctaggtatttttatttcttggaatctatttcaaatctagtacccttcacagttttatcatgtttttctatatggcagcccggccataactaaattgatataactaaattgataccttttttaggcatcatttttaagaactcagtaacttcataagaacagtggttgggcatttatttggttggcaccaatataataaaacaaattctaaatt

SEQ ID NO: 327296 - DNA, 4851 bp, Homo sapiens
ggccgggcgggagggctggcagcggggcgggcggcggcggcggcctctgggcagtagagggggctccggggctgagtccgcgtcgacgccggccgcggaggcggcaccatgggcaaggggtagaggggcaagttggccaccgccgccgccgggggtggtgggagagccgctccgggggcgggggccggtgggggagggaggggcgggcagccgcgccgccgcggcacttttttaattttttcgggtgccgcagcggcgacccctcggcgccgatgtccctgatccctggagcgacgacggccgctgcctaagctggaaagaggaatgccagctcctgagcaggcctcattggtggaggaggggcaaccacagacccgccaggaagctgcctccactggcccaggcatggaacccgagaccacagccaccactattctagcatccgtgaaggagcaggagcttcagtttcagcgactcacccgagaactggaagtggaaaggcagattgttgccagtcagctagaaagatgtaggcttggagcagaatcaccaagcatcgccagcaccagctcaactgagaagtcatttccttggagatcaacagacgtgccaaatactggtgtaagcaaacctagagtttctgacgctgtccagcccaacaactatctcatcaggacagagccagaacaaggaaccctctattcaccagaacagacatctctccatgaaagtgagggatcattgggtaactcaagaagttcaacacaaatgaattcttattccgacagtggataccaggaagcagggagtttccacaacagccagaacgtgagcaaggcagacaacagacagcagcattcattcataggatcaactaacaaccatgtggtgaggaattcaagagctgaaggacaaacactggttcagccatcagtagccaatcgggccatgagaagagttagttcagttccatctagagcacagtctccttcttatgttatcagcacaggcgtgtctccttcaagggggtctctgagaacttctctgggtagtggatttggctctccgtcagtgaccgacccccgacctctgaaccccagtgcatattcctccaccacattacctgctgcacgggcagcctctccgtactcacagagacccgcctccccaacagctatacggcggattgggtcagtcacctcccggcagacctccaatcccaacggaccaacccctcaataccaaaccaccgccagagtggggtccccactgaccctgacggatgcacagactcgagtagcttccccatcccaaggccaggtggggtcgtcgtcccccaaacgctcagggatgaccgccgtaccacagcatctgggaccttcactgcaaaggactgttcatgacatggagcaattcggacagcagcagtatgacatttatgagaggatggttccacccaggccagacagcctgacaggcttacggagttcctatgctagtcagcatagtcagcttgggcaagaccttcgttctgccgtgtctcccgacttgcacattactcctatatatgaggggaggacctattacagcccagtgtaccgcagcccaaaccatggaactgtggagctccaaggatcgcagacggcgttgtatcgcacaggttcaggtattggaaatctacaaaggacatccagccaacgaagtacccttacataccaaagaaataattatgctctgaacacaacagctacctacgcggagccctacaggcctatacaataccgagtgcaagagtgcaattataacaggcttcagcatgcagtgccggctgatgatggcaccacaagatccccatcaatagacagcattcagaaggaccccagggagtttgcctggcgtgatcctgagttgcctgaggtcattcacatgcttcagcaccagttcccatctgttcaggcaaatgcagcggcctacctgcagcacctgtgctttggtgacaacaaagtgaagatggaggtgtgtaggttagggggaatcaagcatctggttgaccttctggaccacagagttttggaagttcagaagaatgcttgtggtgcccttcgaaacctcgtttttggcaagtctacagatgaaaataaaatagcaatgaagaatgttggtgggatacctgccttgttgcgactgttgagaaaatctattgatgcagaagtaagggagcttgttacaggagttctttggaatttatcctcatgtgatgctgtaaaaatgacaatcattcgagatgctctctcaaccttaacaaacactgtgattgttccacattctggatggaataactcttcttttgatgatgatcataaaattaaatttcagacttcactagttctgcgtaacacgacaggttgcctaaggaacctcagctccgcgggggaagaagctcggaagcaaatgcggtcctgcgaggggctggtagactcactgttgtatgtgatccacacgtgtgtgaacacatccgattacgacagcaagacggtggagaactgcgtgtgcaccctgaggaacctgtcctatcggctggagctggaggtgccccaggcccggttactgggactgaacgaattggatgacttactaggaaaagagtctcccagcaaagactctgagccaagttgctgggggaagaagaagaaaaagaaaaagaggactccgcaagaagatcaatgggatggagttggtcctatcccaggactgtcgaagtcccccaaaggggttgagatgctgtggcacccatcggtggtaaaaccatatctgactcttctagcagaaagttccaacccagccaccttggaaggctctgcagggtctctccagaacctctctgctggcaactggaagtttgcagcatatatccgggcggccgtccgaaaagaaaaggggctccccatccttgtggagcttctgagaatggataacgatagagttgtttcttccgtggcaacagccttgaggaatatggcactagatgttcgcaacaaggagctcataggcaaatacgccatgcgagacctggtcaaccggctccccggcggcaatggccccagtgtcttgtctgatgagaccatggcagccatctgctgtgctctgcacgaggtcaccagcaaaaacatggagaacgcaaaagccctggccgactcaggaggcatagagaagctggtgaacataaccaaaggcaggggcgacagatcatctctgaaagtggtgaaggcagcagcccaggtcttgaatacattatggcaatatcgggacctccggagcatttataaaaaggatgggtggaatcagaaccattttattacacctgtgtcgacattggagcgagaccgattcaaatcacatccttccttgtctaccaccaaccaacagatgtcacccatcattcagtcagcatcaacagctgtattatagtcaagatgactccaacagaaagaactttgatgcatacagattgtatttgcagtctcctcatagctatgaagatccttattttgatgaccgagttcactttccagcttctactgattactcaacacagtatggactgaaatcgaccacaaattatgtagacttttattccactaaacgaccttcttatagagcagaacagtacccagggtccccagactcatgggtgtagcatcaagatgcccaacagaggaactctttctttctaaccttgttcagattgaggtgaaaagtccatcttgctgatttgatgattgaaatgtgaaagtgaagtggaaggaatgaatgaagtgtgttttttttttcttttttgaggaattatcagggaagtgaggaaatgtttgggagaggactttctaagctctatttaggtgttagatctaattacttatagattctgtagtctggtgaaggtgtgggtgacgtgatgagaggtttgagaaatgggtgaaatgaaatgggggatatgtaggtcaaatcaaattaaagatgatttttttaatgtgaataaagttatgttctgatagtttgtacagaaaaaataaaatggatgcccatgttttattgctattactaaatgtcaagattgtatgctattatgtcttgtaaatttcttttgttggtgtaaatatggaaatgccacattggttaagtgccatcatttgtaatgcaatgtgtcacttgaaaagagatttgaagaaactgacaacttcaaaaacaaatgagaagcccaaggaactgtgagcaattaaaagcaaaccgcgacaccctttgtctccaccacacatagtgtactttggaagcacaacgtccaggctggtaccgcagcgccatgcccattcctcgcctcgttcataggacacttcactgccattttctattcacataaaagaaaaataaatgtggaaatttcatccttggaaatgtgttctctattctttttaaattttctgtatgtatatggaaaagcagatttaataaacacaaatctaactgcatgttggaaacagcttaaatatatccaactattttggacttttcctagttttatatatactttgtgagatggaccacaccaaagaattaagctatgaactttccttctctgacaatctaggtatttttatttcttggaatctatttcaaatctagtacccttcacagttttatcatgtttttctatatggcagcccggccataactaaattgatataactaaattgataccttttttaggcatcatttttaagaactcagtaacttcataagaacagtggttgggcatttatttggttggcaccaatataataaaacaaattctaaatt

SEQ ID NO: 327297 - DNA, 3451 bp, Homo sapiens
aaacatacatacacagatacacacacgctcacacacacagggagacatacacacagacacagaaacacacacgctcacacagggagacatacagacacagaaacacacacgctcacacacacagggagacatacagacacagaaacacacacgctcacacacacagggagacatacagacacagaaacacacacgctcacacacacagggagacatccagccaacgaagtacccttacataccaaagaaataattatgctctgaacacaacagctacctacgcggagccctacaggcctatacaataccgagtgcaagagtgcaattataacaggcttcagcatgcagtgccggctgatgatggcaccacaagatccccatcaatagacagcattcagaaggaccccagggagtttgcctggcgtgatcctgagttgcctgaggtcattcacatgcttcagcaccagttcccatctgttcaggcaaatgcagcggcctacctgcagcacctgtgctttggtgacaacaaagtgaagatggaggtgtgtaggttagggggaatcaagcatctggttgaccttctggaccacagagttttggaagttcagaagaatgcttgtggtgcccttcgaaacctcgtttttggcaagtctacagatgaaaataaaatagcaatgaagaatgttggtgggatacctgccttgttgcgactgttgagaaaatctattgatgcagaagtaagggagcttgttacaggagttctttggaatttatcctcatgtgatgctgtaaaaatgacaatcattcgagatgctctctcaaccttaacaaacactgtgattgttccacattctggatggaataactcttcttttgatgatgatcataaaattaaatttcagacttcactagttctgcgtaacacgacaggttgcctaaggaacctcagctccgcgggggaagaagctcggaagcaaatgcggtcctgcgaggggctggtagactcactgttgtatgtgatccacacgtgtgtgaacacatccgattacgacagcaagacggtggagaactgcgtgtgcaccctgaggaacctgtcctatcggctggagctggaggtgccccaggcccggttactgggactgaacgaattggatgacttactaggaaaagagtctcccagcaaagactctgagccaagttgctgggggaagaagaagaaaaagaaaaagaggactccgcaagaagatcaatgggatggagttggtcctatcccaggactgtcgaagtcccccaaaggggttgagatgctgtggcacccatcggtggtaaaaccatatctgactcttctagcagaaagttccaacccagccaccttggaaggctctgcagggtctctccagaacctctctgctggcaactggaagtttgcagcatatatccgggcggccgtccgaaaagaaaaggggctccccatccttgtggagcttctgagaatggataacgatagagttgtttcttccgtggcaacagccttgaggaatatggcactagatgttcgcaacaaggagctcataggcaaatacgccatgcgagacctggtcaaccggctccccggcggcaatggccccagtgtcttgtctgatgagaccatggcagccatctgctgtgctctgcacgaggtcaccagcaaaaacatggagaacgcaaaagccctggccgactcaggaggcatagagaagctggtgaacataaccaaaggcaggggcgacagatcatctctgaaagtggtgaaggcagcagcccaggtcttgaatacattatggcaatatcgggacctccggagcatttataaaaaggatgggtggaatcagaaccattttattacacctgtgtcgacattggagcgagaccgattcaaatcacatccttccttgtctaccaccaaccaacagatgtcacccatcattcagtcaggctccagcaaaccttcaccaatttacatcagttcctattcctcaccagcaagagaacaaaatagacggctacagcatcaacagctgtattatagtcaagatgactccaacagaaagaactttgatgcatacagattgtatttgcagtctcctcatagctatgaagatccttattttgatgaccgagttcactttccagcttctactgattactcaacacagtatggactgaaatcgaccacaaattatgtagacttttattccactaaacgaccttcttatagagcagaacagtacccagggtccccagactcatgggtgtagcatcaagatgcccaacagaggaactctttctttctaaccttgttcagattgaggtgaaaagtccatcttgctgatttgatgattgaaatgtgaaagtgaagtggaaggaatgaatgaagtgtgttttttttttcttttttgaggaattatcagggaagtgaggaaatgtttgggagaggactttctaagctctatttaggtgttagatctaattacttatagattctgtagtctggtgaaggtgtgggtgacgtgatgagaggtttgagaaatgggtgaaatgaaatgggggatatgtaggtcaaatcaaattaaagatgatttttttaatgtgaataaagttatgttctgatagtttgtacagaaaaaataaaatggatgcccatgttttattgctattactaaatgtcaagattgtatgctattatgtcttgtaaatttcttttgttggtgtaaatatggaaatgccacattggttaagtgccatcatttgtaatgcaatgtgtcacttgaaaagagatttgaagaaactgacaacttcaaaaacaaatgagaagcccaaggaactgtgagcaattaaaagcaaaccgcgacaccctttgtctccaccacacatagtgtactttggaagcacaacgtccaggctggtaccgcagcgccatgcccattcctcgcctcgttcataggacacttcactgccattttctattcacataaaagaaaaataaatgtggaaatttcatccttggaaatgtgttctctattctttttaaattttctgtatgtatatggaaaagcagatttaataaacacaaatctaactgcatgttggaaacagcttaaatatatccaactattttggacttttcctagttttatatatactttgtgagatggaccacaccaaagaattaagctatgaactttccttctctgacaatctaggtatttttatttcttggaatctatttcaaatctagtacccttcacagttttatcatgtttttctatatggcagcccggccataactaaattgatataactaaattgataccttttttaggcatcatttttaagaactcagtaacttcataagaacagtggttgggcatttatttggttggcaccaatataataaaacaaattctaaatt

SEQ ID NO: 327298 - DNA, 2942 bp, Homo sapiens
ttctgactggaggctgcgatgcttgtgacggtgcgtacgtttaacaagcgttcgtgacatctggttgaccttctggaccacagagttttggaagttcagaagaatgcttgtggtgcccttcgaaacctcgtttttggcaagtctacagatgaaaataaaatagcaatgaagaatgttggtgggatacctgccttgttgcgactgttgagaaaatctattgatgcagaagtaagggagcttgttacaggagttctttggaatttatcctcatgtgatgctgtaaaaatgacaatcattcgagatgctctctcaaccttaacaaacactgtgattgttccacattctggatggaataactcttcttttgatgatgatcataaaattaaatttcagacttcactagttctgcgtaacacgacaggttgcctaaggaacctcagctccgcgggggaagaagctcggaagcaaatgcggtcctgcgaggggctggtagactcactgttgtatgtgatccacacgtgtgtgaacacatccgattacgacagcaagacggtggagaactgcgtgtgcaccctgaggaacctgtcctatcggctggagctggaggtgccccaggcccggttactgggactgaacgaattggatgacttactaggaaaagagtctcccagcaaagactctgagccaagttgctgggggaagaagaagaaaaagaaaaagaggactccgcaagaagatcaatgggatggagttggtcctatcccaggactgtcgaagtcccccaaaggggttgagatgctgtggcacccatcggtggtaaaaccatatctgactcttctagcagaaagttccaacccagccaccttggaaggctctgcagggtctctccagaacctctctgctggcaactggaagtttgcagcatatatccgggcggccgtccgaaaagaaaaggggctccccatccttgtggagcttctgagaatggataacgatagagttgtttcttccgtggcaacagccttgaggaatatggcactagatgttcgcaacaaggagctcataggcaaatacgccatgcgagacctggtcaaccggctccccggcggcaatggccccagtgtcttgtctgatgagaccatggcagccatctgctgtgctctgcacgaggtcaccagcaaaaacatggagaacgcaaaagccctggccgactcaggaggcatagagaagctggtgaacataaccaaaggcaggggcgacagatcatctctgaaagtggtgaaggcagcagcccaggtcttgaatacattatggcaatatcgggacctccggagcatttataaaaaggatgggtggaatcagaaccattttattacacctgtgtcgacattggagcgagaccgattcaaatcacatccttccttgtctaccaccaaccaacagatgtcacccatcattcagtcaggctccagcaaaccttcaccaatttacatcagttcctattcctcaccagcaagagaacaaaatagacggctacagcatcaacagctgtattatagtcaagatgactccaacagaaagaactttgatgcatacagattgtatttgcagtctcctcatagctatgaagatccttattttgatgaccgagttcactttccagcttctactgattactcaacacagtatggactgaaatcgaccacaaattatgtagacttttattccactaaacgaccttcttatagagcagaacagtacccagggtccccagactcatgggtgtagcatcaagatgcccaacagaggaactctttctttctaaccttgttcagattgaggtgaaaagtccatcttgctgatttgatgattgaaatgtgaaagtgaagtggaaggaatgaatgaagtgtgttttttttttcttttttgaggaattatcagggaagtgaggaaatgtttgggagaggactttctaagctctatttaggtgttagatctaattacttatagattctgtagtctggtgaaggtgtgggtgacgtgatgagaggtttgagaaatgggtgaaatgaaatgggggatatgtaggtcaaatcaaattaaagatgatttttttaatgtgaataaagttatgttctgatagtttgtacagaaaaaataaaatggatgcccatgttttattgctattactaaatgtcaagattgtatgctattatgtcttgtaaatttcttttgttggtgtaaatatggaaatgccacattggttaagtgccatcatttgtaatgcaatgtgtcacttgaaaagagatttgaagaaactgacaacttcaaaaacaaatgagaagcccaaggaactgtgagcaattaaaagcaaaccgcgacaccctttgtctccaccacacatagtgtactttggaagcacaacgtccaggctggtaccgcagcgccatgcccattcctcgcctcgttcataggacacttcactgccattttctattcacataaaagaaaaataaatgtggaaatttcatccttggaaatgtgttctctattctttttaaattttctgtatgtatatggaaaagcagatttaataaacacaaatctaactgcatgttggaaacagcttaaatatatccaactattttggacttttcctagttttatatatactttgtgagatggaccacaccaaagaattaagctatgaactttccttctctgacaatctaggtatttttatttcttggaatctatttcaaatctagtacccttcacagttttatcatgtttttctatatggcagcccggccataactaaattgatataactaaattgataccttttttaggcatcatttttaagaactcagtaacttcataagaacagtggttgggcatttatttggttggcaccaatataataaaacaaattctaaatt

SEQ ID NO: 327299 - DNA, 4643 bp, Homo sapiens
ggccgggcgggagggctggcagcggggcgggcggcggcggcggcctctgggcagtagagggggctccggggctgagtccgcgtcgacgccggccgcggaggcggcaccatgggcaaggggtagaggggcaagttggccaccgccgccgccgggggtggtgggagagccgctccgggggcgggggccggtgggggagggaggggcgggcagccgcgccgccgcggcacttttttaattttttcgggtgccgcagcggcgacccctcggcgccgatgtccctgatccctggagcgacgacggccgctgcctaagctggaaagaggaatgccagctcctgagcaggcctcattggtggaggaggggcaaccacagacccgccaggaagctgcctccactggcccaggcatggaacccgagaccacagccaccactattctagcatccgtgaaggagcaggagcttcagtttcagcgactcacccgagaactggaagtggaaaggcagattgttgccagtcagctagaaagatgtaggcttggagcagaatcaccaagcatcgccagcaccagctcaactgagaagtcatttccttggagatcaacagacgtgccaaatactggtgtaagcaaacctagagtttctgacgctgtccagcccaacaactatctcatcaggacagagccagaacaaggaaccctctattcaccagaacagacatctctccatgaaagtgagggatcattgggtaactcaagaagttcaacacaaatgaattcttattccgacagtggataccaggaagcagggagtttccacaacagccagaacgtgagcaaggcagacaacagacagcagcattcattcataggatcaactaacaaccatgtggtgaggaattcaagagctgaaggacaaacactggttcagccatcagtagccaatcgggccatgagaagagttagttcagttccatctagagcacagtctccttcttatgttatcagcacaggcgtgtctccttcaagggggtctctgagaacttctctgggtagtggatttggctctccgtcagtgaccgacccccgacctctgaaccccagtgcatattcctccaccacattacctgctgcacgggcagcctctccgtactcacagagacccgcctccccaacagctatacggcggattgggtcagtcacctcccggcagacctccaatcccaacggaccaacccctcaataccaaaccaccgccagagtggggtccccactgaccctgacggatgcacagactcgagtagcttccccatcccaaggccaggtggggtcgtcgtcccccaaacgctcagggatgaccgccgtaccacagcatctgggaccttcactgcaaaggactgttcatgacatggagcaattcggacagcagcagtatgacatttatgagaggatggttccacccaggccagacagcctgacaggcttacggagttcctatgctagtcagcatagtcagcttgggcaagaccttcgttctgccgtgtctcccgacttgcacattactcctatatatgaggggaggacctattacagcccagtgtaccgcagcccaaaccatggaactgtggagctccaaggatcgcagacggcgttgtatcgcacaggttcaggtattggaaatctacaaaggacatccagccaacgaagtacccttacataccaaagaaataattatgctctgaacacaacagctacctacgcggagccctacaggcctatacaataccgagtgcaagagtgcaattataacaggcttcagcatgcagtgccggctgatgatggcaccacaagatccccatcaatagacagcattcagaaggaccccagggagtttgcctggcgtgatcctgagttgcctgaggtcattcacatgcttcagcaccagttcccatctgttcaggcaaatgcagcggcctacctgcagcacctgtgctttggtgacaacaaagtgaagatggaggtgtgtaggttagggggaatcaagcatctggttgaccttctggaccacagagttttggaagttcagaagaatgcttgtggtgcccttcgaaacctcgtttttggcaagtctacagatgaaaataaaatagcaatgaagaatgttggtgggatacctgccttgttgcgactgttgagaaaatctattgatgcagaagtaagggagcttgttacaggagttctttggaatttatcctcatgtgatgctgtaaaaatgacaatcattcgagatgctctctcaaccttaacaaacactgtgattgttccacattctggatggaataactcttcttttgatgatgatcataaaattaaatttcagacttcactagttctgcgtaacacgacaggttgcctaaggaacctcagctccgcgggggaagaagctcggaagcaaatgcggtcctgcgaggggctggtagactcactgttgtatgtgatccacacgtgtgtgaacacatccgattacgacagcaagacggtggagaactgcgtgtgcaccctgaggaacctgtcctatcggctggagctggaggtgccccaggcccggttactgggactgaacgaattggatgacttactaggaaaagagtctcccagcaaagactctgagccaagttgctgggggaagaagaagaaaaagaaaaagaggactccgcaagaagatcaatgggatggagttggtcctatcccaggactgtcgaagtcccccaaaggggttgagatgctgtggcacccatcggtggtaaaaccatatctgactcttctagcagaaagttccaacccagccaccttggaaggctctgcagggtctctccagaacctctctgctggcaactggaagtttgcagcatatatccgggcggccgtccgaaaagaaaaggggctccccatccttgtggagcttctgagaatggataacgatagagttgtttcttccgtggcaacagccttgaggaatatggcactagatgttcgcaacaaggagctcataggcaaatacgccatgcgagacctggtcaaccggctccccggcggcaatggccccagtgtcttgtctgatgagaccatggcagccatctgctgtgctctgcacgaggtcaccagcaaaaacatggagaacgcaaaagccctggccgactcaggaggcatagagaagctggtgaacataaccaaaggcaggggcgacagatcatctctgaaagtggtgaaggcagcagcccaggtcttgaatacattatggcaatatcgggacctccggagcatttataaaaaggatgggtggaatcagaaccattttattacacctgtgtcgacattggagcgagaccgattcaaatcacatccttccttgtctaccaccaaccaacagatgtcacccatcattcagtcagtcggcagcacctcttcctcaccagcactgttaggaatcagagaccctcgctctgaatacgataggacccagccacctatgcagtattacaatagccaaggggatgccacacataaaggcctgtaccctggtaagacgccagttgggtgtgtgatacagtctcttgaaaagccgcatttccaggcgcttggccagtggcctgggaagtagcctgtgcttgtattgagacagtcccccagcagcaaaccatgttccagtcattccctttcctactttggggattgttgccttttctgcttgtttaaagtaaaacaagcatgtacttgtttgtatgtatgtatgtatgtagttgtacggtgggcacaaataaaaagagggctgtatccaaataaatcatttctggctgctcactggcacagtccctttgctccgtcccctcctggctcgagcagtctctgtgttttccacatgcatcagaaccgtcagcccagtgtcactttgcaggggccacatcttctagactggctcatctcttaaattcaaaccagagaatggagatcaatttcatttacattttcatggagaagagtttgaataaatagcaaaaggtataatgtgattcttctcaacgtgattattttttaagaataacaaaaataatgttacatagtgttaatatttttatatcctattcagaaagctgtgcatacaatttatttaaaggataccagcccaaagggttactaagatttcatactgttcccattctcaaccgtctggcgattataactactttagatgttccaaataagtcagtgtgagctaccccacaaaaagtactcttttctcaaacctgtctattaaaaataaataaaagctggtggcagctttactcctgctgggggggcagtctccattgtactgttgtctttgaaattgtgatttcacaggactatttactaatcgactgttgttactatggcaattaatagctcagaaaattgcagatgctacatttcaacaccaagctctgggcaaaaggaaatgcacataccaactgaagtgcatggttgcttccgatttgcagcagcctgctttatcttacagatcacctctttagcatgcatgcccttctgtatcttcttcgcttgcttcaataaactaatttgcctcaactacgtttcattttcctcatt

SEQ ID NO: 327300 - DNA, 3781 bp, Homo sapiens
ggccgggcgggagggctggcagcggggcgggcggcggcggcggcctctgggcagtagagggggctccggggctgagtccgcgtcgacgccggccgcggaggcggcaccatgggcaaggggtagaggggcaagttggccaccgccgccgccgggggtggtgggagagccgctccgggggcgggggccggtgggggagggaggggcgggcagccgcgccgccgcggcacttttttaattttttcgggtgccgcagcggcgacccctcggcgccgatgtccctgatccctggagcgacgacggccgctgcctaagctggaaagaggaatgccagctcctgagcaggcctcattggtggaggaggggcaaccacagacccgccaggaagctgcctccactggcccaggcatggaacccgagaccacagccaccactattctagcatccgtgaaggagcaggagcttcagtttcagcgactcacccgagaactggaagtggaaaggcagattgttgccagtcagctagaaagatgtaggcttggagcagaatcaccaagcatcgccagcaccagctcaactgagaagtcatttccttggagatcaacagacgtgccaaatactggtgtaagcaaacctagagtttctgacgctgtccagcccaacaactatctcatcaggacagagccagaacaaggaaccctctattcaccagaacagacatctctccatgaaagtgagggatcattgggtaactcaagaagttcaacacaaatgaattcttattccgacagtggataccaggaagcagggagtttccacaacagccagaacgtgagcaaggcagacaacagacagcagcattcattcataggatcaactaacaaccatgtggtgaggaattcaagagctgaaggacaaacactggttcagccatcagtagccaatcgggccatgagaagagttagttcagttccatctagagcacagtctccttcttatgttatcagcacaggcgtgtctccttcaagggggtctctgagaacttctctgggtagtggatttggctctccgtcagtgaccgacccccgacctctgaaccccagtgcatattcctccaccacattacctgctgcacgggcagcctctccgtactcacagagacccgcctccccaacagctatacggcggattgggtcagtcacctcccggcagacctccaatcccaacggaccaacccctcaataccaaaccaccgccagagtggggtccccactgaccctgacggatgcacagactcgagtagcttccccatcccaaggccaggtggggtcgtcgtcccccaaacgctcagggatgaccgccgtaccacagcatctgggaccttcactgcaaaggactgttcatgacatggagcaattcggacagcagcagtatgacatttatgagaggatggttccacccaggccagacagcctgacaggcttacggagttcctatgctagtcagcatagtcagcttgggcaagaccttcgttctgccgtgtctcccgacttgcacattactcctatatatgaggggaggacctattacagcccagtgtaccgcagcccaaaccatggaactgtggagctccaaggatcgcagacggcgttgtatcgcacaggttcaggtattggaaatctacaaaggacatccagccaacgaagtacccttacataccaaagaaataattatgctctgaacacaacagctacctacgcggagccctacaggcctatacaataccgagtgcaagagtgcaattataacaggcttcagcatgcagtgccggctgatgatggcaccacaagatccccatcaatagacagcattcagaaggaccccagggagtttgcctggcgtgatcctgagttgcctgaggtcattcacatgcttcagcaccagttcccatctgttcaggcaaatgcagcggcctacctgcagcacctgtgctttggtgacaacaaagtgaagatggaggtgtgtaggttagggggaatcaagcatctggttgaccttctggaccacagagttttggaagttcagaagaatgcttgtggtgcccttcgaaacctcgtttttggcaagtctacagatgaaaataaaatagcaatgaagaatgttggtgggatacctgccttgttgcgactgttgagaaaatctattgatgcagaagtaagggagcttgttacaggagttctttggaatttatcctcatgtgatgctgtaaaaatgacaatcattcgagatgctctctcaaccttaacaaacactgtgattgttccacattctggatggaataactcttcttttgatgatgatcataaaattaaatttcagacttcactagttctgcgtaacacgacaggttgcctaaggaacctcagctccgcgggggaagaagctcggaagcaaatgcggtcctgcgaggggctggtagactcactgttgtatgtgatccacacgtgtgtgaacacatccgattacgacagcaagacggtggagaactgcgtgtgcaccctgaggaacctgtcctatcggctggagctggaggtgccccaggcccggttactgggactgaacgaattggatgacttactaggaaaagagtctcccagcaaagactctgagccaagttgctgggggaagaagaagaaaaagaaaaagaggactccgcaagaagatcaatgggatggagttggtcctatcccaggactgtcgaagtcccccaaaggggttgagatgctgtggcacccatcggtggtaaaaccatatctgactcttctagcagaaagttccaacccagccaccttggaaggctctgcagggtctctccagaacctctctgctggcaactggaagtttgcagcatatatccgggcggccgtccgaaaagaaaaggggctccccatccttgtggagcttctgagaatggataacgatagagttgtttcttccgtggcaacagccttgaggaatatggcactagatgttcgcaacaaggagctcataggcaaatacgccatgcgagacctggtcaaccggctccccggcggcaatggccccagtgtcttgtctgatgagaccatggcagccatctgctgtgctctgcacgaggtcaccagcaaaaacatggagaacgcaaaagccctggccgactcaggaggcatagagaagctggtgaacataaccaaaggcaggggcgacagatcatctctgaaagtggtgaaggcagcagcccaggtcttgaatacattatggcaatatcgggacctccggagcatttataaaaaggatgggtggaatcagaaccattttattacacctgtgtcgacattggagcgagaccgattcaaatcacatccttccttgtctaccaccaaccaacagatgtcacccatcattcagtcagtcggcagcacctcttcctcaccagcactgttaggaatcagagaccctcgctctgaatacgataggacccagccacctatgcagtattacaatagccaaggggatgccacacataaaggcctgtaccctgctcagaaaattgcagatgctacatttcaacaccaagctctgggcaaaaggaaatgcacataccaactgaagtgcatggttgcttccgatttgcagcagcctgctttatcttacagatcacctctttagcatgcatgcccttctgtatcttcttcgcttgcttcaataaactaatttgcctcaactacgtttcattttcctcatt

SEQ ID NO: 327301 - DNA, 2799 bp, Homo sapiens
ggaggcagacatgggacttggggatatagttgtccccagggagggagttggggcatctgttgtcacgccaaggatctgcagtagtgagaagtgaggctcaagcatcatgggtgcagtctgcacggcagcagccctgaagagaaacactgggccggagcctcaagcatttcggtcggcatgaagtcaaatcctcagcaggactgagaagggctctgcatcctgtcatctgggtattccacaaacactctagaatcataattctctcttcagattgtttcaagttctcataaataaaaagtagttctttcatatttcccatttatttcctgtctgtagtgttcagtacagaagtgttttgctctaatgtgccgagttgtttttaattatacgccatgctgggtttcagacggtggagaactgcgtgtgcaccctgaggaacctgtcctatcggctggagctggaggtgccccaggcccggttactgggactgaacgaattggatgacttactaggaaaagagtctcccagcaaagactctgagccaagttgctgggggaagaagaagaaaaagaaaaagaggactccgcaagaagatcaatgggatggagttggtcctatcccaggactgtcgaagtcccccaaaggggttgagatgctgtggcacccatcggtggtaaaaccatatctgactcttctagcagaaagttccaacccagccaccttggaaggctctgcagggtctctccagaacctctctgctggcaactggaagtttgcagcatatatccgggcggccgtccgaaaagaaaaggggctccccatccttgtggagcttctgagaatggataacgatagagttgtttcttccgtggcaacagccttgaggaatatggcactagatgttcgcaacaaggagctcataggcaaatacgccatgcgagacctggtcaaccggctccccggcggcaatggccccagtgtcttgtctgatgagaccatggcagccatctgctgtgctctgcacgaggtcaccagcaaaaacatggagaacgcaaaagccctggccgactcaggaggcatagagaagctggtgaacataaccaaaggcaggggcgacagatcatctctgaaagtggtgaaggcagcagcccaggtcttgaatacattatggcaatatcgggacctccggagcatttataaaaaggatgggtggaatcagaaccattttattacacctgtgtcgacattggagcgagaccgattcaaatcacatccttccttgtctaccaccaaccaacagatgtcacccatcattcagtcaggctccagcaaaccttcaccaatttacatcagttcctattcctcaccagcaagagaacaaaatagacggctacagcatcaacagctgtattatagtcaagatgactccaacagaaagaactttgatgcatacagattgtatttgcagtctcctcatagctatgaagatccttattttgatgaccgagttcactttccagcttctactgattactcaacacagtatggactgaaatcgaccacaaattatgtagacttttattccactaaacgaccttcttatagagcagaacagtacccagggtccccagactcatgggtgtagcatcaagatgcccaacagaggaactctttctttctaaccttgttcagattgaggtgaaaagtccatcttgctgatttgatgattgaaatgtgaaagtgaagtggaaggaatgaatgaagtgtgttttttttttcttttttgaggaattatcagggaagtgaggaaatgtttgggagaggactttctaagctctatttaggtgttagatctaattacttatagattctgtagtctggtgaaggtgtgggtgacgtgatgagaggtttgagaaatgggtgaaatgaaatgggggatatgtaggtcaaatcaaattaaagatgatttttttaatgtgaataaagttatgttctgatagtttgtacagaaaaaataaaatggatgcccatgttttattgctattactaaatgtcaagattgtatgctattatgtcttgtaaatttcttttgttggtgtaaatatggaaatgccacattggttaagtgccatcatttgtaatgcaatgtgtcacttgaaaagagatttgaagaaactgacaacttcaaaaacaaatgagaagcccaaggaactgtgagcaattaaaagcaaaccgcgacaccctttgtctccaccacacatagtgtactttggaagcacaacgtccaggctggtaccgcagcgccatgcccattcctcgcctcgttcataggacacttcactgccattttctattcacataaaagaaaaataaatgtggaaatttcatccttggaaatgtgttctctattctttttaaattttctgtatgtatatggaaaagcagatttaataaacacaaatctaactgcatgttggaaacagcttaaatatatccaactattttggacttttcctagttttatatatactttgtgagatggaccacaccaaagaattaagctatgaactttccttctctgacaatctaggtatttttatttcttggaatctatttcaaatctagtacccttcacagttttatcatgtttttctatatggcagcccggccataactaaattgatataactaaattgataccttttttaggcatcatttttaagaactcagtaacttcataagaacagtggttgggcatttatttggttggcaccaatataataaaacaaattctaaatt

SEQ ID NO: 327302 - DNA, 3486 bp, Homo sapiens
ggccgggcgggagggctggcagcggggcgggcggcggcggcggcctctgggcagtagagggggctccggggctgagtccgcgtcgacgccggccgcggaggcggcaccatgggcaaggggtagaggggcaagttggccaccgccgccgccgggggtggtgggagagccgctccgggggcgggggccggtgggggagggaggggcgggcagccgcgccgccgcggcacttttttaattttttcgggtgccgcagcggcgacccctcggcgccgatgtccctgatccctggagcgacgacggccgctgcctaagctggaaagaggaatgccagctcctgagcaggcctcattggtggaggaggggcaaccacagacccgccaggaagctgcctccactggcccaggcatggaacccgagaccacagccaccactattctagcatccgtgaaggagcaggagcttcagtttcagcgactcacccgagaactggaagtggaaaggcagattgttgccagtcagctagaaagatgtaggcttggagcagaatcaccaagcatcgccagcaccagctcaactgagaagtcatttccttggagatcaacagacgtgccaaatactggtgtaagcaaacctagagtttctgacgctgtccagcccaacaactatctcatcaggacagagccagaacaaggaaccctctattcaccagaacagacatctctccatgaaagtgagggatcattgggtaactcaagaagttcaacacaaatgaattcttattccgacagtggataccaggaagcagggagtttccacaacagccagaacgtgagcaaggcagacaacagacagcagcattcattcataggatcaactaacaaccatgtggtgaggaattcaagagctgaaggacaaacactggttcagccatcagtagccaatcgggccatgagaagagttagttcagttccatctagagcacagtctccttcttatgttatcagcacaggcgtgtctccttcaagggggtctctgagaacttctctgggtagtggatttggctctccgtcagtgaccgacccccgacctctgaaccccagtgcatattcctccaccacattacctgctgcacgggcagcctctccgtactcacagagacccgcctccccaacagctatacggcggattgggtcagtcacctcccggcagacctccaatcccaacggaccaacccctcaataccaaaccaccgccagagtggggtccccactgaccctgacggatgcacagactcgagtagcttccccatcccaaggccaggtggggtcgtcgtcccccaaacgctcagggatgaccgccgtaccacagcatctgggaccttcactgcaaaggactgttcatgacatggagcaattcggacagcagcagtatgacatttatgagaggatggttccacccaggccagacagcctgacaggcttacggagttcctatgctagtcagcatagtcagcttgggcaagaccttcgttctgccgtgtctcccgacttgcacattactcctatatatgaggaatatggcactagatgttcgcaacaaggagctcataggcaaatacgccatgcgagacctggtcaaccggctccccggcggcaatggccccagtgtcttgtctgatgagaccatggcagccatctgctgtgctctgcacgaggtcaccagcaaaaacatggagaacgcaaaagccctggccgactcaggaggcatagagaagctggtgaacataaccaaaggcaggggcgacagatcatctctgaaagtggtgaaggcagcagcccaggtcttgaatacattatggcaatatcgggacctccggagcatttataaaaaggatgggtggaatcagaaccattttattacacctgtgtcgacattggagcgagaccgattcaaatcacatccttccttgtctaccaccaaccaacagatgtcacccatcattcagtcaggctccagcaaaccttcaccaatttacatcagttcctattcctcaccagcaagagaacaaaatagacggctacagcatcaacagctgtattatagtcaagatgactccaacagaaagaactttgatgcatacagattgtatttgcagtctcctcatagctatgaagatccttattttgatgaccgagttcactttccagcttctactgattactcaacacagtatggactgaaatcgaccacaaattatgtagacttttattccactaaacgaccttcttatagagcagaacagtacccagggtccccagactcatgggtgtagcatcaagatgcccaacagaggaactctttctttctaaccttgttcagattgaggtgaaaagtccatcttgctgatttgatgattgaaatgtgaaagtgaagtggaaggaatgaatgaagtgtgttttttttttcttttttgaggaattatcagggaagtgaggaaatgtttgggagaggactttctaagctctatttaggtgttagatctaattacttatagattctgtagtctggtgaaggtgtgggtgacgtgatgagaggtttgagaaatgggtgaaatgaaatgggggatatgtaggtcaaatcaaattaaagatgatttttttaatgtgaataaagttatgttctgatagtttgtacagaaaaaataaaatggatgcccatgttttattgctattactaaatgtcaagattgtatgctattatgtcttgtaaatttcttttgttggtgtaaatatggaaatgccacattggttaagtgccatcatttgtaatgcaatgtgtcacttgaaaagagatttgaagaaactgacaacttcaaaaacaaatgagaagcccaaggaactgtgagcaattaaaagcaaaccgcgacaccctttgtctccaccacacatagtgtactttggaagcacaacgtccaggctggtaccgcagcgccatgcccattcctcgcctcgttcataggacacttcactgccattttctattcacataaaagaaaaataaatgtggaaatttcatccttggaaatgtgttctctattctttttaaattttctgtatgtatatggaaaagcagatttaataaacacaaatctaactgcatgttggaaacagcttaaatatatccaactattttggacttttcctagttttatatatactttgtgagatggaccacaccaaagaattaagctatgaactttccttctctgacaatctaggtatttttatttcttggaatctatttcaaatctagtacccttcacagttttatcatgtttttctatatggcagcccggccataactaaattgatataactaaattgataccttttttaggcatcatttttaagaactcagtaacttcataagaacagtggttgggcatttatttggttggcaccaatataataaaacaaattctaaatt

SEQ ID NO: 327303 - DNA, 1455 bp, Homo sapiens
tgtggtgatctagaggatccctcaaaacgtatagaacacaatagacggctaccatcaacagctgtattatagtcaagatgactccaacagaaagaactttgatgcatacagattgtatttgcagtctcctcatagctatgaagatccttattttgatgaccgagttcactttccagcttctactgattactcaacacagtatggactgaaatcgaccacaaattatgtagacttttattccactaaacgaccttcttatagagcagaacagtacccagggtccccagactcatgggtgtagcatcaagatgcccaacagaggaactctttctttctaaccttgttcagattgaggtgaaaagtccatcttgctgatttgatgattgaaatgtgaaagtgaagtggaaggaatgaatgaagtgtgttttttttttcttttttgaggaattatcagggaagtgaggaaatgtttgggagaggactttctaagctctatttaggtgttagatctaattacttatagattctgtagtctggtgaaggtgtgggtgacgtgatgagaggtttgagaaatgggtgaaatgaaatgggggatatgtaggtcaaatcaaattaaagatgatttttttaatgtgaataaagttatgttctgatagtttgtacagaaaaaataaaatggatgcccatgttttattgctattactaaatgtcaagattgtatgctattatgtcttgtaaatttcttttgttggtgtaaatatggaaatgccacattggttaagtgccatcatttgtaatgcaatgtgtcacttgaaaagagatttgaagaaactgacaacttcaaaaacaaatgagaagcccaaggaactgtgagcaattaaaagcaaaccgcgacaccctttgtctccaccacacatagtgtactttggaagcacaacgtccaggctggtaccgcagcgccatgcccattcctcgcctcgttcataggacacttcactgccattttctattcacataaaagaaaaataaatgtggaaatttcatccttggaaatgtgttctctattctttttaaattttctgtatgtatatggaaaagcagatttaataaacacaaatctaactgcatgttggaaacagcttaaatatatccaactattttggacttttcctagttttatatatactttgtgagatggaccacaccaaagaattaagctatgaactttccttctctgacaatctaggtatttttatttcttggaatctatttcaaatctagtacccttcacagttttatcatgtttttctatatggcagcccggccataactaaattgatataactaaattgataccttttttaggcatcatttttaagaactcagtaacttcataagaacagtggttgggcatttatttggttggcaccaatataataaaacaaattctaaatt

SEQ ID NO: 327304 - DNA, 1192 bp, Homo sapiens
tgcagtcactctaaggatcccgccatcgcacctggcttagttcccttttctctgcatcttgccagcgttgtatatgtctttttgataataattatcctaaacggggagagtgatacctcattgcggttttgatttgcatttcccagatagtgatgagtgtgttttttttttcttttttgaggaattatcagggaagtgaggaaatgtttgggagaggactttctaagctctatttaggtgttagatctaattacttatagattctgtagtctggtgaaggtgtgggtgacgtgatgagaggtttgagaaatgggtgaaatgaaatgggggatatgtaggtcaaatcaaattaaagatgatttttttaatgtgaataaagttatgttctgatagtttgtacagaaaaaataaaatggatgcccatgttttattgctattactaaatgtcaagattgtatgctattatgtcttgtaaatttcttttgttggtgtaaatatggaaatgccacattggttaagtgccatcatttgtaatgcaatgtgtcacttgaaaagagatttgaagaaactgacaacttcaaaaacaaatgagaagcccaaggaactgtgagcaattaaaagcaaaccgcgacaccctttgtctccaccacacatagtgtactttggaagcacaacgtccaggctggtaccgcagcgccatgcccattcctcgcctcgttcataggacacttcactgccattttctattcacataaaagaaaaataaatgtggaaatttcatccttggaaatgtgttctctattctttttaaattttctgtatgtatatggaaaagcagatttaataaacacaaatctaactgcatgttggaaacagcttaaatatatccaactattttggacttttcctagttttatatatactttgtgagatggaccacaccaaagaattaagctatgaactttccttctctgacaatctaggtatttttatttcttggaatctatttcaaatctagtacccttcacagttttatcatgtttttctatatggcagcccggccataactaaattgatataactaaattgataccttttttaggcatcatttttaagaactcagtaacttcataagaacagtggttgggcatttatttggttggcaccaatataataaaacaaattctaaatt

SEQ ID NO: 327305 - DNA, 2833 bp, Homo sapiens
ggccgggcgggagggctggcagcggggcgggcggcggcggcggcctctgggcagtagagggggctccggggctgagtccgcgtcgacgccggccgcggaggcggcaccatgggcaaggggtagaggggcaagttggccaccgccgccgccgggggtggtgggagagccgctccgggggcgggggccggtgggggagggaggggcgggcagccgcgccgccgcggcacttttttaattttttcgggtgccgcagcggcgacccctcggcgccgatgtccctgatccctggagcgacgacggccgctgcctaagctggaaagaggaatgccagctcctgagcaggcctcattggtggaggaggggcaaccacagacccgccaggaagctgcctccactggcccaggcatggaacccgagaccacagccaccactattctagcatccgtgaaggagcaggagcttcagtttcagcgactcacccgagaactggaagtggaaaggcagattgttgccagtcagctagaaagatgtaggcttggagcagaatcaccaagcatcgccagcaccagctcaactgagaagtcatttccttggagatcaacagacgtgccaaatactggtgtaagcaaacctagagtttctgacgctgtccagcccaacaactatctcatcaggacagagccagaacaaggaaccctctattcaccagaacagacatctctccatgaaagtgagggatcattgggtaactcaagaagttcaacacaaatgaattcttattccgacagtggataccaggaagcagggagtttccacaacagccagaacgtgagcaaggcagacaacagacagcagcattcattcataggatcaactaacaaccatgtggtgaggaattcaagagctgaaggacaaacactggttcagccatcagtagccaatcgggccatgagaagagttagttcagttccatctagagcacagtctccttcttatgttatcagcacaggcgtgtctccttcaagggggtctctgagaacttctctgggtagtggatttggctctccgtcagtgaccgacccccgacctctgaaccccagtgcatattcctccaccacattacctgctgcacgggcagcctctccgtactcacagagacccgcctccccaacagctatacggcggattgggtcagtcacctcccggcagacctccaatcccaacggaccaacccctcaataccaaaccaccgccagagtggggtccccactgaccctgacggatgcacagactcgagtagcttccccatcccaaggccaggtggggtcgtcgtcccccaaacgctcagggatgaccgccgtaccacagcatctgggaccttcactgcaaaggactgttcatgacatggagcaattcggacagcagcagtatgacatttatgagaggatggttccacccaggccagacagcctgacaggcttacggagttcctatgctagtcagcatagtcagcttgggcaagaccttcgttctgccgtgtctcccgacttgcacattactcctatatatgaggggaggacctattacagcccagtgtaccgcagcccaaaccatggaactgtggagctccaaggatcgcagacggcgttgtatcgcacaggttcaggtattggaaatctacaaaggacatccagccaacgaagtacccttacataccaaagaaataattatgctctgaacacaacagctacctacgcggagccctacaggcctatacaataccgagtgcaagagtgcaattataacaggcttcagcatgcagtgccggctgatgatggcaccacaagatccccatcaatagacagcattcagaaggaccccaggcgagtaccagttaggagtctctagaaggctacagtattgcaggagtcagccagttcctccattttgacttttttaagttgctaagtctattatactatcattatactatcattaattccatatatattaatacttccagttgtattccagctatataggtcattgaggttaatttcattttaaagatagattccttctttccatcctttcataataagttagagaaggcacagatccatgggaatatctgcagcattcatcactgaaatatttcatcaagacaacaacctggaatagcctcttggaattaaacaaggctttgaaagatcaatttaccctttgcccttatcctgaccgacttcttcgataacagcttcaaaaaatggatttggttattacaaactagagaaagacccgtgttacatgttttcaatcatagtggtcaacaatatataacgctgttattaaccaggtcctttgaaaacaatttgtgacatttaggagaagacagtctttataagaaattctatctaataagcaaaaagtgtttggcaaatcatagacgtttcctccttctgattttatttggccctgtagacagcattttttattaagataatatgagtcatttaatacttgattgattttgaaaaactgaccttgtccttaaagccatttaaaatattcaggaaataaagatattttgaaactaaaagaattttcatttctgaaagagtgaaattgttgctaaattttaagcgctttagtgttattttaaggcatgtatgcaagatttcattcactcttcgcccacaaatagttgcttcactggaaaattgttataattatcaattcatttttagcagcctaccaacttgttttaatgaatgtgaattaaaatgatgagtgaggttttggtcattaaaacaaaatgactaaagatacctta

SEQ ID NO: 327306 - DNA, 1015 bp, Homo sapiens
tatacaactacataatgtgagcccacacagaaagcccctggaatccacagacccacagattgcgcaaatagttctttgaaagtgaccaggaagcaggaaaaaggtcctatgtcccctgggggatggggagcgtgacttctgctggaagctgccagccatgttccaaagtcatgggccaaaacattcaactagagaccccccacaaccctctatcatctttacctccgtctccataatgtgtgcccatgttttattgctattactaaatgtcaagattgtatgctattatgtcttgtaaatttcttttgttggtgtaaatatggaaatgccacattggttaagtgccatcatttgtaatgcaatgtgtcacttgaaaagagatttgaagaaactgacaacttcaaaaacaaatgagaagcccaaggaactgtgagcaattaaaagcaaaccgcgacaccctttgtctccaccacacatagtgtactttggaagcacaacgtccaggctggtaccgcagcgccatgcccattcctcgcctcgttcataggacacttcactgccattttctattcacataaaagaaaaataaatgtggaaatttcatccttggaaatgtgttctctattctttttaaattttctgtatgtatatggaaaagcagatttaataaacacaaatctaactgcatgttggaaacagcttaaatatatccaactattttggacttttcctagttttatatatactttgtgagatggaccacaccaaagaattaagctatgaactttccttctctgacaatctaggtatttttatttcttggaatctatttcaaatctagtacccttcacagttttatcatgtttttctatatggcagcccggccataactaaattgatataactaaattgataccttttttaggcatcatttttaagaactcagtaacttcataagaacagtggttgggcatttatttggttggcaccaatataataaaacaaattctaaatt

SEQ ID NO: 327307 - DNA, 351 bp, Homo sapiens
tcactagttctgcgtaacacgacaggttgcctaaggtaaattctttatttcttctttccagttaattctgtgattaaatatgtgtcataggtaaattgattttaggaggacttactttattaacatctatctaagtttccagtttttatttcaaaatttaggccactggactttgttattctgggagaaaaacatcgtgagcacagacttgtggccttaaagaagttatcttgtaaatgactcttctgtgacttactcagaaaggccctttcagtctaagattactgccaaaattccagtgttttccactttaacagcatttttctggtaatcgcattctgattgctaatg

SEQ ID NO: 327308 - DNA, 5050 bp, Homo sapiens
ggccgggcgggagggctggcagcggggcgggcggcggcggcggcctctgggcagtagagggggctccggggctgagtccgcgtcgacgccggccgcggaggcggcaccatgggcaaggggtagaggggcaagttggccaccgccgccgccgggggtggtgggagagccgctccgggggcgggggccggtgggggagggaggggcgggcagccgcgccgccgcggcacttttttaattttttcgggtgccgcagcggcgacccctcggcgccgatgtccctgatccctggagcgacgacggccgctgcctaagctggaaagaggaatgccagctcctgagcaggcctcattggtggaggaggggcaaccacagacccgccaggaagctgcctccactggcccaggcatggaacccgagaccacagccaccactattctagcatccgtgaaggagcaggagcttcagtttcagcgactcacccgagaactggaagtggaaaggcagattgttgccagtcagctagaaagatgtaggcttggagcagaatcaccaagcatcgccagcaccagctcaactgagaagtcatttccttggagatcaacagacgtgccaaatactggtgtaagcaaacctagagtttctgacgctgtccagcccaacaactatctcatcaggacagagccagaacaaggaaccctctattcaccagaacagacatctctccatgaaagtgagggatcattgggtaactcaagaagttcaacacaaatgaattcttattccgacagtggataccaggaagcagggagtttccacaacagccagaacgtgagcaaggcagacaacagacagcagcattcattcataggatcaactaacaaccatgtggtgaggaattcaagagctgaaggacaaacactggttcagccatcagtagccaatcgggccatgagaagagttagttcagttccatctagagcacagtctccttcttatgttatcagcacaggcgtgtctccttcaagggggtctctgagaacttctctgggtagtggatttggctctccgtcagtgaccgacccccgacctctgaaccccagtgcatattcctccaccacattacctgctgcacgggcagcctctccgtactcacagagacccgcctccccaacagctatacggcggattgggtcagtcacctcccggcagacctccaatcccaacggaccaacccctcaataccaaaccaccgccagagtggggtccccactgaccctgacggatgcacagactcgagtagcttccccatcccaaggccaggtggggtcgtcgtcccccaaacgctcagggatgaccgccgtaccacagcatctgggaccttcactgcaaaggactgttcatgacatggagcaattcggacagcagcagtatgacatttatgagaggatggttccacccaggccagacagcctgacaggcttacggagttcctatgctagtcagcatagtcagcttgggcaagaccttcgttctgccgtgtctcccgacttgcacattactcctatatatgaggggaggacctattacagcccagtgtaccgcagcccaaaccatggaactgtggagctccaaggatcgcagacggcgttgtatcgcacaggttcaggtattggaaatctacaaaggacatccagccaacgaagtacccttacataccaaagaaataattatgctctgaacacaacagctacctacgcggagccctacaggcctatacaataccgagtgcaagagtgcaattataacaggcttcagcatgcagtgccggctgatgatggcaccacaagatccccatcaatagacagcattcagaaggaccccagggagtttgcctggcgtgatcctgagttgcctgaggtcattcacatgcttcagcaccagttcccatctgttcaggcaaatgcagcggcctacctgcagcacctgtgctttggtgacaacaaagtgaagatggaggtgtgtaggttagggggaatcaagcatctggttgaccttctggaccacagagttttggaagttcagaagaatgcttgtggtgcccttcgaaacctcgtttttggcaagtctacagatgaaaataaaatagcaatgaagaatgttggtgggatacctgccttgttgcgactgttgagaaaatctattgatgcagaagtaagggagcttgttacaggagttctttggaatttatcctcatgtgatgctgtaaaaatgacaatcattcgagatgctctctcaaccttaacaaacactgtgattgttccacattctggatggaataactcttcttttgatgatgatcataaaattaaatttcagacttcactagttctgcgtaacacgacaggttgcctaaggaacctcagctccgcgggggaagaagctcggaagcaaatgcggtcctgcgaggggctggtagactcactgttgtatgtgatccacacgtgtgtgaacacatccgattacgacagcaagacggtggagaactgcgtgtgcaccctgaggaacctgtcctatcggctggagctggaggtgccccaggcccggttactgggactgaacgaattggatgacttactaggaaaagagtctcccagcaaagactctgagccaagttgctgggggaagaagaagaaaaagaaaaagaggactccgcaagaagatcaatgggatggagttggtcctatcccaggactgtcgaagtcccccaaaggggttgagatgctgtggcacccatcggtggtaaaaccatatctgactcttctagcagaaagttccaacccagccaccttggaaggctctgcagggtctctccagaacctctctgctggcaactggaagtttgcagcatatatccgggcggccgtccgaaaagaaaaggggctccccatccttgtggagcttctgagaatggataacgatagagttgtttcttccgtggcaacagccttgaggaatatggcactagatgttcgcaacaaggagctcataggcaaatacgccatgcgagacctggtcaaccggctccccggcggcaatggccccagtgtcttgtctgatgagaccatggcagccatctgctgtgctctgcacgaggtcaccagcaaaaacatggagaacgcaaaagccctggccgactcaggaggcatagagaagctggtgaacataaccaaaggcaggggcgacagatcatctctgaaagtggtgaaggcagcagcccaggtcttgaatacattatggcaatatcgggacctccggagcatttataaaaaggatgggtggaatcagaaccattttattacacctgtgtcgacattggagcgagaccgattcaaatcacatccttccttgtctaccaccaaccaacagatgtcacccatcattcagtcagtcggcagcacctcttcctcaccagcactgttaggaatcagagaccctcgctctgaatacgataggacccagccacctatgcagtattacaatagccaaggggatgccacacataaaggcctgtaccctggctccagcaaaccttcaccaatttacatcagttcctattcctcaccagcaagagaacaaaatagacggctacagcatcaacagctgtattatagtcaagatgactccaacagaaagaactttgatgcatacagattgtatttgcagtctcctcatagctatgaagatccttattttgatgaccgagttcactttccagcttctactgattactcaacacagtatggactgaaatcgaccacaaattatgtagacttttattccactaaacgaccttcttatagagcagaacagtacccagggtccccagactcatgggtgtagcatcaagatgcccaacagaggaactctttctttctaaccttgttcagattgaggtgaaaagtccatcttgctgatttgatgattgaaatgtgaaagtgaagtggaaggaatgaatgaagtgtgttttttttttcttttttgaggaattatcagggaagtgaggaaatgtttgggagaggactttctaagctctatttaggtgttagatctaattacttatagattctgtagtctggtgaaggtgtgggtgacgtgatgagaggtttgagaaatgggtgaaatgaaatgggggatatgtaggtcaaatcaaattaaagatgatttttttaatgtgaataaagttatgttctgatagtttgtacagaaaaaataaaatggatgcccatgttttattgctattactaaatgtcaagattgtatgctattatgtcttgtaaatttcttttgttggtgtaaatatggaaatgccacattggttaagtgccatcatttgtaatgcaatgtgtcacttgacaggtgcttgcacgcccttctcccttccactcccttgcctttcctccttccctgtcctttcactccgccccccctgtcctttacctctccccccctgtacccacctccccgctctcatctcttcttcttcgctcctcgccccctctcccattcctcgcctcgttcataggacacttcactgccattttctattcacataaaagaaaaataaatgtggaaatttcatccttggaaatgtgttctctattctttttaaattttctgtatgtatatggaaaagcagatttaataaacacaaatctaactgcatgttggaaacagcttaaatatatccaactattttggacttttcctagttttatatatactttgtgagatggaccacaccaaagaattaagctatgaactttccttctctgacaatctaggtatttttatttcttggaatctatttcaaatctagtacccttcacagttttatcatgtttttctatatggcagcccggccataactaaattgatataactaaattgataccttttttaggcatcatttttaagaactcagtaacttcataagaacagtggttgggcatttatttggttggcaccaatataataaaacaaattctaaatt

SEQ ID NO: 327309 - DNA, 4532 bp, Homo sapiens
tggccggacagaccgggaccgtgcgagacacagcaccactattctagcatcgtgaaggagcaggagcttcagtttcagcgactcacccgagaactggaagtggaaaggcagattgttgccagtcagctagaaagatgtaggcttggagcagaatcaccaagcatcgccagcaccagctcaactgagaagtcatttccttggagatcaacagacgtgccaaatactggtgtaagcaaacctagagtttctgacgctgtccagcccaacaactatctcatcaggacagagccagaacaaggaaccctctattcaccagaacagacatctctccatgaaagtgagggatcattgggtaactcaagaagttcaacacaaatgaattcttattccgacagtggataccaggaagcagggagtttccacaacagccagaacgtgagcaaggcagacaacagacagcagcattcattcataggatcaactaacaaccatgtggtgaggaattcaagagctgaaggacaaacactggttcagccatcagtagccaatcgggccatgagaagagttagttcagttccatctagagcacagtctccttcttatgttatcagcacaggcgtgtctccttcaagggggtctctgagaacttctctgggtagtggatttggctctccgtcagtgaccgacccccgacctctgaaccccagtgcatattcctccaccacattacctgctgcacgggcagcctctccgtactcacagagacccgcctccccaacagctatacggcggattgggtcagtcacctcccggcagacctccaatcccaacggaccaacccctcaataccaaaccaccgccagagtggggtccccactgaccctgacggatgcacagactcgagtagcttccccatcccaaggccaggtggggtcgtcgtcccccaaacgctcagggatgaccgccgtaccacagcatctgggaccttcactgcaaaggactgttcatgacatggagcaattcggacagcagcagtatgacatttatgagaggatggttccacccaggccagacagcctgacaggcttacggagttcctatgctagtcagcatagtcagcttgggcaagaccttcgttctgccgtgtctcccgacttgcacattactcctatatatgaggggaggacctattacagcccagtgtaccgcagcccaaaccatggaactgtggagctccaaggatcgcagacggcgttgtatcgcacaggttcaggtattggaaatctacaaaggacatccagccaacgaagtacccttacataccaaagaaataattatgctctgaacacaacagctacctacgcggagccctacaggcctatacaataccgagtgcaagagtgcaattataacaggcttcagcatgcagtgccggctgatgatggcaccacaagatccccatcaatagacagcattcagaaggaccccagggagtttgcctggcgtgatcctgagttgcctgaggtcattcacatgcttcagcaccagttcccatctgttcaggcaaatgcagcggcctacctgcagcacctgtgctttggtgacaacaaagtgaagatggaggtgtgtaggttagggggaatcaagcatctggttgaccttctggaccacagagttttggaagttcagaagaatgcttgtggtgcccttcgaaacctcgtttttggcaagtctacagatgaaaataaaatagcaatgaagaatgttggtgggatacctgccttgttgcgactgttgagaaaatctattgatgcagaagtaagggagcttgttacaggagttctttggaatttatcctcatgtgatgctgtaaaaatgacaatcattcgagatgctctctcaaccttaacaaacactgtgattgttccacattctggatggaataactcttcttttgatgatgatcataaaattaaatttcagacttcactagttctgcgtaacacgacaggttgcctaaggaacctcagctccgcgggggaagaagctcggaagcaaatgcggtcctgcgaggggctggtagactcactgttgtatgtgatccacacgtgtgtgaacacatccgattacgacagcaagacggtggagaactgcgtgtgcaccctgaggaacctgtcctatcggctggagctggaggtgccccaggcccggttactgggactgaacgaattggatgacttactaggaaaagagtctcccagcaaagactctgagccaagttgctgggggaagaagaagaaaaagaaaaagaggactccgcaagaagatcaatgggatggagttggtcctatcccaggactgtcgaagtcccccaaaggggttgagatgctgtggcacccatcggtggtaaaaccatatctgactcttctagcagaaagttccaacccagccaccttggaaggctctgcagggtctctccagaacctctctgctggcaactggaagtttgcagcatatatccgggcggccgtccgaaaagaaaaggggctccccatccttgtggagcttctgagaatggataacgatagagttgtttcttccgtggcaacagccttgaggaatatggcactagatgttcgcaacaaggagctcataggcaaatacgccatgcgagacctggtcaaccggctccccggcggcaatggccccagtgtcttgtctgatgagaccatggcagccatctgctgtgctctgcacgaggtcaccagcaaaaacatggagaacgcaaaagccctggccgactcaggaggcatagagaagctggtgaacataaccaaaggcaggggcgacagatcatctctgaaagtggtgaaggcagcagcccaggtcttgaatacattatggcaatatcgggacctccggagcatttataaaaaggatgggtggaatcagaaccattttattacacctgtgtcgacattggagcgagaccgattcaaatcacatccttccttgtctaccaccaaccaacagatgtcacccatcattcagtcaggctccagcaaaccttcaccaatttacatcagttcctattcctcaccagcaagagaacaaaatagacggctacagcatcaacagctgtattatagtcaagatgactccaacagaaagaactttgatgcatacagattgtatttgcagtctcctcatagctatgaagatccttattttgatgaccgagttcactttccagcttctactgattactcaacacagtatggactgaaatcgaccacaaattatgtagacttttattccactaaacgaccttcttatagagcagaacagtacccagggtccccagactcatgggtgtagcatcaagatgcccaacagaggaactctttctttctaaccttgttcagattgaggtgaaaagtccatcttgctgatttgatgattgaaatgtgaaagtgaagtggaaggaatgaatgaagtgtgttttttttttcttttttgaggaattatcagggaagtgaggaaatgtttgggagaggactttctaagctctatttaggtgttagatctaattacttatagattctgtagtctggtgaaggtgtgggtgacgtgatgagaggtttgagaaatgggtgaaatgaaatgggggatatgtaggtcaaatcaaattaaagatgatttttttaatgtgaataaagttatgttctgatagtttgtacagaaaaaataaaatggatgcccatgttttattgctattactaaatgtcaagattgtatgctattatgtcttgtaaatttcttttgttggtgtaaatatggaaatgccacattggttaagtgccatcatttgtaatgcaatgtgtcacttgaaaagagatttgaagaaactgacaacttcaaaaacaaatgagaagcccaaggaactgtgagcaattaaaagcaaaccgcgacaccctttgtctccaccacacatagtgtactttggaagcacaacgtccaggctggtaccgcagcgccatgcccattcctcgcctcgttcataggacacttcactgccattttctattcacataaaagaaaaataaatgtggaaatttcatccttggaaatgtgttctctattctttttaaattttctgtatgtatatggaaaagcagatttaataaacacaaatctaactgcatgttggaaacagcttaaatatatccaactattttggacttttcctagttttatatatactttgtgagatggaccacaccaaagaattaagctatgaactttccttctctgacaatctaggtatttttatttcttggaatctatttcaaatctagtacccttcacagttttatcatgtttttctatatggcagcccggccataactaaattgatataactaaattgataccttttttaggcatcatttttaagaactcagtaacttcataagaacagtggttgggcatttatttggttggcaccaatataataaaacaaattctaaatt

SEQ ID NO: 327310 - DNA, 3201 bp, Homo sapiens
ctctatttttagtagagacggggtttcatcatgttggccaggctggtcttgaactcctgacctcaagtgatccgcccatcttggcctcccaatgtgctgagattacaggcatgagccaccgcacctggcctctccttagaatgtataaaagttgtcttatttggaataaaaagtaacctttgaaatggtctagagatatccacatcctgtgatctctccataacggacttctgtttgatcactgattaattgcatgttacttaggcctggtacctaatatttttcattctaggtgtgtaggttagggggaatcaagcatctggttgaccttctggaccacagagttttggaagttcagaagaatgcttgtggtgcccttcgaaacctcgtttttggcaagtctacagatgaaaataaaatagcaatgaagaatgttggtgggatacctgccttgttgcgactgttgagaaaatctattgatgcagaagtaagggagcttgttacaggagttctttggaatttatcctcatgtgatgctgtaaaaatgacaatcattcgagatgctctctcaaccttaacaaacactgtgattgttccacattctggatggaataactcttcttttgatgatgatcataaaattaaatttcagacttcactagttctgcgtaacacgacaggttgcctaaggaacctcagctccgcgggggaagaagctcggaagcaaatgcggtcctgcgaggggctggtagactcactgttgtatgtgatccacacgtgtgtgaacacatccgattacgacagcaagacggtggagaactgcgtgtgcaccctgaggaacctgtcctatcggctggagctggaggtgccccaggcccggttactgggactgaacgaattggatgacttactaggaaaagagtctcccagcaaagactctgagccaagttgctgggggaagaagaagaaaaagaaaaagaggactccgcaagaagatcaatgggatggagttggtcctatcccaggactgtcgaagtcccccaaaggggttgagatgctgtggcacccatcggtggtaaaaccatatctgactcttctagcagaaagttccaacccagccaccttggaaggctctgcagggtctctccagaacctctctgctggcaactggaagtttgcagcatatatccgggcggccgtccgaaaagaaaaggggctccccatccttgtggagcttctgagaatggataacgatagagttgtttcttccgtggcaacagccttgaggaatatggcactagatgttcgcaacaaggagctcataggcaaatacgccatgcgagacctggtcaaccggctccccggcggcaatggccccagtgtcttgtctgatgagaccatggcagccatctgctgtgctctgcacgaggtcaccagcaaaaacatggagaacgcaaaagccctggccgactcaggaggcatagagaagctggtgaacataaccaaaggcaggggcgacagatcatctctgaaagtggtgaaggcagcagcccaggtcttgaatacattatggcaatatcgggacctccggagcatttataaaaaggatgggtggaatcagaaccattttattacacctgtgtcgacattggagcgagaccgattcaaatcacatccttccttgtctaccaccaaccaacagatgtcacccatcattcagtcaggctccagcaaaccttcaccaatttacatcagttcctattcctcaccagcaagagaacaaaatagacggctacagcatcaacagctgtattatagtcaagatgactccaacagaaagaactttgatgcatacagattgtatttgcagtctcctcatagctatgaagatccttattttgatgaccgagttcactttccagcttctactgattactcaacacagtatggactgaaatcgaccacaaattatgtagacttttattccactaaacgaccttcttatagagcagaacagtacccagggtccccagactcatgggtgtagcatcaagatgcccaacagaggaactctttctttctaaccttgttcagattgaggtgaaaagtccatcttgctgatttgatgattgaaatgtgaaagtgaagtggaaggaatgaatgaagtgtgttttttttttcttttttgaggaattatcagggaagtgaggaaatgtttgggagaggactttctaagctctatttaggtgttagatctaattacttatagattctgtagtctggtgaaggtgtgggtgacgtgatgagaggtttgagaaatgggtgaaatgaaatgggggatatgtaggtcaaatcaaattaaagatgatttttttaatgtgaataaagttatgttctgatagtttgtacagaaaaaataaaatggatgcccatgttttattgctattactaaatgtcaagattgtatgctattatgtcttgtaaatttcttttgttggtgtaaatatggaaatgccacattggttaagtgccatcatttgtaatgcaatgtgtcacttgaaaagagatttgaagaaactgacaacttcaaaaacaaatgagaagcccaaggaactgtgagcaattaaaagcaaaccgcgacaccctttgtctccaccacacatagtgtactttggaagcacaacgtccaggctggtaccgcagcgccatgcccattcctcgcctcgttcataggacacttcactgccattttctattcacataaaagaaaaataaatgtggaaatttcatccttggaaatgtgttctctattctttttaaattttctgtatgtatatggaaaagcagatttaataaacacaaatctaactgcatgttggaaacagcttaaatatatccaactattttggacttttcctagttttatatatactttgtgagatggaccacaccaaagaattaagctatgaactttccttctctgacaatctaggtatttttatttcttggaatctatttcaaatctagtacccttcacagttttatcatgtttttctatatggcagcccggccataactaaattgatataactaaattgataccttttttaggcatcatttttaagaactcagtaacttcataagaacagtggttgggcatttatttggttggcaccaatataataaaacaaattctaaatt

SEQ ID NO: 327311 - DNA, 5032 bp, Homo sapiens
ggccgggcgggagggctggcagcggggcgggcggcggcggcggcctctgggcagtagagggggctccggggctgagtccgcgtcgacgccggccgcggaggcggcaccatgggcaaggggtagaggggcaagttggccaccgccgccgccgggggtggtgggagagccgctccgggggcgggggccggtgggggagggaggggcgggcagccgcgccgccgcggcacttttttaattttttcgggtgccgcagcggcgacccctcggcgccgatgtccctgatccctggagcgacgacggccgctgcctaagctggaaagaggaatgccagctcctgagcaggcctcattggtggaggaggggcaaccacagacccgccaggaagctgcctccactggcccaggcatggaacccgagaccacagccaccactattctagcatccgtgaaggagcaggagcttcagtttcagcgactcacccgagaactggaagtggaaaggcagattgttgccagtcagctagaaagatgtaggcttggagcagaatcaccaagcatcgccagcaccagctcaactgagaagtcatttccttggagatcaacagacgtgccaaatactggtgtaagcaaacctagagtttctgacgctgtccagcccaacaactatctcatcaggacagagccagaacaaggaaccctctattcaccagaacagacatctctccatgaaagtgagggatcattgggtaactcaagaagttcaacacaaatgaattcttattccgacagtggataccaggaagcagggagtttccacaacagccagaacgtgagcaaggcagacaacagacagcagcattcattcataggatcaactaacaaccatgtggtgaggaattcaagagctgaaggacaaacactggttcagccatcagtagccaatcgggccatgagaagagttagttcagttccatctagagcacagtctccttcttatgttatcagcacaggcgtgtctccttcaagggggtctctgagaacttctctgggtagtggatttggctctccgtcagtgaccgacccccgacctctgaaccccagtgcatattcctccaccacattacctgctgcacgggcagcctctccgtactcacagagacccgcctccccaacagctatacggcggattgggtcagtcacctcccggcagacctccaatcccaacggaccaacccctcaataccaaaccaccgccagagtggggtccccactgaccctgacggatgcacagactcgagtagcttccccatcccaaggccaggtggggtcgtcgtcccccaaacgctcagggatgaccgccgtaccacagcatctgggaccttcactgcaaaggactgttcatgacatggagcaattcggacagcagcagtatgacatttatgagaggatggttccacccaggccagacagcctgacaggcttacggagttcctatgctagtcagcatagtcagcttgggcaagaccttcgttctgccgtgtctcccgacttgcacattactcctatatatgaggggaggacctattacagcccagtgtaccgcagcccaaaccatggaactgtggagctccaaggatcgcagacggcgttgtatcgcacaggttcaggtattggaaatctacaaaggacatccagccaacgaagtacccttacataccaaagaaataattatgctctgaacacaacagctacctacgcggagccctacaggcctatacaataccgagtgcaagagtgcaattataacaggcttcagcatgcagtgccggctgatgatggcaccacaagatccccatcaatagacagcattcagaaggaccccagggagtttgcctggcgtgatcctgagttgcctgaggtcattcacatgcttcagcaccagttcccatctgttcaggcaaatgcagcggcctacctgcagcacctgtgctttggtgacaacaaagtgaagatggaggtgtgtaggttagggggaatcaagcatctggttgaccttctggaccacagagttttggaagttcagaagaatgcttgtggtgcccttcgaaacctcgtttttggcaagtctacagatgaaaataaaatagcaatgaagaatgttggtgggatacctgccttgttgcgactgttgagaaaatctattgatgcagaagtaagggagcttgttacaggagttctttggaatttatcctcatgtgatgctgtaaaaatgacaatcattcgagatgctctctcaaccttaacaaacactgtgattgttccacattctggatggaataactcttcttttgatgatgatcataaaattaaatttcagacttcactagttctgcgtaacacgacaggttgcctaaggaacctcagctccgcgggggaagaagctcggaagcaaatgcggtcctgcgaggggctggtagactcactgttgtatgtgatccacacgtgtgtgaacacatccgattacgacagcaaggaggccactctccagatcaaagggcaagtctccaaagttacaggggcaaggacgtggcaacttaagaaaatatcctgagaaccgtgagaacagagtggcttggtgtgacggtggagaactgcgtgtgcaccctgaggaacctgtcctatcggctggagctggaggtgccccaggcccggttactgggactgaacgaattggatgacttactaggaaaagagtctcccagcaaagactctgagccaagttgctgggggaagaagaagaaaaagaaaaagaggactccgcaagaagatcaatgggatggagttggtcctatcccaggactgtcgaagtcccccaaaggggttgagatgctgtggcacccatcggtggtaaaaccatatctgactcttctagcagaaagttccaacccagccaccttggaaggctctgcagggtctctccagaacctctctgctggcaactggaagtttgcagcatatatccgggcggccgtccgaaaagaaaaggggctccccatccttgtggagcttctgagaatggataacgatagagttgtttcttccgtggcaacagccttgaggaatatggcactagatgttcgcaacaaggagctcataggcaaatacgccatgcgagacctggtcaaccggctccccggcggcaatggccccagtgtcttgtctgatgagaccatggcagccatctgctgtgctctgcacgaggtcaccagcaaaaacatggagaacgcaaaagccctggccgactcaggaggcatagagaagctggtgaacataaccaaaggcaggggcgacagatcatctctgaaagtggtgaaggcagcagcccaggtcttgaatacattatggcaatatcgggacctccggagcatttataaaaaggatgggtggaatcagaaccattttattacacctgtgtcgacattggagcgagaccgattcaaatcacatccttccttgtctaccaccaaccaacagatgtcacccatcattcagtcaggctccagcaaaccttcaccaatttacatcagttcctattcctcaccagcaagagaacaaaatagacggctacagcatcaacagctgtattatagtcaagatgactccaacagaaagaactttgatgcatacagattgtatttgcagtctcctcatagctatgaagatccttattttgatgaccgagttcactttccagcttctactgattactcaacacagtatggactgaaatcgaccacaaattatgtagacttttattccactaaacgaccttcttatagagcagaacagtacccagggtccccagactcatgggtgtagcatcaagatgcccaacagaggaactctttctttctaaccttgttcagattgaggtgaaaagtccatcttgctgatttgatgattgaaatgtgaaagtgaagtggaaggaatgaatgaagtgtgttttttttttcttttttgaggaattatcagggaagtgaggaaatgtttgggagaggactttctaagctctatttaggtgttagatctaattacttatagattctgtagtctggtgaaggtgtgggtgacgtgatgagaggtttgagaaatgggtgaaatgaaatgggggatatgtaggtcaaatcaaattaaagatgatttttttaatgtgaataaagttatgttctgatagtttgtacagaaaaaataaaatggatgcccatgttttattgctattactaaatgtcaagattgtatgctattatgtcttgtaaatttcttttgttggtgtaaatatggaaatgccacattggttaagtgccatcatttgtaatgcaatgtgtcacttgaaaagagatttgaagaaactgacaacttcaaaaacaaatgagaagcccaaggaactgtgagcaattaaaagcaaaccgcgacaccctttgtctccaccacacatagtgtactttggaagcacaacgtccaggctggtaccgcagcgccatgcccattcctcgcctcgttcataggacacttcactgccattttctattcacataaaagaaaaataaatgtggaaatttcatccttggaaatgtgttctctattctttttaaattttctgtatgtatatggaaaagcagatttaataaacacaaatctaactgcatgttggaaacagcttaaatatatccaactattttggacttttcctagttttatatatactttgtgagatggaccacaccaaagaattaagctatgaactttccttctctgacaatctaggtatttttatttcttggaatctatttcaaatctagtacccttcacagttttatcatgtttttctatatggcagcccggccataactaaattgatataactaaattgataccttttttaggcatcatttttaagaactcagtaacttcataagaacagtggttgggcatttatttggttggcaccaatataataaaacaaattctaaatt

SEQ ID NO: 327312 - DNA, 2587 bp, Homo sapiens
caccaggctgtatgaattatgatgctggatgtttctggagatttccctttcttctgaggcaagggatttttccaactaatctctttgacaggtttctgaactcgaaatattgttgcagggaatatagaaaaaaaatgacttgatggagacaggttctcctttcatgtgtgctgatgggttactgtctctgccatcctatttatagcctctgggtttggcaggggaccaactgcaaagaaaacacacgatccttccttaatcatgtttatgtatctgagatagaaagtaatcactgccttctcttttctgcacaaaaatatctggcagatggtggtttgagattttcaggctttgggatttttttttaaatcagtcattccagcctatctttctccccaactttggttttctcttcactgacaccacagatttgatcttcaattggaaagaaaccatttaatctattagttcatcttttggaaacatcttttttaggtgacagtaacatatgagagtggaactctgttttatgttacttcctgccttatttttctcactagtttgcagcatatatccgggcggccgtccgaaaagaaaaggggctccccatccttgtggagcttctgagaatggataacgatagagttgtttcttccgtggcaacagccttgaggaatatggcactagatgttcgcaacaaggagctcataggcaaatacgccatgcgagacctggtcaaccggctccccggcggcaatggccccagtgtcttgtctgatgagaccatggcagccatctgctgtgctctgcacgaggtcaccagcaaaaacatggagaacgcaaaagccctggccgactcaggaggcatagagaagctggtgaacataaccaaaggcaggggcgacagatcatctctgaaagtggtgaaggcagcagcccaggtcttgaatacattatggcaatatcgggacctccggagcatttataaaaaggatgggtggaatcagaaccattttattacacctgtgtcgacattggagcgagaccgattcaaatcacatccttccttgtctaccaccaaccaacagatgtcacccatcattcagtcaggctccagcaaaccttcaccaatttacatcagttcctattcctcaccagcaagagaacaaaatagacggctacagcatcaacagctgtattatagtcaagatgactccaacagaaagaactttgatgcatacagattgtatttgcagtctcctcatagctatgaagatccttattttgatgaccgagttcactttccagcttctactgattactcaacacagtatggactgaaatcgaccacaaattatgtagacttttattccactaaacgaccttcttatagagcagaacagtacccagggtccccagactcatgggtgtagcatcaagatgcccaacagaggaactctttctttctaaccttgttcagattgaggtgaaaagtccatcttgctgatttgatgattgaaatgtgaaagtgaagtggaaggaatgaatgaagtgtgttttttttttcttttttgaggaattatcagggaagtgaggaaatgtttgggagaggactttctaagctctatttaggtgttagatctaattacttatagattctgtagtctggtgaaggtgtgggtgacgtgatgagaggtttgagaaatgggtgaaatgaaatgggggatatgtaggtcaaatcaaattaaagatgatttttttaatgtgaataaagttatgttctgatagtttgtacagaaaaaataaaatggatgcccatgttttattgctattactaaatgtcaagattgtatgctattatgtcttgtaaatttcttttgttggtgtaaatatggaaatgccacattggttaagtgccatcatttgtaatgcaatgtgtcacttgaaaagagatttgaagaaactgacaacttcaaaaacaaatgagaagcccaaggaactgtgagcaattaaaagcaaaccgcgacaccctttgtctccaccacacatagtgtactttggaagcacaacgtccaggctggtaccgcagcgccatgcccattcctcgcctcgttcataggacacttcactgccattttctattcacataaaagaaaaataaatgtggaaatttcatccttggaaatgtgttctctattctttttaaattttctgtatgtatatggaaaagcagatttaataaacacaaatctaactgcatgttggaaacagcttaaatatatccaactattttggacttttcctagttttatatatactttgtgagatggaccacaccaaagaattaagctatgaactttccttctctgacaatctaggtatttttatttcttggaatctatttcaaatctagtacccttcacagttttatcatgtttttctatatggcagcccggccataactaaattgatataactaaattgataccttttttaggcatcatttttaagaactcagtaacttcataagaacagtggttgggcatttatttggttggcaccaatataataaaacaaattctaaatt

SEQ ID NO: 327313 - DNA, 2553 bp, Homo sapiens
tccccttgccttgtcttagcaagaatttcattattattgcattattcctgggagataacatacctataattttaataccagaacttttacttgtgtcatcttttaaagaaactaacatgttgccaccgttgtcagatgagttgctgtacacctcagctctatacacaaaaatgtgtaactgtacccagttcatacattaagatccagaaagatctaacgaaaagtattgtttggcagcctgacttggtccagattcaaaggtaagttttaaaaagctctaagaggaaattgaggtatttgtgatgcataggaattccattgagaataaaatttactattataattccttcattactcaatgttactgaaaatacttgaacgaaagtaacttgatttgtctacccaattttacgcattgatttacatttgctttcagcaattgacagtaatgttttataaatgaatcatttctgcaagtgacgttgcaataaatgttagctttccccttataatgacatttgtccttttcttctttgccatgggttttgattttttcccctattattgtctctttgggggttttatttttaagagattgcatgccaccagaatctgaacaacaataacaaaaacctagtaccttctggaagtagaatttactcttttgccgttggcaggcaaatacgccatgcgagacctggtcaaccggctccccggcggcaatggccccagtgtcttgtctgatgagaccatggcagccatctgctgtgctctgcacgaggtcaccagcaaaaacatggagaacgcaaaagccctggccgactcaggaggcatagagaagctggtgaacataaccaaaggcaggggcgacagatcatctctgaaagtggtgaaggcagcagcccaggtcttgaatacattatggcaatatcgggacctccggagcatttataaaaaggatgggtggaatcagaaccattttattacacctgtgtcgacattggagcgagaccgattcaaatcacatccttccttgtctaccaccaaccaacagatgtcacccatcattcagtcaggctccagcaaaccttcaccaatttacatcagttcctattcctcaccagcaagagaacaaaatagacggctacagcatcaacagctgtattatagtcaagatgactccaacagaaagaactttgatgcatacagattgtatttgcagtctcctcatagctatgaagatccttattttgatgaccgagttcactttccagcttctactgattactcaacacagtatggactgaaatcgaccacaaattatgtagacttttattccactaaacgaccttcttatagagcagaacagtacccagggtccccagactcatgggtgtagcatcaagatgcccaacagaggaactctttctttctaaccttgttcagattgaggtgaaaagtccatcttgctgatttgatgattgaaatgtgaaagtgaagtggaaggaatgaatgaagtgtgttttttttttcttttttgaggaattatcagggaagtgaggaaatgtttgggagaggactttctaagctctatttaggtgttagatctaattacttatagattctgtagtctggtgaaggtgtgggtgacgtgatgagaggtttgagaaatgggtgaaatgaaatgggggatatgtaggtcaaatcaaattaaagatgatttttttaatgtgaataaagttatgttctgatagtttgtacagaaaaaataaaatggatgcccatgttttattgctattactaaatgtcaagattgtatgctattatgtcttgtaaatttcttttgttggtgtaaatatggaaatgccacattggttaagtgccatcatttgtaatgcaatgtgtcacttgaaaagagatttgaagaaactgacaacttcaaaaacaaatgagaagcccaaggaactgtgagcaattaaaagcaaaccgcgacaccctttgtctccaccacacatagtgtactttggaagcacaacgtccaggctggtaccgcagcgccatgcccattcctcgcctcgttcataggacacttcactgccattttctattcacataaaagaaaaataaatgtggaaatttcatccttggaaatgtgttctctattctttttaaattttctgtatgtatatggaaaagcagatttaataaacacaaatctaactgcatgttggaaacagcttaaatatatccaactattttggacttttcctagttttatatatactttgtgagatggaccacaccaaagaattaagctatgaactttccttctctgacaatctaggtatttttatttcttggaatctatttcaaatctagtacccttcacagttttatcatgtttttctatatggcagcccggccataactaaattgatataactaaattgataccttttttaggcatcatttttaagaactcagtaacttcataagaacagtggttgggcatttatttggttggcaccaatataataaaacaaattctaaatt

SEQ ID NO: 327314 - DNA, 1258 bp, Homo sapiens
ggccgggcgggagggctggcagcggggcgggcggcggcggcggcctctgggcagtagagggggctccggggctgagtccgcgtcgacgccggccgcggaggcggcaccatgggcaaggggtagaggggcaagttggccaccgccgccgccgggggtggtgggagagccgctccgggggcgggggccggtgggggagggaggggcgggcagccgcgccgccgcggcacttttttaattttttcgggtgccgcagcggcgacccctcggcgccgatgtccctgatccctggagcgacgacggccgctgcctaagctggaaagaggaatgccagctcctgagcaggcctcattggtggaggaggggcaaccacagacccgccaggaagctgcctccactggcccaggcatggaacccgagaccacagccaccactattctagcatccgtgaaggagcaggagcttcagtttcagcgactcacccgagaactggaagtggaaaggcagattgttgccagtcagctagaaagatgtaggcttggagcagaatcaccaagcatcgccagcaccagctcaactgagaagtcatttccttggagatcaacagacgtgccaaatactggtgtaagcaaacctagagtttctgacgctgtccagcccaacaactatctcatcaggacagagccagaacaaggaaccctctattcaccagaacagacatctctccatgaaagtgagggatcattgggtaactcaagaagttcaacacaaatgaattcttattccgacagtggataccaggaagcagggagtttccacaacagccagaacgtgagcaaggcagacaacagacagcagcattcattcataggatcaactaacaaccatgtggtgaggaattcaagagctgaaggacaaacactggttcaggtaagccaaacgcatcaagatctctgcaaagaaataccttccggccgggcacagtggctcatgcctgtaatcccagcattttgggaggccgaggcgggtggatcacctgaggtcaggagttcaagaccagcctgcctaacatggcgaaaccccgtctctactaaaaatacaaaaattagccgggcgtggtggcgggcgcctgtaatctcagcaactcgggaggctgaggcaggagaatcacttgagcccaggaggcagagcttgcagtgagccgagatcgcaccactgcactccagcctgggcgacagagcgagactccgtctcaaaacaa

SEQ ID NO: 327315 - DNA, 1208 bp, Homo sapiens
gacagggcagactgtgcccatctcctctcctcaccagctgtgtacctgggcgagtcactttacctccttgagcctcagtttcctcatctgtaagatgggtagaaagaaagactctgcagtcagggtgctgtggcgggttagtgagctctatgagtggtatccacgtccgggattcttgtgactgccgttgtgcccttttccagggctgcatgtctgccctgggtccacctgcagtggcacactcaggcctctaagcccccagtgggcacatttcctaggcagcaagaagcctgagcatgcccccaggaccagcccatcccccaagccctttgtcccctgcctctgcccaggccttgtctctgaaggagtctgagaagatggcgctgtcagagaagttgatgggtacacggcacagcctggccaccatctccctggagatggagcggcagaaaccagatgcccagagccggcaggagcaggaccgggtaggcctgccgtcgtagggaggcttgcggagcaggagcgccctctctccaccgagctatcccgcggtttccagcatcccatctggcggactcctcttcctctctcttctcctactctgggtcttctatcctggtgttccttgaatgcctatcttccttttgtgcctcggaacctctcacgcctgccacaagttactcttttccttggtagttctgaactttaaataaggtaatgcctgtaagaatgccataaatgctcaataattgtcatctgttattattttcatcagtaacatcatctgaatcatcagtattgtctgcttttaacagctgcatttttcattgtccaaatatagtcacatacatttgaccattttataattattgaataataaatttgttctgctattttacaatgaaaaataatgctgcagagagcatttttgcacatgtatcgtggcagatgtaggccagaggctcttcttttatccatcctatggccaacctatgaatgtatacacgtttaatgagattttgccagcaatcaaagccttcagggaaaatgtccctagctctttactacatcagatcaaggactctggataattggcataacatcctggaatagctgaaacagagatattattctctgctctcctctgttgtctttgtcttttcacgtcttaataaaagtgctggtgacaagagtgtaaaaaaaaaaat

SEQ ID NO: 327316 - DNA, 3171 bp, Homo sapiens
agcggctgaacggacgccgtagccgagaggttgggcggatgttgtgaaccgggtcgcggcggccgaggctcggggtgagtgaggggcggcagggctctgagcctggcgggttccggctattcccttcgcggtccagtttagtccagtgcgagggcacctgcagcgccgggatctgagtgcgaaactccgagcggaagctggtctggcagcctccaggaccactggctgcccatgagagacgaaggatggcatccaagggggccggcgtgtctttctcccgcaagagctgtaggctgacctcagatgctgagaaatccagggtcacaggcattgtgcaggagaagctgctgaatgactacctgaaccgcatctttcctcttctgaccatgcacccccagcagccaccggcagttactcgggaggctgaggcaggagaatcgcttgaaccggagaggcggacgttgcagtgagccgaggtcaaaccagtgcactccagcctgggcaacagagcgagactccatctgaaaaagaaacaaaaacaaaaaaaaattttggacccgctgcagctgggaggggagctgtccaggaggccggcctgggaatgagcacaggcctgcggctggcagagagccgggtcgagccagccctggagaagcaggcccagctggaggagcagctgcgggacaaggtgctccacgagaaggacctgtcccagcagcagatgcaaagcgacctggacaaggctgacctcagtgccaggagggtccctggtgggtgctgcatgaggcaggcgtcactgcagaagagtgacagagctgggcctggcagtgaagcgtcttcagaagcagaatctggagaaggatcaggtcgacaaggacctcaccgagaagcttgaggccctggaatccctgcggctacaggagcaggcggccctggagacagaggatggagaggggctacagcggagcctaagggacctggcacaggccgtcctgtctgacgctgagagcggcagcctgcgtccaacagcgtccgaccgcagcctgcgggggctctcgggccagcggaccccgtctccaccgcggcgctcctcgccgggccgaggccgttcgccccgcagaggcccctccccggcctgctcagacgactccacgctcgcttgccctgattctctccgccctgcacttttgccagctgaaggtccagggagaagagcaacctggtccacagcctgcaggtggcccagcagcaggccgaggagctgccgcaggagcgggagaagctgcaggttgcccaggaggagctgcagcgccagcgggaccggctggaggaagagcaggaagaggcggtgcagaatggcgcacgggttcgccgggagcttgagcgcagccatagacaactagagcagctggaagggaagcgctcagtcctggccaaggagctggtggaggtgagggaggcgctgagccgcgccacgctgcaacgggacatgctgcaggccgagaagaccgaggtggccgaggcgctgaccaaggctgaggctggccgcatggagctcgagctctccgtgaccaagctgagggcagaggaggcctccctgcaggactccctgtccaagctgagcgccctcaacgagagccttgctcaggacaagttggatctgaactgccttgtcacccagctggaggaagaaaaggccacgctgcagggccggcagcggcaggcggagcaggaggccacagtggcgccggcagagcaggagtggctggaggagctgtggttggagcaggaggtggcacggcagggcctggagggctccctatgagtggcggagcaggcccaggaggcgctggagcaacagctccccacactgcaccatgagctcagttggctgcaggagcagctagcacaggggatcatgttcggacccccaggccagcccactgctgctccttggcactttcacggccctggcgtgtccccgtcatagtccttatcagtcccttgtatttacctggtcaccctccatctctgagggtatgggggccagatggctcttgctgccctgatgttttggggggtctgcctgggcccctcctggtgtgtcacacgcgtccagtcctggccccctaggaggcagcatggcgggagctggaggccgagcgggcccagctgcagagtcagctgcagcgtgagcaggaggagctgctggcccggcggaaggctgagaaggaacagctgagtgaggagattgctgccctgcagcaggagcatgacgagggcctcctcctggccgagagcgagaagcagcaggccttgtctctgaaggagtctgagaagatggcgctgtcagagaagttgatgggtacacggcacagcctggccaccatctccctggagatggagcggcagaaaccagatgcccagagccggcaggagcaggaccgggtaggcctgccgtcgtagggaggcttgcggagcaggagcgccctctctccaccgagctatcccgcggtttccagcatcccatctggcggactcctcttcctctctcttctcctactctgggtcttctatcctggtgttccttgaatgcctatcttccttttgtgcctcggaacctctcacgcctgccacaagttactcttttccttggtagttctgaactttaaataaggtaatgcctgtaagaatgccataaatgctcaataattgtcatctgttattattttcatcagtaacatcatctgaatcatcagtattgtctgcttttaacagctgcatttttcattgtccaaatatagtcacatacatttgaccattttataattattgaataataaatttgttctgctattttacaatgaaaaataatgctgcagagagcatttttgcacatgtatcgtggcagatgtaggccagaggctcttcttttatccatcctatggccaacctatgaatgtatacacgtttaatgagattttgccagcaatcaaagccttcagggaaaatgtccctagctctttactacatcagatcaaggactctggataattggcataacatcctggaatagctgaaacagagatattattctctgctctcctctgttgtctttgtcttttcacgtcttaataaaagtgctggtgacaagagtgtaaaaaaaaaaat

SEQ ID NO: 327317 - DNA, 3152 bp, Homo sapiens
agcggctgaacggacgccgtagccgagaggttgggcggatgttgtgaaccgggtcgcggcggccgaggctcggggtgagtgaggggcggcagggctctgagcctggcgggttccggctattcccttcgcggtccagtttagtccagtgcgagggcacctgcagcgccgggatctgagtgcgaaactccgagcggaagctggtctggcaggtcctctggagcttggggccaggcgggggcgacttgggggagccatccttgggctcccagacggacctccaggaccactggctgcccatgagagacgaaggatggcatccaagggggccggcgtgtctttctcccgcaagagctgtaggctgacctcagatgctgagaaatccagggtcacagttactcgggaggctgaggcaggagaatcgcttgaaccggagaggcggacgttgcagtgagccgaggtcaaaccagtgcactccagcctgggcaacagagcgagactccatctgaaaaagaaacaaaaacaaaaaaaaattttggacccgctgcagctgggaggggagctgtccaggaggccggcctgggaatgagcacaggcctgcggctggcagagagccgggtcgagccagccctggagaagcaggcccagctggaggagcagctgcgggacaaggtgctccacgagaaggacctgtcccagcagcagatgcaaagcgacctggacaaggctgacctcagtgccaggagggtccctggtgggtgctgcatgaggcaggcgtcactgcagaagagtgacagagctgggcctggcagtgaagcgtcttcagaagcagaatctggagaaggatcaggtcgacaaggacctcaccgagaagcttgaggccctggaatccctgcggctacaggagcaggcggccctggagacagaggatggagaggggctacagcggagcctaagggacctggcacaggccgtcctgtctgacgctgagagcggcagcctgcgtccaacagcgtccgaccgcagcctgcgggggctctcgggccagcggaccccgtctccaccgcggcgctcctcgccgggccgaggccgttcgccccgcagaggcccctccccggcctgctcagacgactccacgctcgcttgccctgattctctccgccctgcacttttgccagctgaaggtccagggagaagagcaacctggtccacagcctgcaggtggcccagcagcaggccgaggagctgccgcaggagcgggagaagctgcaggttgcccaggaggagctgcagcgccagcgggaccggctggaggaagagcaggaagaggcggtgcagaatggcgcacgggttcgccgggagcttgagcgcagccatagacaactagagcagctggaagggaagcgctcagtcctggccaaggagctggtggaggtgagggaggcgctgagccgcgccacgctgcaacgggacatgctgcaggccgagaagaccgaggtggccgaggcgctgaccaaggctgaggctggccgcatggagctcgagctctccgtgaccaagctgagggcagaggaggcctccctgcaggactccctgtccaagctgagcgccctcaacgagagccttgctcaggacaagttggatctgaactgccttgtcacccagctggaggaagaaaaggccacgctgcagggccggcagcggcaggcggagcaggaggccacagtggcgccggcagagcaggagtggctggaggagctgtggttggagcaggaggtggcacggcagggcctggagggctccctatgagtggcggagcaggcccaggaggcgctggagcaacagctccccacactgcaccatgagctcagttggctgcaggagcagctagcacaggggatcatgttcggacccccaggccagcccactgctgctccttggcactttcacggccctggcgtgtccccgtcatagtccttatcagtcccttgtatttacctggtcaccctccatctctgagggtatgggggccagatggctcttgctgccctgatgttttggggggtctgcctgggcccctcctggtgtgtcacacgcgtccagtcctggccccctaggaggcagcatggcgggagctggaggccgagcgggcccagctgcagagtcagctgcagcgtgagcaggaggagctgctggcccggcggaaggctgagaaggaacagctgagtgaggagattgctgccctgcagcaggagcatgacgagggcctcctcctggccgagagcgagaagcagcaggccttgtctctgaaggagtctgagaagatggcgctgtcagagaagttgatgggtacacggcacagcctggccaccatctccctggagatggagcggcagaaaccagatgcccagagccggcaggagcaggaccgggtaggcctgccgtcgtagggaggcttgcggagcaggagcgccctctctccaccgagctatcccgcggtttccagcatcccatctggcggactcctcttcctctctcttctcctactctgggtcttctatcctggtgttccttgaatgcctatcttccttttgtgcctcggaacctctcacgcctgccacaagttactcttttccttggtagttctgaactttaaataaggtaatgcctgtaagaatgccataaatgctcaataattgtcatctgttattattttcatcagtaacatcatctgaatcatcagtattgtctgcttttaacagctgcatttttcattgtccaaatatagtcacatacatttgaccattttataattattgaataataaatttgttctgctattttacaatgaaaaataatgctgcagagagcatttttgcacatgtatcgtggcagatgtaggccagaggctcttcttttatccatcctatggccaacctatgaatgtatacacgtttaatgagattttgccagcaatcaaagccttcagggaaaatgtccctagctctttactacatcagatcaaggactctggataattggcataacatcctggaatagctgaaacagagatattattctctgctctcctctgttgtctttgtcttttcacgtcttaataaaagtgctggtgacaagagtgtaaaaaaaaaaat

SEQ ID NO: 327318 - DNA, 2952 bp, Homo sapiens
agcggctgaacggacgccgtagccgagaggttgggcggatgttgtgaaccgggtcgcggcggccgaggctcgggcctccaggaccactggctgcccatgagagacgaaggatggcatccaagggggccggcgtgtctttctcccgcaagagctgtaggctgacctcagatgctgagaaatccagggtcacagttactcgggaggctgaggcaggagaatcgcttgaaccggagaggcggacgttgcagtgagccgaggtcaaaccagtgcactccagcctgggcaacagagcgagactccatctgaaaaagaaacaaaaacaaaaaaaaattttggacccgctgcagctgggaggggagctgtccaggaggccggcctgggaatgagcacaggcctgcggctggcagagagccgggtcgagccagccctggagaagcaggcccagctggaggagcagctgcgggacaaggtgctccacgagaaggacctgtcccagcagcagatgcaaagcgacctggacaaggctgacctcagtgccaggagggtccctggtgggtgctgcatgaggcaggcgtcactgcagaagagtgacagagctgggcctggcagtgaagcgtcttcagaagcagaatctggagaaggatcaggtcgacaaggacctcaccgagaagcttgaggccctggaatccctgcggctacaggagcaggcggccctggagacagaggatggagaggggctacagcggagcctaagggacctggcacaggccgtcctgtctgacgctgagagcggcagcctgcgtccaacagcgtccgaccgcagcctgcgggggctctcgggccagcggaccccgtctccaccgcggcgctcctcgccgggccgaggccgttcgccccgcagaggcccctccccggcctgctcagacgactccacgctcgcttgccctgattctctccgccctgcacttttgccagctgaaggtccagggagaagagcaacctggtccacagcctgcaggtggcccagcagcaggccgaggagctgccgcaggagcgggagaagctgcaggttgcccaggaggagctgcagcgccagcgggaccggctggaggaagagcaggaagaggcggtgcagaatggcgcacgggttcgccgggagcttgagcgcagccatagacaactagagcagctggaagggaagcgctcagtcctggccaaggagctggtggaggtgagggaggcgctgagccgcgccacgctgcaacgggacatgctgcaggccgagaagaccgaggtggccgaggcgctgaccaaggctgaggctggccgcatggagctcgagctctccgtgaccaagctgagggcagaggaggcctccctgcaggactccctgtccaagctgagcgccctcaacgagagccttgctcaggacaagttggatctgaactgccttgtcacccagctggaggaagaaaaggccacgctgcagggccggcagcggcaggcggagcaggaggccacagtggcgccggcagagcaggagtggctggaggagctgtggttggagcaggaggtggcacggcagggcctggagggctccctatgagtggcggagcaggcccaggaggcgctggagcaacagctccccacactgcaccatgagctcagttggctgcaggagcagctagcacaggggatcatgttcggacccccaggccagcccactgctgctccttggcactttcacggccctggcgtgtccccgtcatagtccttatcagtcccttgtatttacctggtcaccctccatctctgagggtatgggggccagatggctcttgctgccctgatgttttggggggtctgcctgggcccctcctggtgtgtcacacgcgtccagtcctggccccctaggaggcagcatggcgggagctggaggccgagcgggcccagctgcagagtcagctgcagcgtgagcaggaggagctgctggcccggcggaaggctgagaaggaacagctgagtgaggagattgctgccctgcagcaggagcatgacgagggcctcctcctggccgagagcgagaagcagcaggccttgtctctgaaggagtctgagaagatggcgctgtcagagaagttgatgggtacacggcacagcctggccaccatctccctggagatggagcggcagaaaccagatgcccagagccggcaggagcaggaccgggtaggcctgccgtcgtagggaggcttgcggagcaggagcgccctctctccaccgagctatcccgcggtttccagcatcccatctggcggactcctcttcctctctcttctcctactctgggtcttctatcctggtgttccttgaatgcctatcttccttttgtgcctcggaacctctcacgcctgccacaagttactcttttccttggtagttctgaactttaaataaggtaatgcctgtaagaatgccataaatgctcaataattgtcatctgttattattttcatcagtaacatcatctgaatcatcagtattgtctgcttttaacagctgcatttttcattgtccaaatatagtcacatacatttgaccattttataattattgaataataaatttgttctgctattttacaatgaaaaataatgctgcagagagcatttttgcacatgtatcgtggcagatgtaggccagaggctcttcttttatccatcctatggccaacctatgaatgtatacacgtttaatgagattttgccagcaatcaaagccttcagggaaaatgtccctagctctttactacatcagatcaaggactctggataattggcataacatcctggaatagctgaaacagagatattattctctgctctcctctgttgtctttgtcttttcacgtcttaataaaagtgctggtgacaagagtgtaaaaaaaaaaat

SEQ ID NO: 327319 - DNA, 2810 bp, Homo sapiens
agcggctgaacggacgccgtagccgagaggttgggcggatgttgtgaaccgggtcgcggcggccgaggctcgggcctccaggaccactggctgcccatgagagacgaaggatggcatccaagggggccggcgtgtctttctcccgcaagagctgtaggctgacctcagatgctgagaaatccagggtcacagggacccgctgcagctgggaggggagctgtccaggaggccggcctgggaatgagcacaggcctgcggctggcagagagccgggtcgagccagccctggagaagcaggcccagctggaggagcagctgcgggacaaggtgctccacgagaaggacctgtcccagcagcagatgcaaagcgacctggacaaggctgacctcagtgccaggagggtccctggtgggtgctgcatgaggcaggcgtcactgcagaagagtgacagagctgggcctggcagtgaagcgtcttcagaagcagaatctggagaaggatcaggtcgacaaggacctcaccgagaagcttgaggccctggaatccctgcggctacaggagcaggcggccctggagacagaggatggagaggggctacagcggagcctaagggacctggcacaggccgtcctgtctgacgctgagagcggcagcctgcgtccaacagcgtccgaccgcagcctgcgggggctctcgggccagcggaccccgtctccaccgcggcgctcctcgccgggccgaggccgttcgccccgcagaggcccctccccggcctgctcagacgactccacgctcgcttgccctgattctctccgccctgcacttttgccagctgaaggtccagggagaagagcaacctggtccacagcctgcaggtggcccagcagcaggccgaggagctgccgcaggagcgggagaagctgcaggttgcccaggaggagctgcagcgccagcgggaccggctggaggaagagcaggaagaggcggtgcagaatggcgcacgggttcgccgggagcttgagcgcagccatagacaactagagcagctggaagggaagcgctcagtcctggccaaggagctggtggaggtgagggaggcgctgagccgcgccacgctgcaacgggacatgctgcaggccgagaagaccgaggtggccgaggcgctgaccaaggctgaggctggccgcatggagctcgagctctccgtgaccaagctgagggcagaggaggcctccctgcaggactccctgtccaagctgagcgccctcaacgagagccttgctcaggacaagttggatctgaactgccttgtcacccagctggaggaagaaaaggccacgctgcagggccggcagcggcaggcggagcaggaggccacagtggcgccggcagagcaggagtggctggaggagctgtggttggagcaggaggtggcacggcagggcctggagggctccctatgagtggcggagcaggcccaggaggcgctggagcaacagctccccacactgcaccatgagctcagttggctgcaggagcagctagcacaggggatcatgttcggacccccaggccagcccactgctgctccttggcactttcacggccctggcgtgtccccgtcatagtccttatcagtcccttgtatttacctggtcaccctccatctctgagggtatgggggccagatggctcttgctgccctgatgttttggggggtctgcctgggcccctcctggtgtgtcacacgcgtccagtcctggccccctaggaggcagcatggcgggagctggaggccgagcgggcccagctgcagagtcagctgcagcgtgagcaggaggagctgctggcccggcggaaggctgagaaggaacagctgagtgaggagattgctgccctgcagcaggagcatgacgagggcctcctcctggccgagagcgagaagcagcaggccttgtctctgaaggagtctgagaagatggcgctgtcagagaagttgatgggtacacggcacagcctggccaccatctccctggagatggagcggcagaaaccagatgcccagagccggcaggagcaggaccgggtaggcctgccgtcgtagggaggcttgcggagcaggagcgccctctctccaccgagctatcccgcggtttccagcatcccatctggcggactcctcttcctctctcttctcctactctgggtcttctatcctggtgttccttgaatgcctatcttccttttgtgcctcggaacctctcacgcctgccacaagttactcttttccttggtagttctgaactttaaataaggtaatgcctgtaagaatgccataaatgctcaataattgtcatctgttattattttcatcagtaacatcatctgaatcatcagtattgtctgcttttaacagctgcatttttcattgtccaaatatagtcacatacatttgaccattttataattattgaataataaatttgttctgctattttacaatgaaaaataatgctgcagagagcatttttgcacatgtatcgtggcagatgtaggccagaggctcttcttttatccatcctatggccaacctatgaatgtatacacgtttaatgagattttgccagcaatcaaagccttcagggaaaatgtccctagctctttactacatcagatcaaggactctggataattggcataacatcctggaatagctgaaacagagatattattctctgctctcctctgttgtctttgtcttttcacgtcttaataaaagtgctggtgacaagagtgtaaaaaaaaaaat

SEQ ID NO: 327320 - DNA, 2901 bp, Homo sapiens
aggactaggcacagccttttttctggagtctaggcagcccccctgtgagctcaggggaatggatgggatttagtgtcatctggctgatatcaaggacttacttttagttagtaatcttttcttttctttatggctcactgcagccttggcctcctggtctgaagcaatcctcctacctcaggtcctctaatcccagctacgagggaggctgagacaggagaatcgcttgaacccaggatgtggaggttgcagtgagccaagatcacatcactgtattccggcctggacgacacagcgaaactctgtctcaaaagaaaaccacaaaaaaacaacttgtgccccttactcctgccacctgggtaagtcctccagtgctttcccatgagataaagctggtgggaacctcattcccatttcacagatgagaagtgtgaggtctggagaggagccacaacttgtttaaggtcacacaagctagtggatttgagaggctggggtggtcccgtattcacctctgttgctcccccaactccagagtgacagagctgggcctggcagtgaagcgtcttcagaagcagaatctggagaaggatcaggtcgacaaggacctcaccgagaagcttgaggccctggaatccctgcggctacaggagcaggcggccctggagacagaggatggagaggggctacagcggagcctaagggacctggcacaggccgtcctgtctgacgctgagagcggcagcctgcgtccaacagcgtccgaccgcagcctgcgggggctctcgggccagcggaccccgtctccaccgcggcgctcctcgccgggccgaggccgttcgccccgcagaggcccctccccggcctgctcagacgactccacgctcgcttgccctgattctctccgccctgcacttttgccagctgaaggtccagggagaagagcaacctggtccacagcctgcaggtggcccagcagcaggccgaggagctgccgcaggagcgggagaagctgcaggttgcccaggaggagctgcagcgccagcgggaccggctggaggaagagcaggaagaggcggtgcagaatggcgcacgggttcgccgggagcttgagcgcagccatagacaactagagcagctggaagggaagcgctcagtcctggccaaggagctggtggaggtgagggaggcgctgagccgcgccacgctgcaacgggacatgctgcaggccgagaagaccgaggtggccgaggcgctgaccaaggctgaggctggccgcatggagctcgagctctccgtgaccaagctgagggcagaggaggcctccctgcaggactccctgtccaagctgagcgccctcaacgagagccttgctcaggacaagttggatctgaactgccttgtcacccagctggaggaagaaaaggccacgctgcagggccggcagcggcaggcggagcaggaggccacagtggcgccggcagagcaggagtggctggaggagctgtggttggagcaggaggtggcacggcagggcctggagggctccctatgagtggcggagcaggcccaggaggcgctggagcaacagctccccacactgcaccatgagctcagttggctgcaggagcagctagcacaggggatcatgttcggacccccaggccagcccactgctgctccttggcactttcacggccctggcgtgtccccgtcatagtccttatcagtcccttgtatttacctggtcaccctccatctctgagggtatgggggccagatggctcttgctgccctgatgttttggggggtctgcctgggcccctcctggtgtgtcacacgcgtccagtcctggccccctaggaggcagcatggcgggagctggaggccgagcgggcccagctgcagagtcagctgcagcgtgagcaggaggagctgctggcccggcggaaggctgagaaggaacagctgagtgaggagattgctgccctgcagcaggagcatgacgagggcctcctcctggccgagagcgagaagcagcaggccttgtctctgaaggagtctgagaagatggcgctgtcagagaagttgatgggtacacggcacagcctggccaccatctccctggagatggagcggcagaaaccagatgcccagagccggcaggagcaggaccgggtaggcctgccgtcgtagggaggcttgcggagcaggagcgccctctctccaccgagctatcccgcggtttccagcatcccatctggcggactcctcttcctctctcttctcctactctgggtcttctatcctggtgttccttgaatgcctatcttccttttgtgcctcggaacctctcacgcctgccacaagttactcttttccttggtagttctgaactttaaataaggtaatgcctgtaagaatgccataaatgctcaataattgtcatctgttattattttcatcagtaacatcatctgaatcatcagtattgtctgcttttaacagctgcatttttcattgtccaaatatagtcacatacatttgaccattttataattattgaataataaatttgttctgctattttacaatgaaaaataatgctgcagagagcatttttgcacatgtatcgtggcagatgtaggccagaggctcttcttttatccatcctatggccaacctatgaatgtatacacgtttaatgagattttgccagcaatcaaagccttcagggaaaatgtccctagctctttactacatcagatcaaggactctggataattggcataacatcctggaatagctgaaacagagatattattctctgctctcctctgttgtctttgtcttttcacgtcttaataaaagtgctggtgacaagagtgtaaaaaaaaaaat

SEQ ID NO: 327321 - DNA, 1898 bp, Homo sapiens
gacctctggacctctggtcccagccataagtggactgacctctctttatggccgtatccctgctgttctggatgctcctgggggcagtgcctatagctcagggtcatcctgagattcagctcctggagtctgagagttgtggccacagcgcagagggtccttggcgggggggcctgcgctgtccgctgcagcctgggctctgagcagtgctatccctagaccttactcaggggatcctctgaactctggccctgccctgcagcttgagctatttttgcacagctttgcggtgcatggcttttaaatggctccataagcagcaggctttctgcggtgatttttttttccatctcacgccgtatcccctccttgtctcccctcccctgtctccgagggtccatctctctgggtctcttcttgtctctcctcacctcctcccgacctttctgcccttcctcatctcttggggcctgaccctgcaggctgaggctggccgcatggagctcgagctctccgtgaccaagctgagggcagaggaggcctccctgcaggactccctgtccaagctgagcgccctcaacgagagccttgctcaggacaagttggatctgaactgccttgtcacccagctggaggaagaaaaggccacgctgcagggccggcagcggcaggcggagcaggaggccacagtggcgccggcagagcaggagtggctggaggagctgtggttggagcaggaggtggcacggcagggcctggagggctccctatgagtggcggagcaggcccaggaggcgctggagcaacagctccccacactgcaccatgagctcagttggctgcaggagcagctagcacaggaggcagcatggcgggagctggaggccgagcgggcccagctgcagagtcagctgcagcgtgagcaggaggagctgctggcccggcggaaggctgagaaggaacagctgagtgaggagattgctgccctgcagcaggagcatgacgagggcctcctcctggccgagagcgagaagcagcaggccttgtctctgaaggagtctgagaagatggcgctgtcagagaagttgatgggtacacggcacagcctggccaccatctccctggagatggagcggcagaaaccagatgcccagagccggcaggagcaggaccgggtaggcctgccgtcgtagggaggcttgcggagcaggagcgccctctctccaccgagctatcccgcggtttccagcatcccatctggcggactcctcttcctctctcttctcctactctgggtcttctatcctggtgttccttgaatgcctatcttccttttgtgcctcggaacctctcacgcctgccacaagttactcttttccttggtagttctgaactttaaataaggtaatgcctgtaagaatgccataaatgctcaataattgtcatctgttattattttcatcagtaacatcatctgaatcatcagtattgtctgcttttaacagctgcatttttcattgtccaaatatagtcacatacatttgaccattttataattattgaataataaatttgttctgctattttacaatgaaaaataatgctgcagagagcatttttgcacatgtatcgtggcagatgtaggccagaggctcttcttttatccatcctatggccaacctatgaatgtatacacgtttaatgagattttgccagcaatcaaagccttcagggaaaatgtccctagctctttactacatcagatcaaggactctggataattggcataacatcctggaatagctgaaacagagatattattctctgctctcctctgttgtctttgtcttttcacgtcttaataaaagtgctggtgacaagagtgtaaaaaaaaaaat

SEQ ID NO: 327322 - DNA, 461 bp, Homo sapiens
agcggctgaacggacgccgtagccgagaggttgggcggatgttgtgaaccgggtcgcggcggccgaggctcggggtgagtgaggggcggcagggctctgagcctggcgggttccggctattcccttcgcggtccagtttagtccagtgcgagggcacctgcagcgccgggatctgagtgcgaaactccgagcggaagctggtctggcaggtcctctggagcttggggccaggcgggggcgacttgggggagccatccttgggctcccagacggacctccaggaccactggctgcccatgagagacgaaggatggcatccaagggggccggcgtgtctttctcccgcaagagctgtaggctgacctcagatgctgagaaatccagggtcacagcattgtgcaggagaagctgctgaatgactacctgacgcctgcgacctatgaggtccgagctctatctac

SEQ ID NO: 327323 - DNA, 262 bp, Homo sapiens
aagccaggttcttctgctggagtgtgtgagtgaaatgagtctgctatgggcagggtcagggaaggcttcctggaggcaggtgccttggaagacgggaggatgtagctcatggctagaggagcagccagccaccttccctggagagagcagccccagcatcccctctgctcccgctccccttgtcctgaagggagaagagcaacctggtccacagcctgcaggtggcccagcagcaggccgaggagctgccgcaggagcggga

SEQ ID NO: 327324 - DNA, 158 bp, Homo sapiens
agcaggaggtggcacggcagggcctggagggctccctatgagtggcggagcaggcccaggaggcgctggagcaacagctccccacactgcaccatgagctcagttggctgcaggagcagctagcacaggtaggccaaactgtgtgtggggtggtctgg

SEQ ID NO: 327325 - DNA, 508 bp, Homo sapiens
tctgaactctggccctgccctgcagcttgagctatttttgcacagctttgcggtgcatggcttttaaatggctccataagcagcaggctttctgcggtgatttttttttccatctcacgccgtatcccctccttgtctcccctcccctgtctccgagggtccatctctctgggtctcttcttgtctctcctcacctcctcccgacctttctgcccttcctcatctcttggggcctgaccctgcaggctgaggctggccgcatggagctcgagctctccgtgaccaagctgagggcagaggaggcctccctgcaggactccctgtccaagctgagcgccctcaacgagagccttgctcaggacaagttggatctgaactgccttgtcacccaggtacactgtgcacctgcgggcccacctaccttgcccacccgtcctccccactcagtgaggcaccctgggcccggccctgcacctgtcttggcccctgcctccctttctgtctctgg

SEQ ID NO: 327326 - DNA, 3036 bp, Homo sapiens
agcggctgaacggacgccgtagccgagaggttgggcggatgttgtgaaccgggtcgcggcggccgaggctcgggcctccaggaccactggctgcccatgagagacgaaggatggcatccaagggggccggcgtgtctttctcccgcaagagctgtaggctgacctcagatgctgagaaatccagggtcacaggcattgtgcaggagaagctgctgaatgactacctgaaccgcatctttcctcttctgaccatgcacccccagcagccaccggcagttactcgggaggctgaggcaggagaatcgcttgaaccggagaggcggacgttgcagtgagccgaggtcaaaccagtgcactccagcctgggcaacagagcgagactccatctgaaaaagaaacaaaaacaaaaaaaaattttggacccgctgcagctgggaggggagctgtccaggaggccggcctgggaatgagcacaggcctgcggctggcagagagccgggtcgagccagccctggagaagcaggcccagctggaggagcagctgcgggacaaggtgctccacgagaaggacctgtcccagcagcagatgcaaagcgacctggacaaggctgacctcagtgccaggagggtccctggtgggtgctgcatgaggcaggcgtcactgcagaagagtgacagagctgggcctggcagtgaagcgtcttcagaagcagaatctggagaaggatcaggtcgacaaggacctcaccgagaagcttgaggccctggaatccctgcggctacaggagcaggcggccctggagacagaggatggagaggggctacagcggagcctaagggacctggcacaggccgtcctgtctgacgctgagagcggcagcctgcgtccaacagcgtccgaccgcagcctgcgggggctctcgggccagcggaccccgtctccaccgcggcgctcctcgccgggccgaggccgttcgccccgcagaggcccctccccggcctgctcagacgactccacgctcgcttgccctgattctctccgccctgcacttttgccagctgaaggtccagggagaagagcaacctggtccacagcctgcaggtggcccagcagcaggccgaggagctgccgcaggagcgggagaagctgcaggttgcccaggaggagctgcagcgccagcgggaccggctggaggaagagcaggaagaggcggtgcagaatggcgcacgggttcgccgggagcttgagcgcagccatagacaactagagcagctggaagggaagcgctcagtcctggccaaggagctggtggaggtgagggaggcgctgagccgcgccacgctgcaacgggacatgctgcaggccgagaagaccgaggtggccgaggcgctgaccaaggctgaggctggccgcatggagctcgagctctccgtgaccaagctgagggcagaggaggcctccctgcaggactccctgtccaagctgagcgccctcaacgagagccttgctcaggacaagttggatctgaactgccttgtcacccagctggaggaagaaaaggccacgctgcagggccggcagcggcaggcggagcaggaggccacagtggcgccggcagagcaggagtggctggaggagctgtggttggagcaggaggtggcacggcagggcctggagggctccctatgagtggcggagcaggcccaggaggcgctggagcaacagctccccacactgcaccatgagctcagttggctgcaggagcagctagcacaggggatcatgttcggacccccaggccagcccactgctgctccttggcactttcacggccctggcgtgtccccgtcatagtccttatcagtcccttgtatttacctggtcaccctccatctctgagggtatgggggccagatggctcttgctgccctgatgttttggggggtctgcctgggcccctcctggtgtgtcacacgcgtccagtcctggccccctaggaggcagcatggcgggagctggaggccgagcgggcccagctgcagagtcagctgcagcgtgagcaggaggagctgctggcccggcggaaggctgagaaggaacagctgagtgaggagattgctgccctgcagcaggagcatgacgagggcctcctcctggccgagagcgagaagcagcaggccttgtctctgaaggagtctgagaagatggcgctgtcagagaagttgatgggtacacggcacagcctggccaccatctccctggagatggagcggcagaaaccagatgcccagagccggcaggagcaggaccgggtaggcctgccgtcgtagggaggcttgcggagcaggagcgccctctctccaccgagctatcccgcggtttccagcatcccatctggcggactcctcttcctctctcttctcctactctgggtcttctatcctggtgttccttgaatgcctatcttccttttgtgcctcggaacctctcacgcctgccacaagttactcttttccttggtagttctgaactttaaataaggtaatgcctgtaagaatgccataaatgctcaataattgtcatctgttattattttcatcagtaacatcatctgaatcatcagtattgtctgcttttaacagctgcatttttcattgtccaaatatagtcacatacatttgaccattttataattattgaataataaatttgttctgctattttacaatgaaaaataatgctgcagagagcatttttgcacatgtatcgtggcagatgtaggccagaggctcttcttttatccatcctatggccaacctatgaatgtatacacgtttaatgagattttgccagcaatcaaagccttcagggaaaatgtccctagctctttactacatcagatcaaggactctggataattggcataacatcctggaatagctgaaacagagatattattctctgctctcctctgttgtctttgtcttttcacgtcttaataaaagtgctggtgacaagagtgtaaaaaaaaaaat

SEQ ID NO: 327327 - DNA, 2796 bp, Homo sapiens
agcggctgaacggacgccgtagccgagaggttgggcggatgttgtgaaccgggtcgcggcggccgaggctcggggtgagtgaggggcggcagggctctgagcctggcgggttccggctattcccttcgcggtccagtttagtccagtgcgagggcacctgcagcgccgggatctgagtgcgaaactccgagcggaagctggtctggcagcctccaggaccactggctgcccatgagagacgaaggatggcatccaagggggccggcgtgtctttctcccgcaagagctgtaggctgacctcagatgctgagaaatccagggtcacaggcattgtgcaggagaagctgctgaatgactacctgaaccgcatctttcctcttctgaccatgcacccccagcagccaccggcagttactcgggaggctgaggcaggagaatcgcttgaaccggagaggcggacgttgcagtgagccgaggtcaaaccagtgcactccagcctgggcaacagagcgagactccatctgaaaaagaaacaaaaacaaaaaaaaattttggacccgctgcagctgggaggggagctgtccaggaggccggcctgggaatgagcacaggccgtcctgtctgacgctgagagcggcagcctgcgtccaacagcgtccgaccgcagcctgcgggggctctcgggccagcggaccccgtctccaccgcggcgctcctcgccgggccgaggccgttcgccccgcagaggcccctccccggcctgctcagacgactccacgctcgcttgccctgattctctccgccctgcacttttgccagctgaaggtccagggagaagagcaacctggtccacagcctgcaggtggcccagcagcaggccgaggagctgccgcaggagcgggagaagctgcaggttgcccaggaggagctgcagcgccagcgggaccggctggaggaagagcaggaagaggcggtgcagaatggcgcacgggttcgccgggagcttgagcgcagccatagacaactagagcagctggaagggaagcgctcagtcctggccaaggagctggtggaggtgagggaggcgctgagccgcgccacgctgcaacgggacatgctgcaggccgagaagaccgaggtggccgaggcgctgaccaaggctgaggctggccgcatggagctcgagctctccgtgaccaagctgagggcagaggaggcctccctgcaggactccctgtccaagctgagcgccctcaacgagagccttgctcaggacaagttggatctgaactgccttgtcacccagctggaggaagaaaaggccacgctgcagggccggcagcggcaggcggagcaggaggccacagtggcgccggcagagcaggagtggctggaggagctgtggttggagcaggaggtggcacggcagggcctggagggctccctatgagtggcggagcaggcccaggaggcgctggagcaacagctccccacactgcaccatgagctcagttggctgcaggagcagctagcacaggggatcatgttcggacccccaggccagcccactgctgctccttggcactttcacggccctggcgtgtccccgtcatagtccttatcagtcccttgtatttacctggtcaccctccatctctgagggtatgggggccagatggctcttgctgccctgatgttttggggggtctgcctgggcccctcctggtgtgtcacacgcgtccagtcctggccccctaggaggcagcatggcgggagctggaggccgagcgggcccagctgcagagtcagctgcagcgtgagcaggaggagctgctggcccggcggaaggctgagaaggaacagctgagtgaggagattgctgccctgcagcaggagcatgacgagggcctcctcctggccgagagcgagaagcagcaggccttgtctctgaaggagtctgagaagatggcgctgtcagagaagttgatgggtacacggcacagcctggccaccatctccctggagatggagcggcagaaaccagatgcccagagccggcaggagcaggaccgggtaggcctgccgtcgtagggaggcttgcggagcaggagcgccctctctccaccgagctatcccgcggtttccagcatcccatctggcggactcctcttcctctctcttctcctactctgggtcttctatcctggtgttccttgaatgcctatcttccttttgtgcctcggaacctctcacgcctgccacaagttactcttttccttggtagttctgaactttaaataaggtaatgcctgtaagaatgccataaatgctcaataattgtcatctgttattattttcatcagtaacatcatctgaatcatcagtattgtctgcttttaacagctgcatttttcattgtccaaatatagtcacatacatttgaccattttataattattgaataataaatttgttctgctattttacaatgaaaaataatgctgcagagagcatttttgcacatgtatcgtggcagatgtaggccagaggctcttcttttatccatcctatggccaacctatgaatgtatacacgtttaatgagattttgccagcaatcaaagccttcagggaaaatgtccctagctctttactacatcagatcaaggactctggataattggcataacatcctggaatagctgaaacagagatattattctctgctctcctctgttgtctttgtcttttcacgtcttaataaaagtgctggtgacaagagtgtaaaaaaaaaaat

SEQ ID NO: 327328 - DNA, 2582 bp, Homo sapiens
agcggctgaacggacgccgtagccgagaggttgggcggatgttgtgaaccgggtcgcggcggccgaggctcgggttactcgggaggctgaggcaggagaatcgcttgaaccggagaggcggacgttgcagtgagccgaggtcaaaccagtgcactccagcctgggcaacagagcgagactccatctgaaaaagaaacaaaaacaaaaaaaaattttagtgacagagctgggcctggcagtgaagcgtcttcagaagcagaatctggagaaggatcaggtcgacaaggacctcaccgagaagcttgaggccctggaatccctgcggctacaggagcaggcggccctggagacagaggatggagaggggctacagcggagcctaagggacctggcacaggccgtcctgtctgacgctgagagcggcagcctgcgtccaacagcgtccgaccgcagcctgcgggggctctcgggccagcggaccccgtctccaccgcggcgctcctcgccgggccgaggccgttcgccccgcagaggcccctccccggcctgctcagacgactccacgctcgcttgccctgattctctccgccctgcacttttgccagctgaaggtccagggagaagagcaacctggtccacagcctgcaggtggcccagcagcaggccgaggagctgccgcaggagcgggagaagctgcaggttgcccaggaggagctgcagcgccagcgggaccggctggaggaagagcaggaagaggcggtgcagaatggcgcacgggttcgccgggagcttgagcgcagccatagacaactagagcagctggaagggaagcgctcagtcctggccaaggagctggtggaggtgagggaggcgctgagccgcgccacgctgcaacgggacatgctgcaggccgagaagaccgaggtggccgaggcgctgaccaaggctgaggctggccgcatggagctcgagctctccgtgaccaagctgagggcagaggaggcctccctgcaggactccctgtccaagctgagcgccctcaacgagagccttgctcaggacaagttggatctgaactgccttgtcacccagctggaggaagaaaaggccacgctgcagggccggcagcggcaggcggagcaggaggccacagtggcgccggcagagcaggagtggctggaggagctgtggttggagcaggaggtggcacggcagggcctggagggctccctatgagtggcggagcaggcccaggaggcgctggagcaacagctccccacactgcaccatgagctcagttggctgcaggagcagctagcacaggggatcatgttcggacccccaggccagcccactgctgctccttggcactttcacggccctggcgtgtccccgtcatagtccttatcagtcccttgtatttacctggtcaccctccatctctgagggtatgggggccagatggctcttgctgccctgatgttttggggggtctgcctgggcccctcctggtgtgtcacacgcgtccagtcctggccccctaggaggcagcatggcgggagctggaggccgagcgggcccagctgcagagtcagctgcagcgtgagcaggaggagctgctggcccggcggaaggctgagaaggaacagctgagtgaggagattgctgccctgcagcaggagcatgacgagggcctcctcctggccgagagcgagaagcagcaggccttgtctctgaaggagtctgagaagatggcgctgtcagagaagttgatgggtacacggcacagcctggccaccatctccctggagatggagcggcagaaaccagatgcccagagccggcaggagcaggaccgggtaggcctgccgtcgtagggaggcttgcggagcaggagcgccctctctccaccgagctatcccgcggtttccagcatcccatctggcggactcctcttcctctctcttctcctactctgggtcttctatcctggtgttccttgaatgcctatcttccttttgtgcctcggaacctctcacgcctgccacaagttactcttttccttggtagttctgaactttaaataaggtaatgcctgtaagaatgccataaatgctcaataattgtcatctgttattattttcatcagtaacatcatctgaatcatcagtattgtctgcttttaacagctgcatttttcattgtccaaatatagtcacatacatttgaccattttataattattgaataataaatttgttctgctattttacaatgaaaaataatgctgcagagagcatttttgcacatgtatcgtggcagatgtaggccagaggctcttcttttatccatcctatggccaacctatgaatgtatacacgtttaatgagattttgccagcaatcaaagccttcagggaaaatgtccctagctctttactacatcagatcaaggactctggataattggcataacatcctggaatagctgaaacagagatattattctctgctctcctctgttgtctttgtcttttcacgtcttaataaaagtgctggtgacaagagtgtaaaaaaaaaaat

SEQ ID NO: 327329 - DNA, 2950 bp, Homo sapiens
agcggctgaacggacgccgtagccgagaggttgggcggatgttgtgaaccgggtcgcggcggccgaggctcggggtgagtgaggggcggcagggctctgagcctggcgggttccggctattcccttcgcggtccagtttagtccagtgcgagggcacctgcagcgccgggatctgagtgcgaaactccgagcggaagctggtctggcagcctccaggaccactggctgcccatgagagacgaaggatggcatccaagggggccggcgtgtctttctcccgcaagagctgtaggctgacctcagatgctgagaaatccagggtcacaggcattgtgcaggagaagctgctgaatgactacctgaaccgcatctttcctcttctgaccatgcacccccagcagccaccggcagttactcgggaggctgaggcaggagaatcgcttgaaccggagaggcggacgttgcagtgagccgaggtcaaaccagtgcactccagcctgggcaacagagcgagactccatctgaaaaagaaacaaaaacaaaaaaaaattttggacccgctgcagctgggaggggagctgtccaggaggccggcctgggaatgagcacaggcctgcggctggcagagagccgggtcgagccagccctggagaagcaggcccagctggaggagcagctgcgggacaaggtgctccacgagaaggacctgtcccagcagcagatgcaaagcgacctggacaaggctgacctcagtgccaggagggtccctggtgggtgctgcatgaggcaggcgtcactgcagaagagtgacagagctgggcctggcagtgaagcgtcttcagaagcagaatctggagaaggatcaggtcgacaaggacctcaccgagaagcttgaggccctggaatccctgcggctacaggagcaggcggccctggagacagaggatggagaggggctacagcggagcctaagggacctggcacaggccgtcctgtctgacgctgagagcggcagcctgcgtccaacagcgtccgaccgcagcctgcgggggctctcgggccagcggaccccgtctccaccgcggcgctcctcgccgggccgaggccgttcgccccgcagaggcccctccccggcctgctcagacgactccacgctcgcttgccctgattctctccgccctgcacttttgccagctgaaggtccagggagaagagcaacctggtccacagcctgcaggtggcccagcagcaggccgaggagctgccgcaggagcgggagaagctgcaggttgcccaggaggagctgcagcgccagcgggaccggctggaggaagagcaggaagaggcggtgcagaatggcgcacgggttcgccgggagcttgagcgcagccatagacaactagagcagctggaagggaagcgctcagtcctggccaaggagctggtggaggtgagggaggcgctgagccgcgccacgctgcaacgggacatgctgcaggccgagaagaccgaggtggccgaggcgctgaccaaggctgaggctggccgcatggagctcgagctctccgtgaccaagctgagggcagaggaggcctccctgcaggactccctgtccaagctgagcgccctcaacgagagccttgctcaggacaagttggatctgaactgccttgtcacccagctggaggaagaaaaggccacgctgcagggccggcagcggcaggcggagcaggaggccacagtggcgccggcagagcaggagtggctggaggagctgtggttggagcaggaggtggcacggcagggcctggagggctccctatgagtggcggagcaggcccaggaggcgctggagcaacagctccccacactgcaccatgagctcagttggctgcaggagcagctagcacaggaggcagcatggcgggagctggaggccgagcgggcccagctgcagagtcagctgcagcgtgagcaggaggagctgctggcccggcggaaggctgagaaggaacagctgagtgaggagattgctgccctgcagcaggagcatgacgagggcctcctcctggccgagagcgagaagcagcaggccttgtctctgaaggagtctgagaagatggcgctgtcagagaagttgatgggtacacggcacagcctggccaccatctccctggagatggagcggcagaaaccagatgcccagagccggcaggagcaggaccgggtaggcctgccgtcgtagggaggcttgcggagcaggagcgccctctctccaccgagctatcccgcggtttccagcatcccatctggcggactcctcttcctctctcttctcctactctgggtcttctatcctggtgttccttgaatgcctatcttccttttgtgcctcggaacctctcacgcctgccacaagttactcttttccttggtagttctgaactttaaataaggtaatgcctgtaagaatgccataaatgctcaataattgtcatctgttattattttcatcagtaacatcatctgaatcatcagtattgtctgcttttaacagctgcatttttcattgtccaaatatagtcacatacatttgaccattttataattattgaataataaatttgttctgctattttacaatgaaaaataatgctgcagagagcatttttgcacatgtatcgtggcagatgtaggccagaggctcttcttttatccatcctatggccaacctatgaatgtatacacgtttaatgagattttgccagcaatcaaagccttcagggaaaatgtccctagctctttactacatcagatcaaggactctggataattggcataacatcctggaatagctgaaacagagatattattctctgctctcctctgttgtctttgtcttttcacgtcttaataaaagtgctggtgacaagagtgtaaaaaaaaaaat

SEQ ID NO: 327330 - DNA, 2803 bp, Homo sapiens
agcggctgaacggacgccgtagccgagaggttgggcggatgttgtgaaccgggtcgcggcggccgaggctcggggtgagtgaggggcggcagggctctgagcctggcgggttccggctattcccttcgcggtccagtttagtccagtgcgagggcacctgcagcgccgggatctgagtgcgaaactccgagcggaagctggtctggcagcctccaggaccactggctgcccatgagagacgaaggatggcatccaagggggccggcgtgtctttctcccgcaagagctgtaggctgacctcagatgctgagaaatccagggtcacaggcattgtgcaggagaagctgctgaatgactacctgaaccgcatctttcctcttctgaccatgcacccccagcagccaccggcagttactcgggaggctgaggcaggagaatcgcttgaaccggagaggcggacgttgcagtgagccgaggtcaaaccagtgcactccagcctgggcaacagagcgagactccatctgaaaaagaaacaaaaacaaaaaaaaattttggacccgctgcagctgggaggggagctgtccaggaggccggcctgggaatgagcacaggcctgcggctggcagagagccgggtcgagccagccctggagaagcaggcccagctggaggagcagctgcgggacaaggtgctccacgagaaggacctgtcccagcagcagatgcaaagcgacctggacaaggctgacctcagtgccaggagggtccctggtgggtgctgcatgaggcaggcgtcactgcagaagagtgacagagctgggcctggcagtgaagcgtcttcagaagcagaatctggagaaggatcaggtcgacaaggacctcaccgagaagcttgaggccctggaatccctgcggctacaggagcaggcggccctggagacagaggatggagaggggctacagcggagcctaagggacctggcacaggccgtcctgtctgacgctgagagcggcagcctgcgtccaacagcgtccgaccgcagcctgcgggggctctcgggccagcggaccccgtctccaccgcggcgctcctcgccgggccgaggccgttcgccccgcagaggcccctccccggcctgctcagacgactccacgctcgcttgccctgattctctccgccctgcacttttgccagctgaaggtccagggagaagagcaacctggtccacagcctgcaggtggcccagcagcaggccgaggagctgccgcaggagcgggagaagctgcaggttgcccaggaggagctgcagcgccagcgggaccggctggaggaagagcaggaagaggcggtgcagaatggcgcacgggttcgccgggagcttgagcgcagccatagacaactagagcagctggaagggaagcgctcagtcctggccaaggagctggtggaggtgagggaggcgctgagccgcgccacgctgcaacgggacatgctgcaggccgagaagaccgaggtggccgaggcgctgaccaagctggaggaagaaaaggccacgctgcagggccggcagcggcaggcggagcaggaggccacagtggcgccggcagagcaggagtggctggaggagctgtggttggagcaggaggtggcacggcagggcctggagggctccctatgagtggcggagcaggcccaggaggcgctggagcaacagctccccacactgcaccatgagctcagttggctgcaggagcagctagcacaggaggcagcatggcgggagctggaggccgagcgggcccagctgcagagtcagctgcagcgtgagcaggaggagctgctggcccggcggaaggctgagaaggaacagctgagtgaggagattgctgccctgcagcaggagcatgacgagggcctcctcctggccgagagcgagaagcagcaggccttgtctctgaaggagtctgagaagatggcgctgtcagagaagttgatgggtacacggcacagcctggccaccatctccctggagatggagcggcagaaaccagatgcccagagccggcaggagcaggaccgggtaggcctgccgtcgtagggaggcttgcggagcaggagcgccctctctccaccgagctatcccgcggtttccagcatcccatctggcggactcctcttcctctctcttctcctactctgggtcttctatcctggtgttccttgaatgcctatcttccttttgtgcctcggaacctctcacgcctgccacaagttactcttttccttggtagttctgaactttaaataaggtaatgcctgtaagaatgccataaatgctcaataattgtcatctgttattattttcatcagtaacatcatctgaatcatcagtattgtctgcttttaacagctgcatttttcattgtccaaatatagtcacatacatttgaccattttataattattgaataataaatttgttctgctattttacaatgaaaaataatgctgcagagagcatttttgcacatgtatcgtggcagatgtaggccagaggctcttcttttatccatcctatggccaacctatgaatgtatacacgtttaatgagattttgccagcaatcaaagccttcagggaaaatgtccctagctctttactacatcagatcaaggactctggataattggcataacatcctggaatagctgaaacagagatattattctctgctctcctctgttgtctttgtcttttcacgtcttaataaaagtgctggtgacaagagtgtaaaaaaaaaaat

SEQ ID NO: 327331 - DNA, 2073 bp, Homo sapiens
ggcggggctctcggggccgctgccgccgccgccgccgcgcattgtgcagcaggcgggcccccgcgcggcagggccctggacccgcgcggctcccggggatggtgagcaaggcgctgctgcgcctcgtgtctgccgtcaaccgcaggaggatgaagctgctgctgggcatcgccttgctggcctacgtcgcctctgtttggggcaacttcgttaatatgaggtctatccaggaaaatggtgaactaaaaattgaaagcaagattgaagagatggttgaaccactaagagagaaaatcagagatttagaaaaaagctttacccagaaatacccaccagtaaagtttttatcagaaaaggatcggaaaagaattttgataacaggaggcgcagggttcgtgggctcccatctaactgacaaactcatgatggacggccacgaggtgaccgtggtggacaatttcttcacgggcaggaagagaaacgtggagcactggatcggacatgagaacttcgagttgattaaccacgacgtggtggagcccctctacatcgaggttgaccagatataccatctggcatctccagcctcccctccaaactacatgtataatcctatcaagacattaaagaccaatacgattgggacattaaacatgttggggctggcaaaacgagtcggtgcccgtctgctcctggcctccacatcggaggtgtatggagatcctgaagtccaccctcaaagtgaggattactggggccacgtgaatccaataggacctcgggcctgctacgatgaaggcaaacgtgttgcagagaccatgtgctatgcctacatgaagcaggaaggcgtggaagtgcgagtggccagaatcttcaacacctttgggccacgcatgcacatgaacgatgggcgagtagtcagcaacttcatcctgcaggcgctccagggggagccactcacggtatacggatccgggtctcagacaagggcgttccagtacgtcagcgatctagtgaatggcctcgtggctctcatgaacagcaacgtcagcagcccggtcaacctggggaacccagaagaacacacaatcctagaatttgctcagttaattaaaaaccttgttggtagcggaagtgaaattcagtttctctccgaagcccaggatgacccacagaaaagaaaaccagacatcaaaaaagcaaagctgatgctggggtgggagcccgtggtcccgctggaggaaggtttaaacaaagcaattcactacttccgtaaagaactcgagtaccaggcaaataatcagtacatccccaaaccaaagcctgccagaataaagaaaggacggactcgccacagctgaactcctcacttttaggacacaagactaccattgtacacttgatgggatgtatttttggcttttttttgttgtcgtttaaagaaagactttaacaggtgtcatgaagaacaaactggaatttcattctgaagcttgctttaatgaaatggatgtgcctaaaagctcccctcaaaaaactgcagattttgccttgcactttttgaatctctctttttatgtaaaatagcgtagatgcatctctgcgtattttcaagtttttttatcttgctgtgagagcatatgttgtgactgtcgttgacagttttatttactggtttctttgtgaagctgaaaaggaacattaagcgggacaaaaaatgccgattttatttataaaagtgggtacttaataaatgagtcgttatactatgcataaagaaaaatcctagcagtattgtcaggtggtggtgcgccggcattgattttagggcagataaaagaattctgtgtgagagctttatgtttctcttttaattcagagtttttccaaggtctacttttgagttgcaaacttgactttgaaatattcctgttggtcatgatcaaggatatttgaaatcactactgtgttttgctgcgtatctggggcgggggcaggttggggggcacaaagttaacatattcttggttaaccatggttaaatatgctattttaataaaatattgaaactca

SEQ ID NO: 327332 - DNA, 1923 bp, Homo sapiens
aggataggaactggagttattgttaatgttacaggaagaacacattctcaaaggagaggggggtggtgggaaactttgattttcatagggttttcagtttcctctcaaatgggaggatgcagcagtgccgctacttaactgaacgtctcgacagtctgatggggcggccctcagccttccggagcagcagtgggactgacctgtccagtgaggaagaaacactgaaccagatggaatggcctttggggatggaaaaaccccagtttacgctcatctcttctctcagctaacttttgtggagccctgttcccaaactggcctgggccagagcaccgtggaggggtatttgttgtaaatggaaggtttcgaggcccgcctggaaatcctgaagggtgagacctgcagtgggctcaggagtctgcatttgtgggtgaccgagggggcctcccctccctctagagtccacactgtggagagcatcaggaagggaaaggcctgcatcttgtgctcagtgagctcatcgtctagtgaggaaggcatgtgtgaatctctggacaaggcagcgctgagctgttgtggactagtggtgcaggcaagggattacttctgaccaaggatggtgagaaggtttcccatacagactgacgtctggattgagctttgaagaagaaagccaggactggagcagacgacgaggagggaagagtttgaccagatataccatctggcatctccagcctcccctccaaactacatgtataatcctatcaagacattaaagaccaatacgattgggacattaaacatgttggggctggcaaaacgagtcggtgcccgtctgctcctggcctccacatcggaggtgtatggagatcctgaagtccaccctcaaagtgaggattactggggccacgtgaatccaataggacctcgggcctgctacgatgaaggcaaacgtgttgcagagaccatgtgctatgcctacatgaagcaggaaggcgtggaagtgcgagtggccagaatcttcaacacctttgggccacgcatgcacatgaacgatgggcgagtagtcagcaacttcatcctgcaggcgctccagggggagccactcacggtatacggatccgggtctcagacaagggcgttccagtacgtcagcgatctagtgaatggcctcgtggctctcatgaacagcaacgtcagcagcccggtcaacctggggaacccagaagaacacacaatcctagaatttgctcagttaattaaaaaccttgttggtagcggaagtgaaattcagtttctctccgaagcccaggatgacccacagaaaagaaaaccagacatcaaaaaagcaaagctgatgctggggtgggagcccgtggtcccgctggaggaaggtttaaacaaagcaattcactacttccgtaaagaactcgagtaccaggcaaataatcagtacatccccaaaccaaagcctgccagaataaagaaaggacggactcgccacagctgaactcctcacttttaggacacaagactaccattgtacacttgatgggatgtatttttggcttttttttgttgtcgtttaaagaaagactttaacaggtgtcatgaagaacaaactggaatttcattctgaagcttgctttaatgaaatggatgtgcctaaaagctcccctcaaaaaactgcagattttgccttgcactttttgaatctctctttttatgtaaaatagcgtagatgcatctctgcgtattttcaagtttttttatcttgctgtgagagcatatgttgtgactgtcgttgacagttttatttactggtttctttgtgaagctgaaaaggaacattaagcgggacaaaaaatgccgattttatttataaaagtgggtacttaataaatgagtcgttatactatg

SEQ ID NO: 327333 - DNA, 2029 bp, Homo sapiens
ggcggggctctcggggccgctgccgccgccgccgccgcgcattgtgcagcaggcgggcccccgcgcggcagggccctggacccgcgcggctcccggggatggtgagcaaggcgctgctgcgcctcgtgtctgccgtcaaccgcaggaggatgaagctgctgctgggcatcgccttgctggcctacgtcgcctctgtttggggcaacttcgttaatatgaggtctatccaggaaaatggtgaactaaaaattgaaagcaagattgaagagatggttgaaccactaagagagaaaatcagagatttagaaaaaagctttacccagaaatacccaccagtaaagtttttatcagaaaaggatcggaaaagaattttgataacaggaggcgcagggttcgtgggctcccatctaactgacaaactcatgatggacggccacgaggtgaccgtggtggacaatttcttcacgggcaggaagagaaacgtggagcactggatcggacatgagaacttcgagttgattaaccacgacgtggtggagcccctctacatcgaggttgaccagatataccatctggcatctccagcctcccctccaaactacatgtataatcctatcaagacattaaagaccaatacgattgggacattaaacatgttggggctggcaaaacgagtcggtgcccgtctgctcctggcctccacatcggaggtgtatggagatcctgaagtccaccctcaaagtgaggattactggggccacgtgaatccaataggacctcgggcctgctacgatgaaggcaaacgtgttgcagagaccatgtgctatgcctacatgaagcaggaaggcgtggaagtgcgagtggccagaatcttcaacacctttgggccacgcatgcacatgaacgatgggcgagtagtcagcaacttcatcctgcaggcgctccagggggagccactcacgcgatctagtgaatggcctcgtggctctcatgaacagcaacgtcagcagcccggtcaacctggggaacccagaagaacacacaatcctagaatttgctcagttaattaaaaaccttgttggtagcggaagtgaaattcagtttctctccgaagcccaggatgacccacagaaaagaaaaccagacatcaaaaaagcaaagctgatgctggggtgggagcccgtggtcccgctggaggaaggtttaaacaaagcaattcactacttccgtaaagaactcgagtaccaggcaaataatcagtacatccccaaaccaaagcctgccagaataaagaaaggacggactcgccacagctgaactcctcacttttaggacacaagactaccattgtacacttgatgggatgtatttttggcttttttttgttgtcgtttaaagaaagactttaacaggtgtcatgaagaacaaactggaatttcattctgaagcttgctttaatgaaatggatgtgcctaaaagctcccctcaaaaaactgcagattttgccttgcactttttgaatctctctttttatgtaaaatagcgtagatgcatctctgcgtattttcaagtttttttatcttgctgtgagagcatatgttgtgactgtcgttgacagttttatttactggtttctttgtgaagctgaaaaggaacattaagcgggacaaaaaatgccgattttatttataaaagtgggtacttaataaatgagtcgttatactatgcataaagaaaaatcctagcagtattgtcaggtggtggtgcgccggcattgattttagggcagataaaagaattctgtgtgagagctttatgtttctcttttaattcagagtttttccaaggtctacttttgagttgcaaacttgactttgaaatattcctgttggtcatgatcaaggatatttgaaatcactactgtgttttgctgcgtatctggggcgggggcaggttggggggcacaaagttaacatattcttggttaaccatggttaaatatgctattttaataaaatattgaaactca

SEQ ID NO: 327334 - DNA, 1771 bp, Homo sapiens
ggcggggctctcggggccgctgccgccgccgccgccgcgcattgtgcagcaggcgggcccccgcgcggcagggccctggacccgcgcggctcccggggatggtgagcaaggcgctgctgcgcctcgtgtctgccgtcaaccgcaggaggatgaagctgctgctgggcatcgccttgctggcctacgtcgcctctgtttggggcaacttcgttaatatgaggtctatccaggaaaatggtgaactaaaaattgaaagcaagattgaagagatggttgaaccactaagagagaaaatcagagatttagaaaaaagctttacccagaaatacccaccagtaaagtttttatcagaaaaggatcggaaaagaattttgataacaggaggcgcagggttcgtgggctcccatctaactgacaaactcatgatggacggccacgaggtgaccgtggtggacaatttcttcacgggcaggaagagaaacgtggagcactggatcggacatgagaacttcgagttgattaaccacgacgtggtggagcccctctacatcgaggttgaccagatataccatctggcatctccagcctcccctccaaactacatgtataatcctatcaagacattaaagaccaatacgattgggacattaaacatgttggggctggcaaaacgagtcggtgcccgtctgctcctggcctccacatcggaggtgtatggagatcctgaagtccaccctcaaagtgaggattactggggccacgtgaatccaataggacctcgggcctgctacgatgaaggcaaacgtgttgcagagaccatgtgctatgcctacatgaagcaggaaggcgtggaagtgcgagtggccagaatcttcaacacctttgggccacgcatgcacatgaacgatgggcgagtagtcagcaacttcatcctgcaggcgctccagggggagccactcacggtatacggatccgggtctcagacaagggcgttccagtacgtcagcgatctagtgaatggcctcgtggctctcatgaacagcaacgtcagcagcccggtcaacctggggaacccagaagaacacacaatcctagaatttgctcagttaattaaaaaccttgttggtagcggaagtgaaattcagtttctctccgaagcccaggatgacccacagaaaagaaaaccagacatcaaaaaagcaaagctgatgctggggtgggagcccgtggtcccgctggaggaaggtttaaacaaagcaattcactacttccgtaaagaactcgagtaccaggcaaataatcagtacatccccaaaccaaagcctgccagaataaagaaaggacggactcgccacagctgaactcctcacttttaggacacaagactaccattgtacacttgatgggatgtatttttggcttttttttgttgtcgtttaaagaaagactttaacaggtgtcatgaagaacaaactggaatttcattctgaagcttgctttaatgaaatggatgtgcctaaaagctcccctcaaaaaactgcagattttgccttgcactttttgaatctctctttttatgtaaaatagcgtagatgcatctctgcgtattttcaagtttttttatcttgctgtgagagcatatgttgtgactgtcgttgacagttttatttactggtttctttgtgaagctgaaaaggaacattaagcgggacaaaaaatgccgattttatttataaaagtgggtacttaataaatgagtcgttatactatg

SEQ ID NO: 327335 - DNA, 1235 bp, Homo sapiens
agtgggcggtaactcaggcctgttgagacagaataacctgccccccaccgagctcttgctgggcgcctgcacacagtcagcttggccacagcagttgcaggagcactccctggacttccacgcagaacagtccctcgggagctccggggcttctcagagaactgcatttccaccgcctgcaccctattcacaccacatatggggtttgcctttgatgtggatggtaaggctgtgcttacccatgctttgtgattctctcctaccttttttttctttaaacatctcaggtagcggaagtgaaattcagtttctctccgaagcccaggatgacccacagaaaagaaaaccagacatcaaaaaagcaaagctgatgctggggtgggagcccgtggtcccgctggaggaaggtttaaacaaagcaattcactacttccgtaaagaactcgagtaccaggcaaataatcagtacatccccaaaccaaagcctgccagaataaagaaaggacggactcgccacagctgaactcctcacttttaggacacaagactaccattgtacacttgatgggatgtatttttggcttttttttgttgtcgtttaaagaaagactttaacaggtgtcatgaagaacaaactggaatttcattctgaagcttgctttaatgaaatggatgtgcctaaaagctcccctcaaaaaactgcagattttgccttgcactttttgaatctctctttttatgtaaaatagcgtagatgcatctctgcgtattttcaagtttttttatcttgctgtgagagcatatgttgtgactgtcgttgacagttttatttactggtttctttgtgaagctgaaaaggaacattaagcgggacaaaaaatgccgattttatttataaaagtgggtacttaataaatgagtcgttatactatgcataaagaaaaatcctagcagtattgtcaggtggtggtgcgccggcattgattttagggcagataaaagaattctgtgtgagagctttatgtttctcttttaattcagagtttttccaaggtctacttttgagttgcaaacttgactttgaaatattcctgttggtcatgatcaaggatatttgaaatcactactgtgttttgctgcgtatctggggcgggggcaggttggggggcacaaagttaacatattcttggttaaccatggttaaatatgctattttaataaaatattgaaactca

SEQ ID NO: 327336 - DNA, 1329 bp, Homo sapiens
ggcggggctctcggggccgctgccgccgccgccgccgcgcattgtgcagcaggcgggcccccgcgcggcagggccctggacccgcgcggctcccggggatggtgagcaaggcgctgctgcgcctcgtgtctgccgtcaaccgcaggaggatgaagctgctgctgggcatcgccttgctggcctacgtcgcctctgtttggggcaacttcgttaatatgaggtctatccaggaaaatggtgaactaaaaattgaaagcaagattgaagagatggttgaaccactaagagagaaaatcagagatttagaaaaaagctttacccagaaatacccaccagtaaagtttttatcagaaaaggatcggaaaagaattttgataacaggaggcgcagggttcgtgggctcccatctaactgacaaactcatgatggacggccacgaggtgaccgtggtggacaatttcttcacgggcaggaagagaaacgtggagcactggatcggacatgagaacttcgagttgattaaccacgacgtggtggagcccctctacatcgaggttgaccagatataccatctggcatctccagcctcccctccaaactacatgtataatcctatcaagacattaaagaccaatacgattgggacattaaacatgttggggctggcaaaacgagtcggtgcccgtctgctcctggcctccacatcggaggtgtatggagatcctgaagtccaccctcaaagtgaggattactggggccacgtgaatccaataggacctcgggcctgctacgatgaaggcaaacgtgttgcagagaccatgtgctatgcctacatgaagcaggaaggcgtggaagtgcgagtggccagaatcttcaacacctttgggccacgcatgcacatgaacgatgggcgagtagtcagcaacttcatcctgcaggcgctccagggggagccactcacggtatacggatccgggtctcagacaagggcgttccagtacgtcagcgatctagtgaatggcctcgtggctctcatgaacagcaacgtcagcagcccggtcaacctggtgagtgctcctctccctccactctgcaggacagctcagactttcgttcatttgtgaaaccatgagcagcaccaggctttgcttcatttgccatcggcacacttaggacatttgtgtttgttgcttgctaaatactagaggaaaaacaaacaaacacaaagtaagagtatacaaagaagtaaaacatctgcaaggcacgggtgagtgatgtaatcagtccctccaccttctgaagggcctgggtctaagattgtgtgaagcc

SEQ ID NO: 327337 - DNA, 360 bp, Homo sapiens
catttatggagtaagagttcaaatggacagtttatctgttcaattctagcattgtgatgcaagtggtgtatcttaatttcaaactggaagttaatttgtagaagaaattaaaacctgttttgccttatctgaaacatcagaatggggtgaaaggggttgagaactgtgtttttgctttaaaactgatttttgttattattgttctagatggttgaaccactaagagagaaaatcagagatttagaaaaaaggtatgtgtactttttgtcttaaagtcaatagttaaaataagtttgtctcaattgagtaattaattctgtttgtttgctccaaactctgccaacctaaataaatgtctgt

SEQ ID NO: 327338 - DNA, 426 bp, Homo sapiens
ggtgcaggcaagggattacttctgaccaaggatggtgagaaggtttcccatacagactgacgtctggattgagctttgaagaagaaagccaggactggagcagacgacgaggagggaagagtgtgaggttaatgatagtggctttctgtttgatgtcggagaggcttcctgtactctcaaggcacacttcttccctcttagcctttaatgcagtttcctgtctttccctgcataccttgtcacctcaagagtaaagataatgatgaataatttgttgtgtaagatcacagcccatacagagttgtttatactctctttgaggaatgtagggtgaccctgtctgtgtaagcagaaatgcccgtgagtataagtcaggtggcagcaggctccaggtctagcacacctgagcgggctctgtggtgtcgt

SEQ ID NO: 327339 - DNA, 2323 bp, Homo sapiens
ggcggggctctcggggccgctgccgccgccgccgccgcgcattgtgcagcaggcgggcccccgcgcggcagggccctggacccgcgcggctcccggggatggtgagcaaggcgctgctgcgcctcgtgtctgccgtcaaccgcaggaggatgaagctgctgctgggcatcgccttgctggcctacgtcgcctctgtttggggcaacttcgttaatatgaggtctatccaggaaaatggtgaactaaaaattgaaagcaagattgaagagatggttgaaccactaagagagaaaatcagagatttagaaaaaagctttacccagaaatacccaccagtaaagtttttatcagaaaaggatcggaaaagaattttgataacaggaggcgcagggttcgtgggctcccatctaactgacaaactcatgatggacggccacgaggtgaccgtggtggacaatttcttcacgggcaggaagagaaacgtggagcactggatcggacatgagaacttcgagttgattaaccacgacgtggtggagcccctctacatcgaggttgaccagatataccatctggcatctccagcctcccctccaaactacatgtataatcctatcaagacattaaagaccaatacgattgggacattaaacatgttggggctggcaaaacgagtcggtgcccgtctgctcctggcctccacatcggaggtgtatggagatcctgaagtccaccctcaaagtgaggattactggggccacgtgaatccaataggacctcgggcctgctacgatgaaggcaaacgtgttgcagagaccatgtgctatgcctacatgaagcaggaaggcgtggaagtgcgagtggccagaatcttcaacacctttgggccacgcatgcacatgaacgatgggcgagtagtcagcaacttcatcctgcaggcgctccagggggagccactcacggtatacggatccgggtctcagacaagggcgttccagtacgtcagcgatctagtgaatggcctcgtggctctcatgaacagcaacgtcagcagcccggtcaacctggggaacccagaagaacacacaatcctagaatttgctcagttaattaaaaaccttgttggtagcggaagtgaaattcagtttctctccgaagcccaggatgacccacagaaaagaaaaccagacatcaaaaaagcaaagctgatgctggggtgggagcccgtggtcccgctggaggaaggtttaaacaaagcaattcactacttccgtaaagaactcgagtaccaggcaaataatcagtacatccccaaaccaaagcctgccagaataaagaaaggacggactcgccacagctgaactcctcacttttaggacacaagactaccattgtacacttgatgggatgtatttttggcttttttttgttgtcgtttaaagaaagactttaacaggtgtcatgaagaacaaactggaatttcattctgaagcttgctttaatgaaatggatgtgcctaaaagctcccctcaaaaaactgcagattttgccttgcactttttgaatctctctttttatgtaaaatagcgtagatgcatctctgcgtattttcaagtttttttatcttgctgtgagagcatatgttgtgactgtcgttgacagttttatttactggtttctttgtgaagctgaaaaggaacattaagcgggacaaaaaatgccgattttatttataaaagtgggtacttaataaatgagtcgttatactatgcataaagaaaaatcctagcagtattgtcaggtggtggtgcgccggcattgattttagggcagataaaagaattctgtgtgagagctttatgtttctcttttaattcagagtttttccaaggtctacttttgagttgcaaacttgactttgaaatattcctgttggtcatgatcaaggatatttgaaatcactactgtgttttgctgcgtatctggggcgggggcaggttggggggcacaaagttaacatattcttggttaaccatggttaaatatgctattttaataaaatattgaaactcaaaaaaaaaaaagaaaaaaaaaacaaaaaacaaaaaaaaaaaaaaaaagagagggcggggccccctctataagaaatattaccccagaagagaggggcacaccaagaatatataagcagcggcccgcgcggcatcccatgtcacacaaccggcgggccccccaaatgaagcagacctggcaatcctaacacgcactgggctgcgggacaccccagtgtaccacaaacagccggacacaggcggaaacaccg

SEQ ID NO: 327340 - DNA, 1833 bp, Homo sapiens
gtgctgcaggtactctaaggatccccgtgtggttcttgctggacactagagagaaatcagagattagacaaagctttacccagaaatacccaccagtaaagtttttatcagaaaaggatcggaaaagaattttgataacaggaggcgcagggttcgtgggctcccatctaactgacaaactcatgatggacggccacgaggtgaccgtggtggacaatttcttcacgggcaggaagagaaacgtggagcactggatcggacatgagaacttcgagttgattaaccacgacgtggtggagcccctctacatcgaggttgaccagatataccatctggcatctccagcctcccctccaaactacatgtataatcctatcaagacattaaagaccaatacgattgggacattaaacatgttggggctggcaaaacgagtcggtgcccgtctgctcctggcctccacatcggaggtgtatggagatcctgaagtccaccctcaaagtgaggattactggggccacgtgaatccaataggacctcgggcctgctacgatgaaggcaaacgtgttgcagagaccatgtgctatgcctacatgaagcaggaaggcgtggaagtgcgagtggccagaatcttcaacacctttgggccacgcatgcacatgaacgatgggcgagtagtcagcaacttcatcctgcaggcgctccagggggagccactcacggtatacggatccgggtctcagacaagggcgttccagtacgtcagcgatctagtgaatggcctcgtggctctcatgaacagcaacgtcagcagcccggtcaacctggggaacccagaagaacacacaatcctagaatttgctcagttaattaaaaaccttgttggtagcggaagtgaaattcagtttctctccgaagcccaggatgacccacagaaaagaaaaccagacatcaaaaaagcaaagctgatgctggggtgggagcccgtggtcccgctggaggaaggtttaaacaaagcaattcactacttccgtaaagaactcgagtaccaggcaaataatcagtacatccccaaaccaaagcctgccagaataaagaaaggacggactcgccacagctgaactcctcacttttaggacacaagactaccattgtacacttgatgggatgtatttttggcttttttttgttgtcgtttaaagaaagactttaacaggtgtcatgaagaacaaactggaatttcattctgaagcttgctttaatgaaatggatgtgcctaaaagctcccctcaaaaaactgcagattttgccttgcactttttgaatctctctttttatgtaaaatagcgtagatgcatctctgcgtattttcaagtttttttatcttgctgtgagagcatatgttgtgactgtcgttgacagttttatttactggtttctttgtgaagctgaaaaggaacattaagcgggacaaaaaatgccgattttatttataaaagtgggtacttaataaatgagtcgttatactatgcataaagaaaaatcctagcagtattgtcaggtggtggtgcgccggcattgattttagggcagataaaagaattctgtgtgagagctttatgtttctcttttaattcagagtttttccaaggtctacttttgagttgcaaacttgactttgaaatattcctgttggtcatgatcaaggatatttgaaatcactactgtgttttgctgcgtatctggggcgggggcaggttggggggcacaaagttaacatattcttggttaaccatggttaaatatgctattttaataaaatattgaaactca

SEQ ID NO: 327341 - DNA, 233 bp, Homo sapiens
ttccagggaactttggcgaccgctactttgggacagacgcggtccccgatggcagtgacgaggaggaagtggcctacacgggttagctgcccagtgagccatcccgtccccaccaccctcctcctgcctcctgacccaggactgctgaatacaaagatgttaatttttaaaatgttactagtataatttattctatgcattttataaaataaataaagctttagaaaaatgaa

SEQ ID NO: 327342 - DNA, 450 bp, Homo sapiens
ggatcttaatagagcatacccctaccatctctgtatgatgccgttccctgtccgcacctgtgttctgtgtcgttttcgggcgtaactggcatctgtggagcgttccatttcctgtggaactccggagcgcggtggacagactgtgccgctgcaggaagctacaaagaggcggtcctgccgtttgcggagctttccctcttgcccccgggggctctgccctgcacagacagtgactgtggttctgagttgctccccatgtgagtgggccatgacctgcagggccaagggtgctgacccctgagagcttcccagggagaccttgaaacattggtgctgaggccaccacagcccagctcgggtgtctccttgggcagtggccacaagtgccttctgccggacctgtgtcttgtctcatggcattctttcacaccaggctctgatccgggtacc

SEQ ID NO: 327343 - DNA, 1838 bp, Homo sapiens
ttgcgcgccgcccggccaggcccgcaaagaggcctccgagcgccatggctgcgcccccggcccgcgcggacgctgatccttcgcccacgtcgccacctacggcccgagacacaccaggccggcaggctgagaaaagcgagaccgcgtgcgaggaccgcagcaatgcagagtccctggacaggctcctgccacctgtgggcactgggcgctctccccggaagcggaccaccagccagtgcaagtcagagcctcccctgctgcgtacaagcaagcgtaccatctacaccgccgggcggccgccctggtacaatgaacacggcacgcaatccaaagaggccttcgccatcggcttgggaggcggcagtgcctctgggaagaccactgtggccagaatgatcatcgaggccctggatgtgccctgggtggtcttgctgtccatggactccttctacaaggtgctgactgagcagcagcaggaacaggccgcacacaacaacttcaacttcgaccacccagatgcctttgacttcgacctcatcatttccaccctcaagaagctgaagcaggggaagagtgtcaaggtgcccatttatgacttcaccacgcacagccggaagaaggactggaaaacactgtatggtgcaaacgtcatcatctttgagggcatcatggcctttgctgacaagacactgttggagctcctggacatgaagatctttgtggacacagactccgacatccgcctggtacggcggctgcgccgggacatcagtgagcgcggccgggacatcgagggtgtcatcaagcagtacaacaagtttgtcaagccctccttcgaccagtacatccagcccaccatgcgcctggcagacatcgtggtccccagagggagcggcaacacggtggccatcgacctgattgtgcagcacgtgcacagccagctggaggagcgtgaactcagcgtcagggctgcgctggcctcggcacaccagtgccacccgctgccccggacgctgagcgtcctgaagagcacgccgcaggtacggggcatgcacaccatcatcagggacaaggagaccagtcgcgacgagttcatcttctactccaagagactgatgcggctgctcatcgagcacgcgctctccttcctgccctttcaggactgcgtcgtacagaccccgcaggggcaggactatgcgggcaagtgctatgcggggaagcagatcaccggtgtgtccattctgcgcgccggtgaaaccatggagcccgcgctgcgcgctgtgtgcaaagacgtgcgcatcggcaccatcctcatccagaccaaccagcttaccggggagcccgagctccactacctgaggctgcccaaggacatcagcgatgaccacgtgatcctcatggactgcaccgtgtccacgggcgcggcggccatgatggcagtgcgcgtgctcctggaccacgacgtgcctgaggacaagatctttttgctgtcgctgctcatggcagagatgggcgtgcactcagtggcctatgcatttccgcgagtgagaatcatcaccacggcggtggacaagcgggtcaatgaccttttccgcatcatcccaggcattgggaactttggcgaccgctactttgggacagacgcggtccccgatggcagtgacgaggaggaagtggcctacacgggttagctgcccagtgagccatcccgtccccaccaccctcctcctgcctcctgacccaggactgctgaatacaaagatgttaatttttaaaatgttactagtataatttattctatgcattttataaaataaataaagctttagaaaaatgaa

SEQ ID NO: 327344 - DNA, 1812 bp, Homo sapiens
ttgcgcgccgcccggccaggcccgcaaagaggcctccgagcgccatggctgcgcccccggcccgcgcggacgctgatccttcgcccacgtcgccacctacggcccgagacacaccaggccggcaggctgagaaaagcgagaccgcgtgcgaggaccgcagcaatgcagagtccctggacaggctcctgccacctgtgggcactgggcgctctccccggaagcggaccaccagccagtgcaagtcagagcctcccctgctgcgtacaagcaagcgtaccatctacaccgccgggcggccgccctggtacaatgaacacggcacgcaatccaaagaggccttcgccatcggcttgggaggcggcagtgcctctgggaagaccactgtggccagaatgatcatcgaggccctggatgtgccctgggtggtcttgctgtccatggactccttctacaaggtgctgactgagcagcagcaggaacaggccgcacacaacaacttcaacttcgaccacccagatgcctttgacttcgacctcatcatttccaccctcaagaagctgaagcaggggaagagtgtcaaggtgcccatttatgacttcaccacgcacagccggaagaaggactggaaaacactgtatggtgcaaacgtcatcatctttgagggcatcatggcctttgctgacaagacactgttggagctcctggacatgaagatctttgtggacacagactccgacatccgcctggtacggcggctgcgccgggacatcagtgagcgcggccgggacatcgagggtgtcatcaagcagtacaacaagtttgtcaagccctccttcgaccagtacatccagcccaccatgcgcctggcagacatcgtggtccccagagggagcggcaacacggtggccatcgacctgattgtgcagcacgtgcacagccagctggaggagcgtgaactcagcgtcagggctgcgctggcctcggcacaccagtgccacccgctgccccggacgctgagcgtcctgaagagcacgccgcagggacaaggagaccagtcgcgacgagttcatcttctactccaagagactgatgcggctgctcatcgagcacgcgctctccttcctgccctttcaggactgcgtcgtacagaccccgcaggggcaggactatgcgggcaagtgctatgcggggaagcagatcaccggtgtgtccattctgcgcgccggtgaaaccatggagcccgcgctgcgcgctgtgtgcaaagacgtgcgcatcggcaccatcctcatccagaccaaccagcttaccggggagcccgagctccactacctgaggctgcccaaggacatcagcgatgaccacgtgatcctcatggactgcaccgtgtccacgggcgcggcggccatgatggcagtgcgcgtgctcctggaccacgacgtgcctgaggacaagatctttttgctgtcgctgctcatggcagagatgggcgtgcactcagtggcctatgcatttccgcgagtgagaatcatcaccacggcggtggacaagcgggtcaatgaccttttccgcatcatcccaggcattgggaactttggcgaccgctactttgggacagacgcggtccccgatggcagtgacgaggaggaagtggcctacacgggttagctgcccagtgagccatcccgtccccaccaccctcctcctgcctcctgacccaggactgctgaatacaaagatgttaatttttaaaatgttactagtataatttattctatgcattttataaaataaataaagctttagaaaaatgaa

SEQ ID NO: 327345 - DNA, 2085 bp, Homo sapiens
ctcacacacgcccctccctctcacacacgccccctccctctcacacacatcccctccctctcacacacgcctccctcctcacaccgaggcgcatggcggtgagcgtccttcgtttcctggattttatacagatggaatcatctctccttccagcttgcttttctcccctgaccatgctctgaggatgccgttccctgtccgcacctgtgttctgtgtcgttttcgggcgtaactggcatctgtggagcgttccatttcctgtggaactccggagcgcggtggacagactgtgccgctgcaggaagctacaaagaggcggtcctgccgtttgcggagctttccctcttgcccccgggggctctgccctgcacagacagtgactgtggttctgagttgctccccatcagcaatgcagagtccctggacaggctcctgccacctgtgggcactgggcgctctccccggaagcggaccaccagccagtgcaagtcagagcctcccctgctgcgtacaagcaagcgtaccatctacaccgccgggcggccgccctggtacaatgaacacggcacgcaatccaaagaggccttcgccatcggcttgggaggcggcagtgcctctgggaagaccactgtggccagaatgatcatcgaggccctggatgtgccctgggtggtcttgctgtccatggactccttctacaaggtgctgactgagcagcagcaggaacaggccgcacacaacaacttcaacttcgaccacccagatgcctttgacttcgacctcatcatttccaccctcaagaagctgaagcaggggaagagtgtcaaggtgcccatttatgacttcaccacgcacagccggaagaaggactggaaaacactgtatggtgcaaacgtcatcatctttgagggcatcatggcctttgctgacaagacactgttggagctcctggacatgaagatctttgtggacacagactccgacatccgcctggtacggcggctgcgccgggacatcagtgagcgcggccgggacatcgagggtgtcatcaagcagtacaacaagtttgtcaagccctccttcgaccagtacatccagcccaccatgcgcctggcagacatcgtggtccccagagggagcggcaacacggtggccatcgacctgattgtgcagcacgtgcacagccagctggaggagcgtgaactcagcgtcagggctgcgctggcctcggcacaccagtgccacccgctgccccggacgctgagcgtcctgaagagcacgccgcaggtacggggcatgcacaccatcatcagggacaaggagaccagtcgcgacgagttcatcttctactccaagagactgatgcggctgctcatcgagcacgcgctctccttcctgccctttcaggactgcgtcgtacagaccccgcaggggcaggactatgcgggcaagtgctatgcggggaagcagatcaccggtgtgtccattctgcgcgccggtgaaaccatggagcccgcgctgcgcgctgtgtgcaaagacgtgcgcatcggcaccatcctcatccagaccaaccagcttaccggggagcccgagctccactacctgaggctgcccaaggacatcagcgatgaccacgtgatcctcatggactgcaccgtgtccacgggcgcggcggccatgatggcagtgcgcgtgctcctggaccacgacgtgcctgaggacaagatctttttgctgtcgctgctcatggcagagatgggcgtgcactcagtggcctatgcatttccgcgagtgagaatcatcaccacggcggtggacaagcgggtcaatgaccttttccgcatcatcccaggcattgggaactttggcgaccgctactttgggacagacgcggtccccgatggcagtgacgaggaggaagtggcctacacgggttagctgcccagtgagccatcccgtccccaccaccctcctcctgcctcctgacccaggactgctgaatacaaagatgttaatttttaaaatgttactagtataatttattctatgcattttataaaataaataaagctttagaaaaatgaa

SEQ ID NO: 327346 - DNA, 2100 bp, Homo sapiens
tcccctaggggacagagccttgcccagccagtgcctgtccacacagcaggatgagcatggccccaagatagtgcctcagcctccctagtagctgggattacaggcacccaccaccgcacccaggtaattttttttttttaatttttagtagagacgggtcttcaccatgttggccaggctggtctcaaactcctgacctcaaatgatccacctgcctcggcctcccaaagtactgggattacaggcatgagccaccacgcccagcccaggcagagttcttatgtacccccaatgagcctgcccgcctcagccatgcctgttgagggggtggggggggatgccctgtgggccggccatgccagcgggtacctgggaggtgggcagctctgggccacatccgagtacatccctctctgcagcagcaatgcagagtccctggacaggctcctgccacctgtgggcactgggcgctctccccggaagcggaccaccagccagtgcaagtcagagcctcccctgctgcgtacaagcaagcgtaccatctacaccgccgggcggccgccctggtacaatgaacacggcacgcaatccaaagaggccttcgccatcggcttgggaggcggcagtgcctctgggaagaccactgtggccagaatgatcatcgaggccctggatgtgccctgggtggtcttgctgtccatggactccttctacaaggtgctgactgagcagcagcaggaacaggccgcacacaacaacttcaacttcgaccacccagatgcctttgacttcgacctcatcatttccaccctcaagaagctgaagcaggggaagagtgtcaaggtgcccatttatgacttcaccacgcacagccggaagaaggactggaaaacactgtatggtgcaaacgtcatcatctttgagggcatcatggcctttgctgacaagacactgttggagctcctggacatgaagatctttgtggacacagactccgacatccgcctggtacggcggctgcgccgggacatcagtgagcgcggccgggacatcgagggtgtcatcaagcagtacaacaagtttgtcaagccctccttcgaccagtacatccagcccaccatgcgcctggcagacatcgtggtccccagagggagcggcaacacggtggccatcgacctgattgtgcagcacgtgcacagccagctggaggagcgtgaactcagcgtcagggctgcgctggcctcggcacaccagtgccacccgctgccccggacgctgagcgtcctgaagagcacgccgcaggtacggggcatgcacaccatcatcagggacaaggagaccagtcgcgacgagttcatcttctactccaagagactgatgcggctgctcatcgagcacgcgctctccttcctgccctttcaggactgcgtcgtacagaccccgcaggggcaggactatgcgggcaagtgctatgcggggaagcagatcaccggtgtgtccattctgcgcgccggtgaaaccatggagcccgcgctgcgcgctgtgtgcaaagacgtgcgcatcggcaccatcctcatccagaccaaccagcttaccggggagcccgagctccactacctgaggctgcccaaggacatcagcgatgaccacgtgatcctcatggactgcaccgtgtccacgggcgcggcggccatgatggcagtgcgcgtgctcctggaccacgacgtgcctgaggacaagatctttttgctgtcgctgctcatggcagagatgggcgtgcactcagtggcctatgcatttccgcgagtgagaatcatcaccacggcggtggacaagcgggtcaatgaccttttccgcatcatcccaggcattgggaactttggcgaccgctactttgggacagacgcggtccccgatggcagtgacgaggaggaagtggcctacacgggttagctgcccagtgagccatcccgtccccaccaccctcctcctgcctcctgacccaggactgctgaatacaaagatgttaatttttaaaatgttactagtataatttattctatgcattttataaaataaataaagctttagaaaaatgaa

SEQ ID NO: 327347 - DNA, 2089 bp, Homo sapiens
ttgcgcgccgcccggccaggcccgcaaagaggcctccgagcgccatggctgcgcccccggcccgcgcggacgctgatccttcgcccacgtcgccacctacggcccgagacacaccaggccggcaggctgagaaaagcgagaccgcgtgcgaggaccgcttgcttttctcccctgaccatgctctgaggatgccgttccctgtccgcacctgtgttctgtgtcgttttcgggcgtaactggcatctgtggagcgttccatttcctgtggaactccggagcgcggtggacagactgtgccgctgcaggaagctacaaagaggcggtcctgccgtttgcggagctttccctcttgcccccgggggctctgccctgcacagacagtgactgtggttctgagttgctccccatcagcaatgcagagtccctggacaggctcctgccacctgtgggcactgggcgctctccccggaagcggaccaccagccagtgcaagtcagagcctcccctgctgcgtacaagcaagcgtaccatctacaccgccgggcggccgccctggtacaatgaacacggcacgcaatccaaagaggccttcgccatcggcttgggaggcggcagtgcctctgggaagaccactgtggccagaatgatcatcgaggccctggatgtgccctgggtggtcttgctgtccatggactccttctacaaggtgctgactgagcagcagcaggaacaggccgcacacaacaacttcaacttcgaccacccagatgcctttgacttcgacctcatcatttccaccctcaagaagctgaagcaggggaagagtgtcaaggtgcccatttatgacttcaccacgcacagccggaagaaggactggaaaacactgtatggtgcaaacgtcatcatctttgagggcatcatggcctttgctgacaagacactgttggagctcctggacatgaagatctttgtggacacagactccgacatccgcctggtacggcggctgcgccgggacatcagtgagcgcggccgggacatcgagggtgtcatcaagcagtacaacaagtttgtcaagccctccttcgaccagtacatccagcccaccatgcgcctggcagacatcgtggtccccagagggagcggcaacacggtggccatcgacctgattgtgcagcacgtgcacagccagctggaggagcgtgaactcagcgtcagggctgcgctggcctcggcacaccagtgccacccgctgccccggacgctgagcgtcctgaagagcacgccgcaggtacggggcatgcacaccatcatcagggacaaggagaccagtcgcgacgagttcatcttctactccaagagactgatgcggctgctcatcgagcacgcgctctccttcctgccctttcaggactgcgtcgtacagaccccgcaggggcaggactatgcgggcaagtgctatgcggggaagcagatcaccggtgtgtccattctgcgcgccggtgaaaccatggagcccgcgctgcgcgctgtgtgcaaagacgtgcgcatcggcaccatcctcatccagaccaaccagcttaccggggagcccgagctccactacctgaggctgcccaaggacatcagcgatgaccacgtgatcctcatggactgcaccgtgtccacgggcgcggcggccatgatggcagtgcgcgtgctcctggaccacgacgtgcctgaggacaagatctttttgctgtcgctgctcatggcagagatgggcgtgcactcagtggcctatgcatttccgcgagtgagaatcatcaccacggcggtggacaagcgggtcaatgaccttttccgcatcatcccaggcattgggaactttggcgaccgctactttgggacagacgcggtccccgatggcagtgacgaggaggaagtggcctacacgggttagctgcccagtgagccatcccgtccccaccaccctcctcctgcctcctgacccaggactgctgaatacaaagatgttaatttttaaaatgttactagtataatttattctatgcattttataaaataaataaagctttagaaaaatgaa

SEQ ID NO: 327348 - DNA, 2547 bp, Homo sapiens
gtcctgctgcggggggttcactctgtagccccaggcaggccggggtactgtagctttttccaggggatccaggaggggtgcaggcacacggcgcacagtggtcctccgcaggcctgcggtcctaggctggccgaatgtgccagcccacacacaggagggggcagttcacaccgagggctggcccgaggattgtcagggccacaccaggcaaagccagcgctattaatatcaggcatacacaagcccccagctgggtgatcctcttatgcctgtggccttggcctctgaggacggcagtgagtgctgttccctcagtacggtggaggcttcaagggcctcctagctgctgtgcctctgctgacatttggcaggcagcttctgccagccaagggtctcaccccagccacccggctctgcacccactgtgctgcccacaggagtggtcctgcccatggaagggccagttcaggtggccggagctcctgagctgccctaggggactgctgtgggtctgaggtggtgatgtcccccacggctgcctgcgcctgagcccccacgcatccacccctggggccactctgctgttcaggagcacccacccgtgtcctcgaccatgagcagccccccagcttaccctggcatcaggatctcagggtgccgggcccttggagcagaaggcagcagcaatgcagagtccctggacaggctcctgccacctgtgggcactgggcgctctccccggaagcggaccaccagccagtgcaagtcagagcctcccctgctgcgtacaagcaagcgtaccatctacaccgccgggcggccgccctggtacaatgaacacggcacgcaatccaaagaggccttcgccatcggcttgggaggcggcagtgcctctgggaagaccactgtggccagaatgatcatcgaggccctggatgtgccctgggtggtcttgctgtccatggactccttctacaaggtgggcccccgcccagctcccccgaggacccctttgtcctctccctgaccctggaccccctgcaaaagtaggtccctggtctcagccccagcgtggctgctcctgggaggcctagagcccctgtccgctggcattgggtgagggccctactgtgcccacagctgctccacagcctcccccaccaggtgctgactgagcagcagcaggaacaggccgcacacaacaacttcaacttcgaccacccagatgcctttgacttcgacctcatcatttccaccctcaagaagctgaagcaggggaagagtgtcaaggtgcccatttatgacttcaccacgcacagccggaagaaggactggaaaacactgtatggtgcaaacgtcatcatctttgagggcatcatggcctttgctgacaagacactgttggagctcctggacatgaagatctttgtggacacagactccgacatccgcctggtacggcggctgcgccgggacatcagtgagcgcggccgggacatcgagggtgtcatcaagcagtacaacaagtttgtcaagccctccttcgaccagtacatccagcccaccatgcgcctggcagacatcgtggtccccagagggagcggcaacacggtggccatcgacctgattgtgcagcacgtgcacagccagctggaggagcgtgaactcagcgtcagggctgcgctggcctcggcacaccagtgccacccgctgccccggacgctgagcgtcctgaagagcacgccgcaggtacggggcatgcacaccatcatcagggacaaggagaccagtcgcgacgagttcatcttctactccaagagactgatgcggctgctcatcgagcacgcgctctccttcctgccctttcaggactgcgtcgtacagaccccgcaggggcaggactatgcgggcaagtgctatgcggggaagcagatcaccggtgtgtccattctgcgcgccggtgaaaccatggagcccgcgctgcgcgctgtgtgcaaagacgtgcgcatcggcaccatcctcatccagaccaaccagcttaccggggagcccgagctccactacctgaggctgcccaaggacatcagcgatgaccacgtgatcctcatggactgcaccgtgtccacgggcgcggcggccatgatggcagtgcgcgtgctcctggaccacgacgtgcctgaggacaagatctttttgctgtcgctgctcatggcagagatgggcgtgcactcagtggcctatgcatttccgcgagtgagaatcatcaccacggcggtggacaagcgggtcaatgaccttttccgcatcatcccaggcattgggaactttggcgaccgctactttgggacagacgcggtccccgatggcagtgacgaggaggaagtggcctacacgggttagctgcccagtgagccatcccgtccccaccaccctcctcctgcctcctgacccaggactgctgaatacaaagatgttaatttttaaaatgttactagtataatttattctatgcattttataaaataaataaagctttagaaaaatgaa

SEQ ID NO: 327349 - DNA, 2732 bp, Homo sapiens
gtcctgctgcggggggttcactctgtagccccaggcaggccggggtactgtagctttttccaggggatccaggaggggtgcaggcacacggcgcacagtggtcctccgcaggcctgcggtcctaggctggccgaatgtgccagcccacacacaggagggggcagttcacaccgagggctggcccgaggattgtcagggccacaccaggcaaagccagcgctattaatatcaggcatacacaagcccccagctgggtgatcctcttatgcctgtggccttggcctctgaggacggcagtgagtgctgttccctcagtacggtggaggcttcaagggcctcctagctgctgtgcctctgctgacatttggcaggcagcttctgccagccaagggtctcaccccagccacccggctctgcacccactgtgctgcccacaggagtggtcctgcccatggaagggccagttcaggtggccggagctcctgagctgccctaggggactgctgtgggtctgaggtggtgatgtcccccacggctgcctgcgcctgagcccccacgcatccacccctggggccactctgctgttcaggagcacccacccgtgtcctcgaccatgagcagccccccagcttaccctggcatcaggatctcagggtgccgggcccttggagcagaaggcagcagcaatgcagagtccctggacaggctcctgccacctgtgggcactgggcgctctccccggaagcggaccaccagccagtgcaagtcagagcctcccctgctgcgtacaagcaagcgtaccatctacaccgccgggcggccgccctggtacaatgaacacggcacgcaatccaaagaggccttcgccatcggtgagagcagcgggggggtgggacctgctgccggacgcctgcctccggctcccctccagtgcctgtggagcaggagaaggaagccgggcaaccgcaggcagcggcagcgggatgggcacctctgggacctatctgtgccggcagcctgcctgttcctcacagagggtctccactcccgccggcaggcttgggaggcggcagtgcctctgggaagaccactgtggccagaatgatcatcgaggccctggatgtgccctgggtggtcttgctgtccatggactccttctacaaggtgggcccccgcccagctcccccgaggacccctttgtcctctccctgaccctggaccccctgcaaaagtaggtccctggtctcagccccagcgtggctgctcctgggaggcctagagcccctgtccgctggcattgggtgagggccctactgtgcccacagctgctccacagcctcccccaccaggtgctgactgagcagcagcaggaacaggccgcacacaacaacttcaacttcgaccacccagatgcctttgacttcgacctcatcatttccaccctcaagaagctgaagcaggggaagagtgtcaaggtgcccatttatgacttcaccacgcacagccggaagaaggactggaaaacactgtatggtgcaaacgtcatcatctttgagggcatcatggcctttgctgacaagacactgttggagctcctggacatgaagatctttgtggacacagactccgacatccgcctggtacggcggctgcgccgggacatcagtgagcgcggccgggacatcgagggtgtcatcaagcagtacaacaagtttgtcaagccctccttcgaccagtacatccagcccaccatgcgcctggcagacatcgtggtccccagagggagcggcaacacggtggccatcgacctgattgtgcagcacgtgcacagccagctggaggagcgtgaactcagcgtcagggctgcgctggcctcggcacaccagtgccacccgctgccccggacgctgagcgtcctgaagagcacgccgcaggtacggggcatgcacaccatcatcagggacaaggagaccagtcgcgacgagttcatcttctactccaagagactgatgcggctgctcatcgagcacgcgctctccttcctgccctttcaggactgcgtcgtacagaccccgcaggggcaggactatgcgggcaagtgctatgcggggaagcagatcaccggtgtgtccattctgcgcgccggtgaaaccatggagcccgcgctgcgcgctgtgtgcaaagacgtgcgcatcggcaccatcctcatccagaccaaccagcttaccggggagcccgagctccactacctgaggctgcccaaggacatcagcgatgaccacgtgatcctcatggactgcaccgtgtccacgggcgcggcggccatgatggcagtgcgcgtgctcctggaccacgacgtgcctgaggacaagatctttttgctgtcgctgctcatggcagagatgggcgtgcactcagtggcctatgcatttccgcgagtgagaatcatcaccacggcggtggacaagcgggtcaatgaccttttccgcatcatcccaggcattgggaactttggcgaccgctactttgggacagacgcggtccccgatggcagtgacgaggaggaagtggcctacacgggttagctgcccagtgagccatcccgtccccaccaccctcctcctgcctcctgacccaggactgctgaatacaaagatgttaatttttaaaatgttactagtataatttattctatgcattttataaaataaataaagctttagaaaaatgaa

SEQ ID NO: 327350 - DNA, 1481 bp, Homo sapiens
ctccctgtcccacctctttcttgcctccaccccgcccttttcctgcccgctcctagacctgctgctgccccggccatccccaggcttgggcagcggggcgggacgggacagccaagagacactgagccagctttgccccccacccccctctcttgaggggccgcgcaccacctcggggaggagccagggcggggcctgaccccacaaagctttagttcccccggggagaggctggggacaagctacccattctggggtatgacacctatcagcacgtgtgagcccgccctgtgcccggcccacttctgcttcctcttagcgcaggaggggtcccgcactgggaggggccctcacagcctaccccgctagctttctgcctgatggtgagcttgccccgttgttcgccgccatctttcgcctttgcctgacagctcaggtagggcgacgtctccccccagctcagccccaggcagaagtcaggcccgctctgcacctcgtgctgtgcctggcccgtgtgttcccctcacagtgacgcacagccgtcctgtggggagggagggctctgggaaaagacccccttcttgagtgttccccatcggtttgtcgtcagggctgcgctggcctcggcacaccagtgccacccgctgccccggacgctgagcgtcctgaagagcacgccgcaggtacggggcatgcacaccatcatcagggacaaggagaccagtcgcgacgagttcatcttctactccaagagactgatgcggctgctcatcgagcacgcgctctccttcctgccctttcaggactgcgtcgtacagaccccgcaggggcaggactatgcgggcaagtgctatgcggggaagcagatcaccggtgtgtccattctgcgcgccggtgaaaccatggagcccgcgctgcgcgctgtgtgcaaagacgtgcgcatcggcaccatcctcatccagaccaaccagcttaccggggagcccgagctccactacctgaggctgcccaaggacatcagcgatgaccacgtgatcctcatggactgcaccgtgtccacgggcgcggcggccatgatggcagtgcgcgtgctcctggaccacgacgtgcctgaggacaagatctttttgctgtcgctgctcatggcagagatgggcgtgcactcagtggcctatgcatttccgcgagtgagaatcatcaccacggcggtggacaagcgggtcaatgaccttttccgcatcatcccaggcattgggaactttggcgaccgctactttgggacagacgcggtccccgatggcagtgacgaggaggaagtggcctacacgggttagctgcccagtgagccatcccgtccccaccaccctcctcctgcctcctgacccaggactgctgaatacaaagatgttaatttttaaaatgttactagtataatttattctatgcattttataaaataaataaagctttagaaaaatgaa

SEQ ID NO: 327351 - DNA, 1455 bp, Homo sapiens
ctccctgtcccacctctttcttgcctccaccccgcccttttcctgcccgctcctagacctgctgctgccccggccatccccaggcttgggcagcggggcgggacgggacagccaagagacactgagccagctttgccccccacccccctctcttgaggggccgcgcaccacctcggggaggagccagggcggggcctgaccccacaaagctttagttcccccggggagaggctggggacaagctacccattctggggtatgacacctatcagcacgtgtgagcccgccctgtgcccggcccacttctgcttcctcttagcgcaggaggggtcccgcactgggaggggccctcacagcctaccccgctagctttctgcctgatggtgagcttgccccgttgttcgccgccatctttcgcctttgcctgacagctcaggtagggcgacgtctccccccagctcagccccaggcagaagtcaggcccgctctgcacctcgtgctgtgcctggcccgtgtgttcccctcacagtgacgcacagccgtcctgtggggagggagggctctgggaaaagacccccttcttgagtgttccccatcggtttgtcgtcagggctgcgctggcctcggcacaccagtgccacccgctgccccggacgctgagcgtcctgaagagcacgccgcagggacaaggagaccagtcgcgacgagttcatcttctactccaagagactgatgcggctgctcatcgagcacgcgctctccttcctgccctttcaggactgcgtcgtacagaccccgcaggggcaggactatgcgggcaagtgctatgcggggaagcagatcaccggtgtgtccattctgcgcgccggtgaaaccatggagcccgcgctgcgcgctgtgtgcaaagacgtgcgcatcggcaccatcctcatccagaccaaccagcttaccggggagcccgagctccactacctgaggctgcccaaggacatcagcgatgaccacgtgatcctcatggactgcaccgtgtccacgggcgcggcggccatgatggcagtgcgcgtgctcctggaccacgacgtgcctgaggacaagatctttttgctgtcgctgctcatggcagagatgggcgtgcactcagtggcctatgcatttccgcgagtgagaatcatcaccacggcggtggacaagcgggtcaatgaccttttccgcatcatcccaggcattgggaactttggcgaccgctactttgggacagacgcggtccccgatggcagtgacgaggaggaagtggcctacacgggttagctgcccagtgagccatcccgtccccaccaccctcctcctgcctcctgacccaggactgctgaatacaaagatgttaatttttaaaatgttactagtataatttattctatgcattttataaaataaataaagctttagaaaaatgaa

SEQ ID NO: 327352 - DNA, 1582 bp, Homo sapiens
ttgcgcgccgcccggccaggcccgcaaagaggcctccgagcgccatggctgcgcccccggcccgcgcggacgctgatccttcgcccacgtcgccacctacggcccgagacacaccaggccggcaggctgagaaaagcgagaccgcgtgcgaggaccgcagcaatgcagagtccctggacaggctcctgccacctgtgggcactgggcgctctccccggaagcggaccaccagccagtgcaagtcagagcctcccctgctgcgtacaagcaagcgtaccatctacaccgccgggcggccgccctggtacaatgaacacggcacgcaatccaaagaggccttcgccatcggcttgggaggcggcagtgcctctgggaagaccactgtggccagaatgatcatcgaggccctggatgtgccctgggtggtcttgctgtccatggactccttctacaaggtgctgactgagcagcagcaggaacaggccgcacacaacaacttcaacttcgaccacccagatgcctttgacttcgacctcatcatttccaccctcaagaagctgaagcaggggaagagtgtcaaggtgcccatttatgacttcaccacgcacagccggaagaaggactggaaaacactgtatggtgcaaacgtcatcatctttgagggcatcatggcctttgctgacaagacactgttggagctcctggacatgaagatctttgtggacacagactccgacatccgcctggtacggcggctgcgccgggacatcagtgagcgcggccgggacatcgagggtgtcatcaagcagtacaacaagtttgtcaagccctccttcgaccagtacatccagcccaccatgcgcctggcagacatcgtggtccccagagggagcggcaacacggtggccatcgacctgattgtgcagcacgtgcacagccagctggaggagcgtgaactcagcgtcagggctgcgctggcctcggcacaccagtgccacccgctgccccggacgctgagcgtcctgaagagcacgccgcaggtacggggcatgcacaccatcatcagggacaaggagaccagtcgcgacgagttcatcttctactccaagagactgatgcggctgctcatcgagcacgcgctctccttcctgccctttcaggactgcgtcgtacagaccccgcaggggcaggactatgcgggcaagtgctatgcggggaagcagatcaccggtgtgtccattctgcgcgccggtgaaaccatggagcccgcgctgcgcgctgtgtgcaaagacgtgcgcatcggcaccatcctcatccagaccaaccagcttaccggggagcccgaggtgcctgggggcagccggggtgatgagcccgggggtagggggcagagggagctcacagcaaggggacgcagggagccccacctgcagcctgacccctgctgcccgcagctccactacctgaggctgcccaaggacatcagcgatgaccacgtgatcctcatggactgcaccgtgtccacgggcgcggcggccatgatggcagtgcgcgtgctcctgtcgtgagtgagcctctgggt

SEQ ID NO: 327353 - DNA, 611 bp, Homo sapiens
atggactgcaccgtgtccacgggcgcggcggccatgatggcagtgcgcgtgctcctgtcgtgagtgagcctctgggtaggcggggcaggttcaggcagaggtgggatttacctgcccaatacactcggtaggaccacgacgtgcctgaggacaagatctttttgctgtcgctgctcatggcagagatgggcgtgcactcagtggcctatgcatttccgcgagtgagaatcatcaccacggcggtggacaagcgggtcaatgaccttttccgcatcatcccaggcattggtgaggctgcccgggcccttcagccgcacatgagggcagggtgggtggccctgggaggccccaccacactggacccccccccccctttttccagggaactttggcgaccgctactttgggacagacgcggtccccgatggcagtgacgaggaggaagtggcctacacgggttagctgcccagtgagccatcccgtccccaccaccctcctcctgcctcctgacccaggactgctgaatacaaagatgttaatttttaaaatgttactagtataatttattctatgcattttataaaataaataaagctttagaaaaatgaaaa

SEQ ID NO: 327354 - DNA, 2287 bp, Homo sapiens
ttgcgcgccgcccggccaggcccgcaaagaggcctccgagcgccatggctgcgcccccggcccgcgcggacgctgatccttcgcccacgtcgccacctacggcccgagacacaccaggccggcaggctgagaaaagcgagaccgcgtgcgaggaccgcagcaatgcagagtccctggacaggctcctgccacctgtgggcactgggcgctctccccggaagcggaccaccagccagtgcaagtcagagcctcccctgctgcgtacaagcaagcgtaccatctacaccgccgggcggccgccctggtacaatgaacacggcacgcaatccaaagaggccttcgccatcggcttgggaggcggcagtgcctctgggaagaccactgtggccagaatgatcatcgaggccctggatgtgccctgggtggtcttgctgtccatggactccttctacaaggtgctgactgagcagcagcaggaacaggccgcacacaacaacttcaacttcgaccacccagatgcctttgacttcgacctcatcatttccaccctcaagaagctgaagcaggggaagagtgtcaaggtgcccatttatgacttcaccacgcacagccggaagaaggactggaaaacactgtatggtgcaaacgtcatcatctttgagggcatcatggcctttgctgacaagacactgttggagctcctggacatgaagatctttgtggacacagactccgacatccgcctggtacggcggctgcgccgggacatcagtgagcgcggccgggacatcgagggtgtcatcaagcagtacaacaagtttgtcaagccctccttcgaccagtacatccagcccaccatgcgcctggcagacatcgtggtccccagagggagcggcaacacggtggccatcgacctgattgtgcagcacgtgcacagccagctggaggagcgtgaactcagcgtcagggctgcgctggcctcggcacaccagtgccacccgctgccccggacgctgagcgtcctgaagagcacgccgcaggtacggggcatgcacaccatcatcagggacaaggagaccagtcgcgacgagttcatcttctactccaagagactgatgcggctgctcatcgagcacgcgctctccttcctgccctttcaggactgcgtcgtacagaccccgcaggggcaggactatgcgggcaagtgctatgcggggaagcagatcaccggtgtgtccattctgcgcgccggtgaaaccatggagcccgcgctgcgcgctgtgtgcaaagacgtgcgcatcggcaccatcctcatccagaccaaccagcttaccggggagcccgagctccactacctgaggctgcccaaggacatcagcgatgaccacgtgatcctcatggactgcaccgtgtccacgggcgcggcggccatgatggcagtgcgcgtgctcctggaccacgacgtgcctgaggacaagatctttttgctgtcgctgctcatggcagagatgggcgtgcactcagtggcctatgcatttccgcgagtgagaatcatcaccacggcggtggacaagcgggtcaatgaccttttccgcatcatcccaggcattgggaactttggcgaccgctactttgggacagacgcggtccccgatggcagtgacgaggaggaagtggcctacacgggttagctgcccagtgagccatcccgtccccaccaccctcctcctgcctcctgacccaggactgctgaatacaaagatgttaatttttaaaatgttactagtataatttattctatgcattttataaaataaataaagctttagaaaaatgaaaaggtgtgattggttacagcacaggagaggtgtcctggctgaggcatgcatttgtggagactcccatggggagggagggagggagctgagggccctgccttctcccctgcaggaccaagcattcccagtcttgcacttgtgccagatgaaggaaggggtagaactgggccctgcagctcctagctctgctagatggggcccctagaacccatagcttggtggccacctggcctggacctagggaggggacagggccccctggtgctctgggtctcacaagaggcaggctgttttgcccccacccacaaatttgtaccatcagggtcctccccacagttggggggggggagggtccttcccgtcaggacaagtcgctggaggcagcaaagccaggaggcagaccagggcggaagtgggggcctgcgcttggaggcggggccacccggggc

SEQ ID NO: 327355 - DNA, 1915 bp, Homo sapiens
  misc_feature (1905)..(1905): n is a, c, g, or t
ttgcgcgccgcccggccaggcccgcaaagaggcctccgagcgccatggctgcgcccccggcccgcgcggacgctgatccttcgcccacgtcgccacctacggcccgagacacaccaggccggcaggctgagaaaagcgagaccgcgtgcgaggaccgcagcaatgcagagtccctggacaggctcctgccacctgtgggcactgggcgctctccccggaagcggaccaccagccagtgcaagtcagagcctcccctgctgcgtacaagcaagcgtaccatctacaccgccgggcggccgccctggtacaatgaacacggcacgcaatccaaagaggccttcgccatcggcttgggaggcggcagtgcctctgggaagaccactgtggccagaatgatcatcgaggccctggatgtgccctgggtggtcttgctgtccatggactccttctacaaggtgctgactgagcagcagcaggaacaggccgcacacaacaacttcaacttcgaccacccagatgcctttgacttcgacctcatcatttccaccctcaagaagctgaagcaggggaagagtgtcaaggtgcccatttatgacttcaccacgcacagccggaagaaggactggaaaacactgtatggtgcaaacgtcatcatctttgagggcatcatggcctttgctgacaagacactgttggagctcctggacatgaagatctttgtggacacagactccgacatccgcctggtacggcggctgcgccgggacatcagtgagcgcggccgggacatcgagggtgtcatcaagcagtacaacaagtttgtcaagccctccttcgaccagtacatccagcccaccatgcgcctggcagacatcgtggtccccagagggagcggcaacacggtggccatcgacctgattgtgcagcacgtgcacagccagctggaggagcgtgaactcagcgtcagggctgcgctggcctcggcacaccagtgccacccgctgccccggacgctgagcgtcctgaagagcacgccgcaggtacggggcatgcacaccatcatcagggacaaggagaccagtcgcgacgagttcatcttctactccaagagactgatgcggctgctcatcgagcacgcgctctccttcctgccctttcaggactgcgtcgtacagaccccgcaggggcaggactatgcgggcaagtgctatgcggggaagcagatcaccggtgtgtccattctgcgcgccggtgaaaccatggagcccgcgctgcgcgctgtgtgcaaagacgtgcgcatcggcaccatcctcatccagaccaaccagcttaccggggagcccgagctccactacctgaggctgcccaaggacatcagcgatgaccacgtgatcctcatggactgcaccgtgtccacgggcgcggcggccatgatggcagtgcgcgtgctcctggaccacgacgtgcctgaggacaagatctttttgctgtcgctgctcatggcagagatgggcgtgcactcagtggcctatgcatttccgcgagtgagaatcatcaccacggcggtggacaagcgggtcaatgaccttttccgcatcatcccaggcattgggaactttggcgaccgctactttgggacagacgcggtccccgatggcagtgacgaggaggaagtggcctacacgggttagctgcccagtgagccatcccgtccccaccaccctcctcctgcctcctgacccaggactgctgaatacaaagatgttaatttttaaaatgttactagtataatttattctatgcattttattctaaagtttctctcttccttctttatcaacttacaagacaagtttattgaattacgtgcatgcaggagcatttctggtctttccatgagcagcnagagccaagt

SEQ ID NO: 327356 - DNA, 2362 bp, Homo sapiens
gtcctgctgcggggggttcactctgtagccccaggcaggccggggtactgtagctttttccaggggatccaggaggggtgcaggcacacggcgcacagtggtcctccgcaggcctgcggtcctaggctggccgaatgtgccagcccacacacaggagggggcagttcacaccgagggctggcccgaggattgtcagggccacaccaggcaaagccagcgctattaatatcaggcatacacaagcccccagctgggtgatcctcttatgcctgtggccttggcctctgaggacggcagtgagtgctgttccctcagtacggtggaggcttcaagggcctcctagctgctgtgcctctgctgacatttggcaggcagcttctgccagccaagggtctcaccccagccacccggctctgcacccactgtgctgcccacaggagtggtcctgcccatggaagggccagttcaggtggccggagctcctgagctgccctaggggactgctgtgggtctgaggtggtgatgtcccccacggctgcctgcgcctgagcccccacgcatccacccctggggccactctgctgttcaggagcacccacccgtgtcctcgaccatgagcagccccccagcttaccctggcatcaggatctcagggtgccgggcccttggagcagaaggcagcagcaatgcagagtccctggacaggctcctgccacctgtgggcactgggcgctctccccggaagcggaccaccagccagtgcaagtcagagcctcccctgctgcgtacaagcaagcgtaccatctacaccgccgggcggccgccctggtacaatgaacacggcacgcaatccaaagaggccttcgccatcggcttgggaggcggcagtgcctctgggaagaccactgtggccagaatgatcatcgaggccctggatgtgccctgggtggtcttgctgtccatggactccttctacaaggtgctgactgagcagcagcaggaacaggccgcacacaacaacttcaacttcgaccacccagatgcctttgacttcgacctcatcatttccaccctcaagaagctgaagcaggggaagagtgtcaaggtgcccatttatgacttcaccacgcacagccggaagaaggactggaaaacactgtatggtgcaaacgtcatcatctttgagggcatcatggcctttgctgacaagacactgttggagctcctggacatgaagatctttgtggacacagactccgacatccgcctggtacggcggctgcgccgggacatcagtgagcgcggccgggacatcgagggtgtcatcaagcagtacaacaagtttgtcaagccctccttcgaccagtacatccagcccaccatgcgcctggcagacatcgtggtccccagagggagcggcaacacggtggccatcgacctgattgtgcagcacgtgcacagccagctggaggagcgtgaactcagcgtcagggctgcgctggcctcggcacaccagtgccacccgctgccccggacgctgagcgtcctgaagagcacgccgcaggtacggggcatgcacaccatcatcagggacaaggagaccagtcgcgacgagttcatcttctactccaagagactgatgcggctgctcatcgagcacgcgctctccttcctgccctttcaggactgcgtcgtacagaccccgcaggggcaggactatgcgggcaagtgctatgcggggaagcagatcaccggtgtgtccattctgcgcgccggtgaaaccatggagcccgcgctgcgcgctgtgtgcaaagacgtgcgcatcggcaccatcctcatccagaccaaccagcttaccggggagcccgagctccactacctgaggctgcccaaggacatcagcgatgaccacgtgatcctcatggactgcaccgtgtccacgggcgcggcggccatgatggcagtgcgcgtgctcctggaccacgacgtgcctgaggacaagatctttttgctgtcgctgctcatggcagagatgggcgtgcactcagtggcctatgcatttccgcgagtgagaatcatcaccacggcggtggacaagcgggtcaatgaccttttccgcatcatcccaggcattgggaactttggcgaccgctactttgggacagacgcggtccccgatggcagtgacgaggaggaagtggcctacacgggttagctgcccagtgagccatcccgtccccaccaccctcctcctgcctcctgacccaggactgctgaatacaaagatgttaatttttaaaatgttactagtataatttattctatgcattttataaaataaataaagctttagaaaaatgaa

SEQ ID NO: 327357 - DNA, 2042 bp, Homo sapiens
tcccctaggggacagagccttgcccagccagtgcctgtccacacagcaggatgagcatggccccaagatagtgcctcagcctccctagtagctgggattacaggcacccaccaccgcacccaggtaattttttttttttaatttttagtagagacgggtcttcaccatgttggccaggctggtctcaaactcctgacctcaaatgatccacctgcctcggcctcccaccccctcaacaggcatggctgaggcgggcaggctcattgggggtggggggggatgccctgtgggccggccatgccagcgggtacctgggaggtgggcagctctgggccacatccgagtacatccctctctgcagcagcaatgcagagtccctggacaggctcctgccacctgtgggcactgggcgctctccccggaagcggaccaccagccagtgcaagtcagagcctcccctgctgcgtacaagcaagcgtaccatctacaccgccgggcggccgccctggtacaatgaacacggcacgcaatccaaagaggccttcgccatcggcttgggaggcggcagtgcctctgggaagaccactgtggccagaatgatcatcgaggccctggatgtgccctgggtggtcttgctgtccatggactccttctacaaggtgctgactgagcagcagcaggaacaggccgcacacaacaacttcaacttcgaccacccagatgcctttgacttcgacctcatcatttccaccctcaagaagctgaagcaggggaagagtgtcaaggtgcccatttatgacttcaccacgcacagccggaagaaggactggaaaacactgtatggtgcaaacgtcatcatctttgagggcatcatggcctttgctgacaagacactgttggagctcctggacatgaagatctttgtggacacagactccgacatccgcctggtacggcggctgcgccgggacatcagtgagcgcggccgggacatcgagggtgtcatcaagcagtacaacaagtttgtcaagccctccttcgaccagtacatccagcccaccatgcgcctggcagacatcgtggtccccagagggagcggcaacacggtggccatcgacctgattgtgcagcacgtgcacagccagctggaggagcgtgaactcagcgtcagggctgcgctggcctcggcacaccagtgccacccgctgccccggacgctgagcgtcctgaagagcacgccgcaggtacggggcatgcacaccatcatcagggacaaggagaccagtcgcgacgagttcatcttctactccaagagactgatgcggctgctcatcgagcacgcgctctccttcctgccctttcaggactgcgtcgtacagaccccgcaggggcaggactatgcgggcaagtgctatgcggggaagcagatcaccggtgtgtccattctgcgcgccggtgaaaccatggagcccgcgctgcgcgctgtgtgcaaagacgtgcgcatcggcaccatcctcatccagaccaaccagcttaccggggagcccgagctccactacctgaggctgcccaaggacatcagcgatgaccacgtgatcctcatggactgcaccgtgtccacgggcgcggcggccatgatggcagtgcgcgtgctcctggaccacgacgtgcctgaggacaagatctttttgctgtcgctgctcatggcagagatgggcgtgcactcagtggcctatgcatttccgcgagtgagaatcatcaccacggcggtggacaagcgggtcaatgaccttttccgcatcatcccaggcattgggaactttggcgaccgctactttgggacagacgcggtccccgatggcagtgacgaggaggaagtggcctacacgggttagctgcccagtgagccatcccgtccccaccaccctcctcctgcctcctgacccaggactgctgaatacaaagatgttaatttttaaaatgttactagtataatttattctatgcattttataaaataaataaagctttagaaaaatgaa

SEQ ID NO: 327358 - DNA, 2227 bp, Homo sapiens
tcccctaggggacagagccttgcccagccagtgcctgtccacacagcaggatgagcatggccccaagatagtgcctcagcctccctagtagctgggattacaggcacccaccaccgcacccaggtaattttttttttttaatttttagtagagacgggtcttcaccatgttggccaggctggtctcaaactcctgacctcaaatgatccacctgcctcggcctcccaccccctcaacaggcatggctgaggcgggcaggctcattgggggtggggggggatgccctgtgggccggccatgccagcgggtacctgggaggtgggcagctctgggccacatccgagtacatccctctctgcagcagcaatgcagagtccctggacaggctcctgccacctgtgggcactgggcgctctccccggaagcggaccaccagccagtgcaagtcagagcctcccctgctgcgtacaagcaagcgtaccatctacaccgccgggcggccgccctggtacaatgaacacggcacgcaatccaaagaggccttcgccatcggcttgggaggcggcagtgcctctgggaagaccactgtggccagaatgatcatcgaggccctggatgtgccctgggtggtcttgctgtccatggactccttctacaaggtgggcccccgcccagctcccccgaggacccctttgtcctctccctgaccctggaccccctgcaaaagtaggtccctggtctcagccccagcgtggctgctcctgggaggcctagagcccctgtccgctggcattgggtgagggccctactgtgcccacagctgctccacagcctcccccaccaggtgctgactgagcagcagcaggaacaggccgcacacaacaacttcaacttcgaccacccagatgcctttgacttcgacctcatcatttccaccctcaagaagctgaagcaggggaagagtgtcaaggtgcccatttatgacttcaccacgcacagccggaagaaggactggaaaacactgtatggtgcaaacgtcatcatctttgagggcatcatggcctttgctgacaagacactgttggagctcctggacatgaagatctttgtggacacagactccgacatccgcctggtacggcggctgcgccgggacatcagtgagcgcggccgggacatcgagggtgtcatcaagcagtacaacaagtttgtcaagccctccttcgaccagtacatccagcccaccatgcgcctggcagacatcgtggtccccagagggagcggcaacacggtggccatcgacctgattgtgcagcacgtgcacagccagctggaggagcgtgaactcagcgtcagggctgcgctggcctcggcacaccagtgccacccgctgccccggacgctgagcgtcctgaagagcacgccgcaggtacggggcatgcacaccatcatcagggacaaggagaccagtcgcgacgagttcatcttctactccaagagactgatgcggctgctcatcgagcacgcgctctccttcctgccctttcaggactgcgtcgtacagaccccgcaggggcaggactatgcgggcaagtgctatgcggggaagcagatcaccggtgtgtccattctgcgcgccggtgaaaccatggagcccgcgctgcgcgctgtgtgcaaagacgtgcgcatcggcaccatcctcatccagaccaaccagcttaccggggagcccgagctccactacctgaggctgcccaaggacatcagcgatgaccacgtgatcctcatggactgcaccgtgtccacgggcgcggcggccatgatggcagtgcgcgtgctcctggaccacgacgtgcctgaggacaagatctttttgctgtcgctgctcatggcagagatgggcgtgcactcagtggcctatgcatttccgcgagtgagaatcatcaccacggcggtggacaagcgggtcaatgaccttttccgcatcatcccaggcattgggaactttggcgaccgctactttgggacagacgcggtccccgatggcagtgacgaggaggaagtggcctacacgggttagctgcccagtgagccatcccgtccccaccaccctcctcctgcctcctgacccaggactgctgaatacaaagatgttaatttttaaaatgttactagtataatttattctatgcattttataaaataaataaagctttagaaaaatgaa

SEQ ID NO: 327359 - DNA, 2547 bp, Homo sapiens
gtcctgctgcggggggttcactctgtagccccaggcaggccggggtactgtagctttttccaggggatccaggaggggtgcaggcacacggcgcacagtggtcctccgcaggcctgcggtcctaggctggccgaatgtgccagcccacacacaggagggggcagttcacaccgagggctggcccgaggattgtcagggccacaccaggcaaagccagcgctattaatatcaggcatacacaagcccccagctgggtgatcctcttatgcctgtggccttggcctctgaggacggcagtgagtgctgttccctcagtacggtggaggcttcaagggcctcctagctgctgtgcctctgctgacatttggcaggcagcttctgccagccaagggtctcaccccagccacccggctctgcacccactgtgctgcccacaggagtggtcctgcccatggaagggccagttcaggtggccggagctcctgagctgccctaggggactgctgtgggtctgaggtggtgatgtcccccacggctgcctgcgcctgagcccccacgcatccacccctggggccactctgctgttcaggagcacccacccgtgtcctcgaccatgagcagccccccagcttaccctggcatcaggatctcagggtgccgggcccttggagcagaaggcagcagcaatgcagagtccctggacaggctcctgccacctgtgggcactgggcgctctccccggaagcggaccaccagccagtgcaagtcagagcctcccctgctgcgtacaagcaagcgtaccatctacaccgccgggcggccgccctggtacaatgaacacggcacgcaatccaaagaggccttcgccatcggtgagagcagcgggggggtgggacctgctgccggacgcctgcctccggctcccctccagtgcctgtggagcaggagaaggaagccgggcaaccgcaggcagcggcagcgggatgggcacctctgggacctatctgtgccggcagcctgcctgttcctcacagagggtctccactcccgccggcaggcttgggaggcggcagtgcctctgggaagaccactgtggccagaatgatcatcgaggccctggatgtgccctgggtggtcttgctgtccatggactccttctacaaggtgctgactgagcagcagcaggaacaggccgcacacaacaacttcaacttcgaccacccagatgcctttgacttcgacctcatcatttccaccctcaagaagctgaagcaggggaagagtgtcaaggtgcccatttatgacttcaccacgcacagccggaagaaggactggaaaacactgtatggtgcaaacgtcatcatctttgagggcatcatggcctttgctgacaagacactgttggagctcctggacatgaagatctttgtggacacagactccgacatccgcctggtacggcggctgcgccgggacatcagtgagcgcggccgggacatcgagggtgtcatcaagcagtacaacaagtttgtcaagccctccttcgaccagtacatccagcccaccatgcgcctggcagacatcgtggtccccagagggagcggcaacacggtggccatcgacctgattgtgcagcacgtgcacagccagctggaggagcgtgaactcagcgtcagggctgcgctggcctcggcacaccagtgccacccgctgccccggacgctgagcgtcctgaagagcacgccgcaggtacggggcatgcacaccatcatcagggacaaggagaccagtcgcgacgagttcatcttctactccaagagactgatgcggctgctcatcgagcacgcgctctccttcctgccctttcaggactgcgtcgtacagaccccgcaggggcaggactatgcgggcaagtgctatgcggggaagcagatcaccggtgtgtccattctgcgcgccggtgaaaccatggagcccgcgctgcgcgctgtgtgcaaagacgtgcgcatcggcaccatcctcatccagaccaaccagcttaccggggagcccgagctccactacctgaggctgcccaaggacatcagcgatgaccacgtgatcctcatggactgcaccgtgtccacgggcgcggcggccatgatggcagtgcgcgtgctcctggaccacgacgtgcctgaggacaagatctttttgctgtcgctgctcatggcagagatgggcgtgcactcagtggcctatgcatttccgcgagtgagaatcatcaccacggcggtggacaagcgggtcaatgaccttttccgcatcatcccaggcattgggaactttggcgaccgctactttgggacagacgcggtccccgatggcagtgacgaggaggaagtggcctacacgggttagctgcccagtgagccatcccgtccccaccaccctcctcctgcctcctgacccaggactgctgaatacaaagatgttaatttttaaaatgttactagtataatttattctatgcattttataaaataaataaagctttagaaaaatgaa

SEQ ID NO: 327360 - DNA, 2301 bp, Homo sapiens
gtcctgctgcggggggttcactctgtagccccaggcaggccggggtactgtagctttttccaggggatccaggaggggtgcaggcacacggcgcacagtggtcctccgcaggcctgcggtcctaggctggccgaatgtgccagcccacacacaggagggggcagttcacaccgagggctggcccgaggattgtcagggccacaccaggcaaagccagcgctattaatatcaggcatacacaagcccccagctgggtgatcctcttatgcctgtggccttggcctctgaggacggcagtgagtgctgttccctcagtacggtggaggcttcaagggcctcctagctgctgtgcctctgctgacatttggcaggcagcttctgccagccaagggtctcaccccagccacccggctctgcacccactgtgctgcccacaggagtggtcctgcccatggaagggccagttcaggtggccggagctcctgagctgccctaggggactgctgtgggtctgaggtggtgatgtcccccacggctgcctgcgcctgagcccccacgcatccacccctggggccactctgctgttcaggagcacccacccgtgtcctcgaccatgagcagccccccagcttaccctggcatcaggatctcagggtgccgggcccttggagcagaaggcagcagcaatgcagagtccctggacaggctcctgccacctgtgggcactgggcgctctccccggaagcggaccaccagccagtgcaagtcagagcctcccctgctgcgtacaagcaagcgtaccatctacaccgccgggcggccgccctggtacaatgaacacggcacgcaatccaaagaggccttcgccatcggcttgggaggcggcagtgcctctgggaagaccactgtggccagaatgatcatcgaggccctggatgtgccctgggtggtcttgctgtccatggactccttctacaagatgcctttgacttcgacctcatcatttccaccctcaagaagctgaagcaggggaagagtgtcaaggtgcccatttatgacttcaccacgcacagccggaagaaggactggaaaacactgtatggtgcaaacgtcatcatctttgagggcatcatggcctttgctgacaagacactgttggagctcctggacatgaagatctttgtggacacagactccgacatccgcctggtacggcggctgcgccgggacatcagtgagcgcggccgggacatcgagggtgtcatcaagcagtacaacaagtttgtcaagccctccttcgaccagtacatccagcccaccatgcgcctggcagacatcgtggtccccagagggagcggcaacacggtggccatcgacctgattgtgcagcacgtgcacagccagctggaggagcgtgaactcagcgtcagggctgcgctggcctcggcacaccagtgccacccgctgccccggacgctgagcgtcctgaagagcacgccgcaggtacggggcatgcacaccatcatcagggacaaggagaccagtcgcgacgagttcatcttctactccaagagactgatgcggctgctcatcgagcacgcgctctccttcctgccctttcaggactgcgtcgtacagaccccgcaggggcaggactatgcgggcaagtgctatgcggggaagcagatcaccggtgtgtccattctgcgcgccggtgaaaccatggagcccgcgctgcgcgctgtgtgcaaagacgtgcgcatcggcaccatcctcatccagaccaaccagcttaccggggagcccgagctccactacctgaggctgcccaaggacatcagcgatgaccacgtgatcctcatggactgcaccgtgtccacgggcgcggcggccatgatggcagtgcgcgtgctcctggaccacgacgtgcctgaggacaagatctttttgctgtcgctgctcatggcagagatgggcgtgcactcagtggcctatgcatttccgcgagtgagaatcatcaccacggcggtggacaagcgggtcaatgaccttttccgcatcatcccaggcattgggaactttggcgaccgctactttgggacagacgcggtccccgatggcagtgacgaggaggaagtggcctacacgggttagctgcccagtgagccatcccgtccccaccaccctcctcctgcctcctgacccaggactgctgaatacaaagatgttaatttttaaaatgttactagtataatttattctatgcattttataaaataaataaagctttagaaaaatgaa

SEQ ID NO: 327361 - DNA, 1859 bp, Homo sapiens
ttgcgcgccgcccggccaggcccgcaaagaggcctccgagcgccatggctgcgcccccggcccgcgcggacgctgatccttcgcccacgtcgccacctacggcccgagacacaccaggccggcaggctgagaaaagcgagaccgcgtgcgaggaccgcagcaatgcagagtccctggacaggctcctgccacctgtgggcactgggcgctctccccggaagcggaccaccagccagtgcaagtcagagcctcccctgctgcgtacaagcaagcgtaccatctacaccgccgggcggccgccctggtacaatgaacacggcacgcaatccaaagaggccttcgccatcggcttgggaggcggcagtgcctctgggaagaccactgtggccagaatgatcatcgaggccctggatgtgccctgggtggtcttgctgtccatggactccttctacaaggtgctgactgagcagcagcaggaacaggccgcacacaacaacttcaacttcgaccacccagatgcctttgacttcgacctcatcatttccaccctcaagaagctgaagcaggggaagagtgtcaaggtgcccatttatgacttcaccacgcacagccggaagaaggactggaaaacactgtatggtgcaaacgtcatcatctttgagggcatcatggcctttgctgacaagacactgttggagctcctggacatgaagatctttgtggacacagactccgacatccgcctggtacggcggctgcgccgggacatcagtgagcgcggccgggacatcgagggtgtcatcaagcagtacaacaagtttgtcaagccctccttcgaccagtacatccagcccaccatgcgcctggcagacatcgtggtccccagagggagcggcaacacggtggccatcgacctgattgtgcagcacgtgcacagccagctggaggagcgtgaactcagcgtcagggctgcgctggcctcggcacaccagtgccacccgctgccccggacgctgagcgtcctgaagagcacgccgcaggtacggggcatgcacaccatcatcagggacaaggagaccagtcgcgacgagttcatcttctactccaagagactgatgcggctgctcatcgagcacgcgctctccttcctgccctttcaggactgcgtcgtacagaccccgcaggggcaggactatgcgggcaagtgctatgcggggaagcagatcaccggtgtgtccattctgcgcgccggtgaaaccatggagcccgcgctgcgcgctgtgtgcaaagacgtgcgcatcggcaccatcctcatccagaccaaccagcttaccggggagcccgagcctgacccctgctgcccgcagctccactacctgaggctgcccaaggacatcagcgatgaccacgtgatcctcatggactgcaccgtgtccacgggcgcggcggccatgatggcagtgcgcgtgctcctggaccacgacgtgcctgaggacaagatctttttgctgtcgctgctcatggcagagatgggcgtgcactcagtggcctatgcatttccgcgagtgagaatcatcaccacggcggtggacaagcgggtcaatgaccttttccgcatcatcccaggcattgggaactttggcgaccgctactttgggacagacgcggtccccgatggcagtgacgaggaggaagtggcctacacgggttagctgcccagtgagccatcccgtccccaccaccctcctcctgcctcctgacccaggactgctgaatacaaagatgttaatttttaaaatgttactagtataatttattctatgcattttataaaataaataaagctttagaaaaatgaa

SEQ ID NO: 327362 - DNA, 1946 bp, Homo sapiens
ttgcgcgccgcccggccaggcccgcaaagaggcctccgagcgccatggctgcgcccccggcccgcgcggacgctgatccttcgcccacgtcgccacctacggcccgagacacaccaggccggcaggctgagaaaagcgagaccgcgtgcgaggaccgcagcaatgcagagtccctggacaggctcctgccacctgtgggcactgggcgctctccccggaagcggaccaccagccagtgcaagtcagagcctcccctgctgcgtacaagcaagcgtaccatctacaccgccgggcggccgccctggtacaatgaacacggcacgcaatccaaagaggccttcgccatcggcttgggaggcggcagtgcctctgggaagaccactgtggccagaatgatcatcgaggccctggatgtgccctgggtggtcttgctgtccatggactccttctacaaggtgctgactgagcagcagcaggaacaggccgcacacaacaacttcaacttcgaccacccagatgcctttgacttcgacctcatcatttccaccctcaagaagctgaagcaggggaagagtgtcaaggtgcccatttatgacttcaccacgcacagccggaagaaggactggaaaacactgtatggtgcaaacgtcatcatctttgagggcatcatggcctttgctgacaagacactgttggagctcctggacatgaagatctttgtggacacagactccgacatccgcctggtacggcggctgcgccgggacatcagtgagcgcggccgggacatcgagggtgtcatcaagcagtacaacaagtttgtcaagccctccttcgaccagtacatccagcccaccatgcgcctggcagacatcgtggtccccagagggagcggcaacacggtggccatcgacctgattgtgcagcacgtgcacagccagctggaggagcgtgaactcagcgtcagggctgcgctggcctcggcacaccagtgccacccgctgccccggacgctgagcgtcctgaagagcacgccgcaggtacggggcatgcacaccatcatcagggacaaggagaccagtcgcgacgagttcatcttctactccaagagactgatgcggctgctcatcgagcacgcgctctccttcctgccctttcaggactgcgtcgtacagaccccgcaggggcaggactatgcgggcaagtgctatgcggggaagcagatcaccggtgtgtccattctgcgcgccggtgaaaccatggagcccgcgctgcgcgctgtgtgcaaagacgtgcgcatcggcaccatcctcatccagaccaaccagcttaccggggagcccgaggtgcctgggggcagccggggtgatgagcccgggggtagggggcagagggagctcacagcaaggggacgcagggagccccacctgcagcctgacccctgctgcccgcagctccactacctgaggctgcccaaggacatcagcgatgaccacgtgatcctcatggactgcaccgtgtccacgggcgcggcggccatgatggcagtgcgcgtgctcctggaccacgacgtgcctgaggacaagatctttttgctgtcgctgctcatggcagagatgggcgtgcactcagtggcctatgcatttccgcgagtgagaatcatcaccacggcggtggacaagcgggtcaatgaccttttccgcatcatcccaggcattgggaactttggcgaccgctactttgggacagacgcggtccccgatggcagtgacgaggaggaagtggcctacacgggttagctgcccagtgagccatcccgtccccaccaccctcctcctgcctcctgacccaggactgctgaatacaaagatgttaatttttaaaatgttactagtataatttattctatgcattttataaaataaataaagctttagaaaaatgaa

SEQ ID NO: 327363 - DNA, 937 bp, Homo sapiens
ttgtgtgcgcgtcggttgttgcgcgtgctgcacaattcagctggaggagcgtgaactcagcgtcagggctgcgctggcctcggcacaccagtgccacccgctgccccggacgctgagcgtcctgaagagcacgccgcaggtacggggcatgcacaccatcatcagggacaaggagaccagtcgcgacgagttcatcttctactccaagagactgatgcggctgctcatcgagcacgcgctctccttcctgccctttcaggactgcgtcgtacagaccccgcaggggcaggactatgcgggcaagtgctatgcggggaagcagatcaccggtgtgtccattctgcgcgccggtgaaaccatggagcccgcgctgcgcgctgtgtgcaaagacgtgcgcatcggcaccatcctcatccagaccaaccagcttaccggggagcccgagctccactacctgaggctgcccaaggacatcagcgatgaccacgtgatcctcatggactgcaccgtgtccacgggcgcggcggccatgatggcagtgcgcgtgctcctggaccacgacgtgcctgaggacaagatctttttgctgtcgctgctcatggcagagatgggcgtgcactcagtggcctatgcatttccgcgagtgagaatcatcaccacggcggtggacaagcgggtcaatgaccttttccgcatcatcccaggcattgggaactttggcgaccgctactttgggacagacgcggtccccgatggcagtgacgaggaggaagtggcctacacgggttagctgcccagtgagccatcccgtccccaccaccctcctcctgcctcctgacccaggactgctgaatacaaagatgttaatttttaaaatgttactagtataatttattctatgcattttataaaataaataaagctttagaaaaatgaa

SEQ ID NO: 327364 - DNA, 656 bp, Homo sapiens
gaaaataggagaatttactttcatttcccaagactatatagcctgtcctctagtttccagcagtgagagagagaaagcgagcggtctccagtacagtgccgtagactctccattagaccctctcaggttgacaaagattagttcatctgaatcctagagtagggtagtttagctgtgagtttgcctaaaaccatggttctcaaacttcagcaggcatgaagccgggtgctgtggctcacactgaggtggggggattgcttgagcccaggagttcaagaccagcctgggcaacatagcaaaacccccatctctaaaaatgaaaagaaacgctttagcagacatggcatgagaatcacctagagggctgcaataccagagattctgattcagtagccctggggtaaggtccaagtgcttgcatttctaacaagctcctaagagctgatgctactggcctctgggggccacactttgagaccctgaaagcctaaaggatcatgcagttcatctaaatctgtgtcaccaccttatgtctaaaagctactgctggccgggcatggtggctcacgcctgtaatcccaacactttggaaggccgaggcaggtagatcacttgaggtcaggagttcgagaccagcctgaccaacatggtgaaac

SEQ ID NO: 327365 - DNA, 370 bp, Homo sapiens
ctcaaggataagagaggctccaagatggagtggactccatctaggccatgttgcctggaaaagctggaagaggcccctgtagagtgagcagtgattgagaggcaggccatggggactgagcaggggcggggccagagtgtttgggaagcatgtctgtcagcagagggttcttagggagaattggactggggagtcaggaggggtaagagccaaagactgggacttgggaatagcccatctttgagggaaaggcaggggaggagccagggaacacctgcctcctttggaatctgcaaatgcaggtccttctggctggaaagatagaggcaccttagagactgttgctgtgaggacatcttttcttttccct

SEQ ID NO: 327366 - DNA, 637 bp, Homo sapiens
ctgataccattcagctcggtacccacaccacctgagtccagcagtgagagagagaaagcgagcggtctccagtacagtgccgtagactctccattagaccctctcaggttgacaaagattagttcatctgaatcctagagtagggtagtttagctgtgagtttgcctaaaaccatggttctcaaacttcagcaggcatgaagccgggtgctgtggctcacactgaggtggggggattgcttgagcccaggagttcaagaccagcctgggcaacatagcaaaacccccatctctaaaaatgaaaagaaacgctttagcagacatggcatgagaatcacctagagggctgcaataccagagattctgattcagtagccctggggtaaggtccaagtgcttgcatttctaacaagctcctaagagctgatgctactggcctctgggggccacactttgagaccctgaaagcctaaaggatcatgcagttcatctaaatctgtgtcaccaccttatgtctaaaagctactgctggccgggcatggtggctcacgcctgtaatcccaacactttggaaggccgaggcaggtagatcacttgaggtcaggagttcgagaccagcctgaccaacatggtgaaac

SEQ ID NO: 327367 - DNA, 470 bp, Homo sapiens
gggagtcaggaggggtaagagccaaagactgggacttgggaatagcccatctttgagggaaaggcaggggaggagccagggaacacctgcctcctttggaatctgcaaatgcaggtccttctggctggaaagatagaggcaccttagagactgttgctgtgaggacatcttttcttttcccttgtccagtcctgtaatgatgtgggaaacaaagcacagatagtgtaccagctgcccaatagaggaaaataggagaatttactttcatttcccaagactatatagcctgtcctctagtttccagcagtgagagagagaaagcgagcggtctccagtacagtgccgtagactctccattagaccctctcaggttgacaaagattagttcatctgaatcctagagtagggtagtttagctgtgagtttgcctaaaaccatggttctcaaacttcagcaggcatgaagccggg

SEQ ID NO: 327368 - DNA, 1432 bp, Homo sapiens
  misc_feature (24)..(24): n is a, c, g, or t
gcttgatgcgctcgcaatggctgncgcagcactgtctccgtctgcacgcacacacctgacacctctttgggctctgaactgctttctctcatcaagcatgctagcactctagacagaattctagaaatttggcagacagtggaagcctttaattgaacttactccttcgttgactgaaaggagttttaaattctgagctcctgagatactgactagcaaccatggaatgaatgtgtgaccagaaagtggctttgacaccaagtgctactgtccctttgtaattggcttctaacagattcaaccagaaataattgataatgtgaatttttgttaattgttcacttgtaggaaaatagaacatgtatcaccctttgttaggtagacatgaacttttcctgcacaaagccttgcttttagagaatgcccaataaggcaagaaaaagcatagtaacttgtgctttgagagctcaatatttgtatcttatcagtacagaagaaatatttctgtgtaacttgatcttctgtctagtacttgtcttataggtaaccaacactgaaaactttgtagtgatgactaccaaagaaatacatagtaaaacaaccttttatttccaaattgttaaagagccagccattgatgctgctacatgagttccatgctcaagagccattgtaagagattaaggggtttctaggtttttggtgattttttgtttgtttttttctttgttttttagggtttttttttcttctttaattttttgattaaaacatacacacagctgttagcataaagtcgtggggggcattttctggaatgctcagcagttctgattaactgccaagcccaggttgcctctcatgaggcaactgaaaaaatcctgtgtcttgatagcatgggtgctgtgtgtgtgcatgtgtgtgtctgcattcatgccttaactcgggttactgcacaactttagttcttgacttagtctgcaccgtcatctagattgtattgtacatctcggtctgaacttcatcctggcaaaaacaaagttgcaggcacaacagtttaagaatgcattcctccagaagagtatctggtcaggttgaccctgagccttctttggacttgatttggaacttagcctggaaagcgaaagtggactgtccaacagaaagatgtcaacaaggaaaagaggagagccaagcgctagcatgccttttgcctctgcatatctgtgcacactgtatgttgttcatgatagcttgtctacaacttgactaggttggagttctggtaatagtggcaatcttgacattcttggtcagagtttagagagatgtaagactttcaattaatgtcttatttactcctttatgttgattagtctttgatacatgtgctgaatcagaaacctaaataaagataattttttaaaatgta

SEQ ID NO: 327369 - DNA, 7014 bp, Homo sapiens
gcttcagtcccgcgaccgaagcagggcgcgcagcagcgctgagtgccccggaacgtgcgtcgcgcccccagtgtccgtcgcgtccgccgcgccccgggcggggatggggcggccagactgagcgccgcacccgccatccagacccgccggccctagccgcagtccctccagccgtggccccagcgcgcacgggcgatggcgaaggcgacgtccggtgccgcggggctgcgtctgctgttgctgctgctgctgccgctgctaggcaaagtggcattgggcctctacttctcgagggatgcttactgggagaagctgtatgtggaccaggcggccggcacgcccttgctgtacgtccatgccctgcgggacgcccctgaggaggtgcccagcttccgcctgggccagcatctctacggcacgtaccgcacacggctgcatgagaacaactggatctgcatccaggaggacaccggcctcctctaccttaaccggagcctggaccatagctcctgggagaagctcagtgtccgcaaccgcggctttcccctgctcaccgtctacctcaaggtcttcctgtcacccacatcccttcgtgagggcgagtgccagtggccaggctgtgcccgcgtatacttctccttcttcaacacctcctttccagcctgcagctccctcaagccccgggagctctgcttcccagagacaaggccctccttccgcattcgggagaaccgacccccaggcaccttccaccagttccgcctgctgcctgtgcagttcttgtgccccaacatcagcgtggcctacaggctcctggagggtgagggtctgcccttccgctgcgccccggacagcctggaggtgagcacgcgctgggccctggaccgcgagcagcgggagaagtacgagctggtggccgtgtgcaccgtgcacgccggcgcgcgcgaggaggtggtgatggtgcccttcccggtgaccgtgtacgacgaggacgactcggcgcccaccttccccgcgggcgtcgacaccgccagcgccgtggtggagttcaagcggaaggaggacaccgtggtggccacgctgcgtgtcttcgatgcagacgtggtacctgcatcaggggagctggtgaggcggtacacaagcacgctgctccccggggacacctgggcccagcagaccttccgggtggaacactggcccaacgagacctcggtccaggccaacggcagcttcgtgcgggcgaccgtacatgactataggctggttctcaaccggaacctctccatctcggagaaccgcaccatgcagctggcggtgctggtcaatgactcagacttccagggcccaggagcgggcgtcctcttgctccacttcaacgtgtcggtgctgccggtcagcctgcacctgcccagtacctactccctctccgtgagcaggagggctcgccgatttgcccagatcgggaaagtctgtgtggaaaactgccaggcgttcagtggcatcaacgtccagtacaagctgcattcctctggtgccaactgcagcacgctaggggtggtcacctcagccgaggacacctcggggatcctgtttgtgaatgacaccaaggccctgcggcggcccaagtgtgccgaacttcactacatggtggtggccaccgaccagcagacctctaggcaggcccaggcccagctgcttgtaacagtggaggggtcatatgtggccgaggaggcgggctgccccctgtcctgtgcagtcagcaagagacggctggagtgtgaggagtgtggcggcctgggctccccaacaggcaggtgtgagtggaggcaaggagatggcaaagggatcaccaggaacttctccacctgctctcccagcaccaagacctgccccgacggccactgcgatgttgtggagacccaagacatcaacatttgccctcaggactgcctccggggcagcattgttgggggacacgagcctggggagccccgggggattaaagctggctatggcacctgcaactgcttccctgaggaggagaagtgcttctgcgagcccgaagacatccaggatccactgtgcgacgagctgtgccgcacggtgatcgcagccgctgtcctcttctccttcatcgtctcggtgctgctgtctgccttctgcatccactgctaccacaagtttgcccacaagccacccatctcctcagctgagatgaccttccggaggcccgcccaggccttcccggtcagctactcctcttccggtgcccgccggccctcgctggactccatggagaaccaggtctccgtggatgccttcaagatcctggaggatccaaagtgggaattccctcggaagaacttggttcttggaaaaactctaggagaaggcgaatttggaaaagtggtcaaggcaacggccttccatctgaaaggcagagcagggtacaccacggtggccgtgaagatgctgaaagagaacgcctccccgagtgagcttcgagacctgctgtcagagttcaacgtcctgaagcaggtcaaccacccacatgtcatcaaattgtatggggcctgcagccaggatggcccgctcctcctcatcgtggagtacgccaaatacggctccctgcggggcttcctccgcgagagccgcaaagtggggcctggctacctgggcagtggaggcagccgcaactccagctccctggaccacccggatgagcgggccctcaccatgggcgacctcatctcatttgcctggcagatctcacaggggatgcagtatctggccgagatgaagctcgttcatcgggacttggcagccagaaacatcctggtagctgaggggcggaagatgaagatttcggatttcggcttgtcccgagatgtttatgaagaggattcctacgtgaagaggagccagggtcggattccagttaaatggatggcaattgaatccctttttgatcatatctacaccacgcaaagtgatgtatggtcttttggtgtcctgctgtgggagatcgtgaccctagggggaaacccctatcctgggattcctcctgagcggctcttcaaccttctgaagaccggccaccggatggagaggccagacaactgcagcgaggagatgtaccgcctgatgctgcaatgctggaagcaggagccggacaaaaggccggtgtttgcggacatcagcaaagacctggagaagatgatggttaagaggagagactacttggaccttgcggcgtccactccatctgactccctgatttatgacgacggcctctcagaggaggagacaccgctggtggactgtaataatgcccccctccctcgagccctcccttccacatggattgaaaacaaactctatggtagaatttcccatgcatttactagattctagcaccgctgtcccctctgcactatccttcctctctgtgatgctttttaaaaatgtttctggtctgaacaaaaccaaagtctgctctgaacctttttatttgtaaatgtctgactttgcatccagtttacatttaggcattattgcaactatgtttttctaaaaggaagtgaaaataagtgtaattaccacattgcccagcaacttaggatggtagaggaaaaaacagatcagggcggaactctcaggggagaccaagaacaggttgaataaggcgcttctggggtgggaatcaagtcatagtacttctactttaactaagtggataaatatacaaatctggggaggtattcagttgagaaaggagccaccagcaccactcagcctgcactgggagcacagccaggttcccccagacccctcctgggcaggcaggtgcctctcagaggccacccggcactggcgagcagccactggccaagcctcagccccagtcccagccacatgtcctccatcaggggtagcgaggttgcaggagctggctggccctgggaggacgcacccccactgctgttttcacatcctttcccttacccaccttcaggacggttgtcacttatgaagtcagtgctaaagctggagcagttgctttttgaaagaacatggtctgtggtgctgtggtcttacaatggacagtaaatatggttcttgccaaaactccttcttttgtctttgattaaatactagaaattttttctgtttcctaacttcatcattgattgtttgaaatcttggagtttaagcatttttttcaagctgagacggttccttttgcatgcctcctgactcactgactcctcactggctttgtgtctagtgccacactccatttgtgctgacgatgctatgaggctggcccgtgtgcaccctcgatttggaaggtcctcttctccgttgtaggctcagacaacagacgagtgcctcctttacgttagagaatgttttatagaacgtttccgctgcagtaagccattgagtgcagcagtgtgctgttgccctacactgccttagaaaaagagttaagcagttcgacaaatatacatcagattagagagtctcaagttcataaaagtcaaaattggtagtgtctgttaagttacatttaccaagagagcacatgatatttcccctaactataacagtgtttttggaaacctggaacacaaaaccattaatataattggcacagaaaccacgagtttggtttgaacatcaaagggagttttgccaaggccttactgtctgcacttgaagttttggttcttcagtgcagaacaaatgatctgttttcatttttaggcatgtcagacccgaactggcctggagagagtcctgtaccactcacgagagctgatggcactaacactgggtttccaagatatccaaatgatagtgtatatgctaactggatgctttcaccctcagcggcaaaattaatggacacgtttgatagttaacatttctttgtgaaaggtaatggactcacaaggggaagaaacatgctgagaatggaaagtctaccggccctttctttgtgaacgtcacattggccgagccgtgttcagttcccaggtggcagactcgtttttggtagtttgttttaacttccaaggtggttttacttctgatagccggtgattttccctcctagcagacatgccacaccgggtaagagctctgagtcttagtggttaagcattcctttctcttcagtgcccagcagcacccagtgttggtctgtgtccatcagtgaccaccaacattctgtgttcacatgtgtgggtccaacacttactacctggtgtatgaaattggacctgaactgttggatttttctagttgccgccaaacaaggcaaaaaaatttaaacatgaagcacacacacaaaaaaggcagtaggaaaaatgctggccctgatgacctgtccttattcagaatgagagactgcggggggggcctgggggtagtgtcaatgcccctccagggctggaggggaagaggggccccgaggatgggcctgggctcagcattcgagatcttgagaatgatttttttttaatcatgcaacctttccttaggaagacatttggttttcatcatgattaagatgattcctagatttagcacaatggagagattccatgccatctttactatgtggatggtggtatcagggaagagggctcacaagacacatttgtcccccgggcccaccacatcatcctcacgtgttcggtactgagcagccactacccctgatgagaacagtatgaagaaagggggctgttggagtcccagaattgctgacagcagaggctttgctgctgtgaatcccacctgccaccagcctgcagcacaccccacagccaagtagaggcgaaagcagtggctcatcctacctgttaggagcaggtagggcttgtactcactttaatttgaatcttatcaacttactcataaagggacaggctagctagctgtgttagaagtagcaatgacaatgaccaaggactgctacacctctgattacaattctgatgtgaaaaagatggtgtttggctcttatagagcctgtgtgaaaggcccatggatcagctcttcctgtgtttgtaatttaatgctgctacaagatgtttctgtttcttagattctgaccatgactcataagcttcttgtcattcttcattgcttgtttgtggtcacagatgcacaacactcctccagtcttgtgggggcagcttttgggaagtctcagcagctcttctggctgtgttgtcagcactgtaacttcgcagaaaagagtcggattaccaaaacactgcctgctcttcagacttaaagcactgataggacttaaaatagtctcattcaaatactgtattttatataggcatttcacaaaaacagcaaaattgtggcattttgtgaggccaaggcttggatgcgtgtgtaatagagccttatggtgtgtgcgcacacacccagagggagagtttgaaaaatgcttattggacacgtaacctggctctaatttgggctgtttttcagatacactgtgataagttcttttacaaatatctatagacatggtaaacttttggttttcagatatgcttaatgatagtcttactaaatgcagaaataagaataaactttctcaaattattaaaaatgcctacacagtaagtgtgaattgctgcaacaggtttgttctcaggagggtaagaactccaggtctaaacagctgacccagtgatggggaatttatccttgaccaatttatccttgaccaataacctaattgtctattcctgagttataaaagtccccatccttattagctctactggaattttcatacacgtaaatgcagaagttactaagtattaagtattactgagtattaagtagtaatctgtcagttattaaaatttgtaaaatctatttatgaaaggtcattaaaccagatcatgttcctttttttgtaatcaaggtgactaagaaaatcagttgtgtaaataaaatcatgtatcataaaatgtg

SEQ ID NO: 327370 - DNA, 4394 bp, Homo sapiens
gcttcagtcccgcgaccgaagcagggcgcgcagcagcgctgagtgccccggaacgtgcgtcgcgcccccagtgtccgtcgcgtccgccgcgccccgggcggggatggggcggccagactgagcgccgcacccgccatccagacccgccggccctagccgcagtccctccagccgtggccccagcgcgcacgggcgatggcgaaggcgacgtccggtgccgcggggctgcgtctgctgttgctgctgctgctgccgctgctaggcaaagtggcattgggcctctacttctcgagggatgcttactgggagaagctgtatgtggaccaggcggccggcacgcccttgctgtacgtccatgccctgcgggacgcccctgaggaggtgcccagcttccgcctgggccagcatctctacggcacgtaccgcacacggctgcatgagaacaactggatctgcatccaggaggacaccggcctcctctaccttaaccggagcctggaccatagctcctgggagaagctcagtgtccgcaaccgcggctttcccctgctcaccgtctacctcaaggtcttcctgtcacccacatcccttcgtgagggcgagtgccagtggccaggctgtgcccgcgtatacttctccttcttcaacacctcctttccagcctgcagctccctcaagccccgggagctctgcttcccagagacaaggccctccttccgcattcgggagaaccgacccccaggcaccttccaccagttccgcctgctgcctgtgcagttcttgtgccccaacatcagcgtggcctacaggctcctggagggtgagggtctgcccttccgctgcgccccggacagcctggaggtgagcacgcgctgggccctggaccgcgagcagcgggagaagtacgagctggtggccgtgtgcaccgtgcacgccggcgcgcgcgaggaggtggtgatggtgcccttcccggtgaccgtgtacgacgaggacgactcggcgcccaccttccccgcgggcgtcgacaccgccagcgccgtggtggagttcaagcggaaggaggacaccgtggtggccacgctgcgtgtcttcgatgcagacgtggtacctgcatcaggggagctggtgaggcggtacacaagcacgctgctccccggggacacctgggcccagcagaccttccgggtggaacactggcccaacgagacctcggtccaggccaacggcagcttcgtgcgggcgaccgtacatgactataggctggttctcaaccggaacctctccatctcggagaaccgcaccatgcagctggcggtgctggtcaatgactcagacttccagggcccaggagcgggcgtcctcttgctccacttcaacgtgtcggtgctgccggtcagcctgcacctgcccagtacctactccctctccgtgagcaggagggctcgccgatttgcccagatcgggaaagtctgtgtggaaaactgccaggcgttcagtggcatcaacgtccagtacaagctgcattcctctggtgccaactgcagcacgctaggggtggtcacctcagccgaggacacctcggggatcctgtttgtgaatgacaccaaggccctgcggcggcccaagtgtgccgaacttcactacatggtggtggccaccgaccagcagacctctaggcaggcccaggcccagctgcttgtaacagtggaggggtcatatgtggccgaggaggcgggctgccccctgtcctgtgcagtcagcaagagacggctggagtgtgaggagtgtggcggcctgggctccccaacaggcaggtgtgagtggaggcaaggagatggcaaagggatcaccaggaacttctccacctgctctcccagcaccaagacctgccccgacggccactgcgatgttgtggagacccaagacatcaacatttgccctcaggactgcctccggggcagcattgttgggggacacgagcctggggagccccgggggattaaagctggctatggcacctgcaactgcttccctgaggaggagaagtgcttctgcgagcccgaagacatccaggatccactgtgcgacgagctgtgccgcacggtgatcgcagccgctgtcctcttctccttcatcgtctcggtgctgctgtctgccttctgcatccactgctaccacaagtttgcccacaagccacccatctcctcagctgagatgaccttccggaggcccgcccaggccttcccggtcagctactcctcttccggtgcccgccggccctcgctggactccatggagaaccaggtctccgtggatgccttcaagatcctggaggatccaaagtgggaattccctcggaagaacttggttcttggaaaaactctaggagaaggcgaatttggaaaagtggtcaaggcaacggccttccatctgaaaggcagagcagggtacaccacggtggccgtgaagatgctgaaagagaacgcctccccgagtgagcttcgagacctgctgtcagagttcaacgtcctgaagcaggtcaaccacccacatgtcatcaaattgtatggggcctgcagccaggatggcccgctcctcctcatcgtggagtacgccaaatacggctccctgcggggcttcctccgcgagagccgcaaagtggggcctggctacctgggcagtggaggcagccgcaactccagctccctggaccacccggatgagcgggccctcaccatgggcgacctcatctcatttgcctggcagatctcacaggggatgcagtatctggccgagatgaagctcgttcatcgggacttggcagccagaaacatcctggtagctgaggggcggaagatgaagatttcggatttcggcttgtcccgagatgtttatgaagaggattcctacgtgaagaggagccagggtcggattccagttaaatggatggcaattgaatccctttttgatcatatctacaccacgcaaagtgatgtatggtcttttggtgtcctgctgtgggagatcgtgaccctagggggaaacccctatcctgggattcctcctgagcggctcttcaaccttctgaagaccggccaccggatggagaggccagacaactgcagcgaggagatgtaccgcctgatgctgcaatgctggaagcaggagccggacaaaaggccggtgtttgcggacatcagcaaagacctggagaagatgatggttaagaggagagactacttggaccttgcggcgtccactccatctgactccctgatttatgacgacggcctctcagaggaggagacaccgctggtggactgtaataatgcccccctccctcgagccctcccttccacatggattgaaaacaaactctatggcatgtcagacccgaactggcctggagagagtcctgtaccactcacgagagctgatggcactaacactgggtttccaagatatccaaatgatagtgtatatgctaactggatgctttcaccctcagcggcaaaattaatggacacgtttgatagttaacatttctttgtgaaagatgcacaacactcctccagtcttgtgggggcagcttttgggaagtctcagcagctcttctggctgtgttgtcagcactgtaacttcgcagaaaagagtcggattaccaaaacactgcctgctcttcagacttaaagcactgataggacttaaaatagtctcattcaaatactgtattttatataggcatttcacaaaaacagcaaaattgtggcattttgtgaggccaaggcttggatgcgtgtgtaatagagccttatggtgtgtgcgcacacacccagagggagagtttgaaaaatgcttattggacacgtaacctggctctaatttgggctgtttttcagatacactgtgataagttcttttacaaatatctatagacatggtaaacttttggttttcagatatgcttaatgatagtcttactaaatgcagaaataagaataaactttctcaaattattaaaaatgcctacacagtaagtgtgaattgctgcaacaggtttgttctcaggagggtaagaactccaggtctaaacagctgacccagtgatggggaatttatccttgaccaatttatccttgaccaataacctaattgtctattcctgagttataaaagtccccatccttattagctctactggaattttcatacacgtaaatgcagaagttactaagtattaagtattactgagtattaagtagtaatctgtcagttattaaaatttgtaaaatctatttatgaaaggtcattaaaccagatcatgttcctttttttgtaatcaaggtgactaagaaaatcagttgtgtaaataaaatcatgtatcataaaatgtg

SEQ ID NO: 327371 - DNA, 3726 bp, Homo sapiens
gcgccctggtgccaggcgctcagctcggcgctcccctgtgctcgcccggcgcccactcattcgcagcccggccttcgtcgccgccgcctccctgctgctcctcctcctttccccagcccgccgcggccatggcggacagcgccagcgagagcgacacggacggggcggggggcaacagcagcagctcggccgccatgcagtcgtcctgctcgtcgacctcgggcggcggcggtggcggcgggggaggcggcggcggtgggaagtcggggggcattgtcatctcgccgttccgcctggaggagctcaccaaccgcctggcctcgctgcagcaagagaacaaggtgctgaagatagagctggagacctacaaactgaagtgcaaggcactgcaggaggagaaccgcgacctgcgcaaagccagcgttaccatcgaggatccaaagtgggaattccctcggaagaacttggttcttggaaaaactctaggagaaggcgaatttggaaaagtggtcaaggcaacggccttccatctgaaaggcagagcagggtacaccacggtggccgtgaagatgctgaaagagaacgcctccccgagtgagcttcgagacctgctgtcagagttcaacgtcctgaagcaggtcaaccacccacatgtcatcaaattgtatggggcctgcagccaggatggcccgctcctcctcatcgtggagtacgccaaatacggctccctgcggggcttcctccgcgagagccgcaaagtggggcctggctacctgggcagtggaggcagccgcaactccagctccctggaccacccggatgagcgggccctcaccatgggcgacctcatctcatttgcctggcagatctcacaggggatgcagtatctggccgagatgaagctcgttcatcgggacttggcagccagaaacatcctggtagctgaggggcggaagatgaagatttcggatttcggcttgtcccgagatgtttatgaagaggattcctacgtgaagaggagccagggtcggattccagttaaatggatggcaattgaatccctttttgatcatatctacaccacgcaaagtgatgtatggtcttttggtgtcctgctgtgggagatcgtgaccctagggggaaacccctatcctgggattcctcctgagcggctcttcaaccttctgaagaccggccaccggatggagaggccagacaactgcagcgaggagatgtaccgcctgatgctgcaatgctggaagcaggagccggacaaaaggccggtgtttgcggacatcagcaaagacctggagaagatgatggttaagaggagagactacttggaccttgcggcgtccactccatctgactccctgatttatgacgacggcctctcagaggaggagacaccgctggtggactgtaataatgcccccctccctcgagccctcccttccacatggattgaaaacaaactctatggcatgtcagacccgaactggcctggagagagtcctgtaccactcacgagagctgatggcactaacactgggtttccaagatatccaaatgatagtgtatatgctaactggatgctttcaccctcagcggcaaaattaatggacacgtttgatagttaacatttctttgtgaaaggtaatggactcacaaggggaagaaacatgctgagaatggaaagtctaccggccctttctttgtgaacgtcacattggccgagccgtgttcagttcccaggtggcagactcgtttttggtagtttgttttaacttccaaggtggttttacttctgatagccggtgattttccctcctagcagacatgccacaccgggtaagagctctgagtcttagtggttaagcattcctttctcttcagtgcccagcagcacccagtgttggtctgtgtccatcagtgaccaccaacattctgtgttcacatgtgtgggtccaacacttactacctggtgtatgaaattggacctgaactgttggatttttctagttgccgccaaacaaggcaaaaaaatttaaacatgaagcacacacacaaaaaaggcagtaggaaaaatgctggccctgatgacctgtccttattcagaatgagagactgcggggggggcctgggggtagtgtcaatgcccctccagggctggaggggaagaggggccccgaggatgggcctgggctcagcattcgagatcttgagaatgatttttttttaatcatgcaacctttccttaggaagacatttggttttcatcatgattaagatgattcctagatttagcacaatggagagattccatgccatctttactatgtggatggtggtatcagggaagagggctcacaagacacatttgtcccccgggcccaccacatcatcctcacgtgttcggtactgagcagccactacccctgatgagaacagtatgaagaaagggggctgttggagtcccagaattgctgacagcagaggctttgctgctgtgaatcccacctgccaccagcctgcagcacaccccacagccaagtagaggcgaaagcagtggctcatcctacctgttaggagcaggtagggcttgtactcactttaatttgaatcttatcaacttactcataaagggacaggctagctagctgtgttagaagtagcaatgacaatgaccaaggactgctacacctctgattacaattctgatgtgaaaaagatggtgtttggctcttatagagcctgtgtgaaaggcccatggatcagctcttcctgtgtttgtaatttaatgctgctacaagatgtttctgtttcttagattctgaccatgactcataagcttcttgtcattcttcattgcttgtttgtggtcacagatgcacaacactcctccagtcttgtgggggcagcttttgggaagtctcagcagctcttctggctgtgttgtcagcactgtaacttcgcagaaaagagtcggattaccaaaacactgcctgctcttcagacttaaagcactgataggacttaaaatagtctcattcaaatactgtattttatataggcatttcacaaaaacagcaaaattgtggcattttgtgaggccaaggcttggatgcgtgtgtaatagagccttatggtgtgtgcgcacacacccagagggagagtttgaaaaatgcttattggacacgtaacctggctctaatttgggctgtttttcagatacactgtgataagttcttttacaaatatctatagacatggtaaacttttggttttcagatatgcttaatgatagtcttactaaatgcagaaataagaataaactttctcaaattattaaaaatgcctacacagtaagtgtgaattgctgcaacaggtttgttctcaggagggtaagaactccaggtctaaacagctgacccagtgatggggaatttatccttgaccaatttatccttgaccaataacctaattgtctattcctgagttataaaagtccccatccttattagctctactggaattttcatacacgtaaatgcagaagttactaagtattaagtattactgagtattaagtagtaatctgtcagttattaaaatttgtaaaatctatttatgaaaggtcattaaaccagatcatgttcctttttttgtaatcaaggtgactaagaaaatcagttgtgtaaataaaatcatgtatcataaaatgtg

SEQ ID NO: 327372 - DNA, 691 bp, Homo sapiens
gcttcagtcccgcgaccgaagcagggcgcgcagcagcgctgagtgccccggaacgtgcgtcgcgcccccagtgtccgtcgcgtccgccgcgccccgggcggggatggggcggccagactgagcgccgcacccgccatccagacccgccggccctagccgcagtccctccagccgtggccccagcgcgcacgggcgatggcgaaggcgacgtccggtgccgcggggctgcgtctgctgttgctgctgctgctgccgctgctaggcaaagatgtggccgaggaggcgggctgccccctgtcctgtgcagtcagcaagagacggctggagtgtgaggagtgtggcggcctgggctccccaacaggcaggtgtgagtggaggcaaggagatggcaaagggatcaccaggaacttctccacctgctctcccagcaccaagacctgccccgacggccactgcgatgttgtggagacccaagacatcaacatttgccctcaggactgcctccgggggcagcattgtttggcgcggagcactgatgcccttgggcgaagccccccgagggggactttacacaggctttgggcttattttggcaactccttggctatatcttggcttttccccctttggaacgggaaggcgaccgccacacacgggttggcgcttttccagggacgggaaggtccccccg

SEQ ID NO: 327373 - DNA, 5705 bp, Homo sapiens
gcgccctggtgccaggcgctcagctcggcgctcccctgtgctcgcccggcgcccactcattcgcagcccggccttcgtcgccgccgcctccctgctgctcctcctcctttccccagcccgccgcggccatggcggacagcgccagcgagagcgacacggacggggcggggggcaacagcagcagctcggccgccatgcagtcgtcctgctcgtcgacctcgggcggcggcggtggcggcgggggaggcggcggcggtgggaagtcggggggcattgtcatctcgccgttccgcctggaggagctcaccaaccgcctggcctcgctgcagcaagagaacaaggtgctgaagatagagctggagacctacaaactgaagtgcaaggcactgcaggaggagaaccgcgacctgcgcaaagccagcgttaccatccaagccagggctgagcaggaagaagaattcattagtaacactttattcaagaaaattcaggctttgcagaaggagaaagaaacccttgctgtaaattatgagaaagaagaagaattcctcactaatgagctctccagaaaattgatgcagttgcagcatgagaaagccgaactagaacagcatcttgaacaagagcaggaatttcaggtcaacaaactgatgaagaaaattaaaaaactggagaatgacaccatttctaagcaacttacattagaacagttgagacgggagaagattgaccttgaaaatacattggaacaagaacaagaagcactagttaatcgcctctggaaaaggatggataagcttgaagctgaaaagcgaatcctgcaggaaaaattagaccagcccgtctctgctccaccatcgcctagagatatctccatggagattgattctccagaaaatatgatgcgtcacatcaggtttttaaagaatgaagtggaacggctgaagaagcaactgagagctgctcagttacagcattcagagaaaatggcacagtatctggaggaggaacgtcacatgagagaagagaacttgaggctccagaggaagctgcagagggagatggagagaagagaagccctctgtcgacagctctccgagagtgagtccagcttagaaatggacgacgaaaggtattttaatgagatgtctgcacaaggattaagacctcgcactgtgtccagcccgatcccttacacaccttctccgagttcaagcaggcctatatcacctggtctatcatatgcaagtcacacggttggtttcacgccaccaacttcactgactagagctggaatgtcttattacaattccccgggtcttcacgtgcagcacatgggaacatcccatggtatcacaaggccttcaccacggagaagcaacagtcctgacaaattcaaacggcccacgccgcctccatctcccaacacacagaccccagtccagccacctccacctccacctccgccacccatgcagcccacggtcccctcagcagccacctcgcagcctactccttcgcaacattcggcgcacccctcctcccagccttaatgcatgagcttagtctgaatttcaagttgggactcatccaatggagccgtctactcaacgccaaaggcttccttctctggcatatttggatatgacttatttgcactgaggttatctaggcttcactatccattgtgttgtaaatgtttgtcagaaatgcagccagtgttgtgggtctacaacactaaccagacgactttttccatcagtgttttacttgaatcttcatgtacgtccattccctggctggaaccttcgctgtttggtatttggtatttcagcagcagtgtgcaatttttgcttggcccagagcttcattctcctggcttttaggtttgtaaaagaaaaagggatatcttttttatatttttttccatgaatctgcagaaaattactgagctgttgttaccctcctctcattataatagtgtttaccaaacataccaataattcagcactacaattcagacctttgaaaatctggctttcagtgtagaacagaaagttagatgaatcagtgcccaagacatattttctgtttaacagaactttctacagatacattttttacaggttattttcattgtgttattgacatccatgtctctcgtaaaacagatggcccaaagtaatgaatcatgtggctgtaccttctccacataaatgggatggataattatcgtatattaagatgtgattctcttttttatccttaatgttaatctacttaacctggccccctctaacatgagtcgataaatgttgtcctactcaccggtggtttcaatggctaattagaatgtgttatttgatttctgctgcagaaggcagtgtgattgtaacaaaaacaatgcggcttccccctttcgtacttcatttgtgttctcttaaaatagagtttgaacaaatattttaaaggtgcaaaataccattagaaaatactatttgaaatggacattatcgcattatcttggcataatggccagaaaatattgtattgcttggcagaaaagaaaataaggtctaaaggaaagtagcacattagcattgatggctgttcatttcacccagtataagcaagtgcagtgtacaaagaagtatattctgaatacattatttccattcatttagcacaaataaatcatttggtttcactttgcagtggaacactgagtcactcttttcttaacacgtgcaacatcttaatttttgtttttcagcagttgctgttttgtactttggtagtgaagtgatttttaccacctgtgtttgcatatttatatatgctgtggatgaaaataacttactagagaatgtatattttatgacaagaatgtgtatctgttggatataatcagagaactgaaaagtaatttatcagtaatttttaagagtccatgttttgtgacaaccatctctaatagccaactctttattaaacacactcctaaaaataaggaaccatgacattgtagatatttaatattgtacagtatagaaacctccatttttgccttcgaatgcatatttaagagttaacagaatgaaaaaaaaaagtcttgttggataatagtgtttgactagcgttttaagaacttgagagtaaaagcaacaataagattttttcacctcttcctgcttccacccccaaactgagaacatcactcaattgtttggaagaaactgtaggtctatataaattttatttataatgtatgtgtaatatacataatcataatacagttctcagatgcagggaagaagtttggcatttaatcattgaggctttaggtttttgatgtgatcagactgggccatgtcaaacccggaattttcaccaacagttcactcaccctcctggtacattgccattccaaggaattctgagagtaggcaaacaaattttgccttcatggtacagttctcagtttttcttataggagaaatatggtatatgtttataagaatcttttatgagattatagatttcaatgctgtggatagtgtcttgcacccaaacaagaaagtccataatggaatgatcttccctcagcttcctatcgatttagttacctcttgaaagcacaaaaattaaaacattgccatatgttgaatttttaaaaagcacttggagtgagcgaacatttcctgataaatgccttttagagataggttcttgatattcagacatctgcagaaatgttctggttcccaaagtcatttcacttcgaaataaaacacagctccttcaaacagcactttttccacataaatctagttgcctctccctgtggacattcagaactgatagaacaaacactactcttttgaatttgatggttcgtgtcctttaaagtgtttgaggacctatgcagagcctgtaacacttgggtagtacctgctaggacaatttcttggcaattgtcttactactagggatcagtaagatttagattctgagcccataatggcaacagccccctcacctatgggaagctgacttccctcagtcgggcacttctcatgggggctgaacatggttcctgccattctgttacccactctcccaggtgagccctggattggctcccagaaggcctttgtaaaatcagtagccatcctgcaggcaggtgggagcaacaggggcttcagtagcttcattttcctgtcttgcagacagagacccttggctaccactgtgctgctaataggataagtactctgttgccagattaccatgccttttatacaaaaccaaattaacttacctaatacctgacacctctttgggctctgaactgctttctctcatcaagcatgctagcactctagacagaattctagaaatttggcagacagtggaagcctttaattgaacttactccttcgttgactgaaaggagttttaaattctgagctcctgagatactgactagcaaccatggaatgaatgtgtgaccagaaagtggctttgacaccaagtgctactgtccctttgtaattggcttctaacagattcaaccagaaataattgataatgtgaatttttgttaattgttcacttgtaggaaaatagaacatgtatcaccctttgttaggtagacatgaacttttcctgcacaaagccttgcttttagagaatgcccaataaggcaagaaaaagcatagtaacttgtgctttgagagctcaatatttgtatcttatcagtacagaagaaatatttctgtgtaacttgatcttctgtctagtacttgtcttataggtaaccaacactgaaaactttgtagtgatgactaccaaagaaatacatagtaaaacaaccttttatttccaaattgttaaagagccagccattgatgctgctacatgagttccatgctcaagagccattgtaagagattaaggggtttctaggtttttggtgattttttgtttgtttttttctttgttttttagggtttttttttcttctttaattttttgattaaaacatacacacagctgttagcataaagtcgtggggggcattttctggaatgctcagcagttctgattaactgccaagcccaggttgcctctcatgaggcaactgaaaaaatcctgtgtcttgatagcatgggtgctgtgtgtgtgcatgtgtgtgtctgcattcatgccttaactcgggttactgcacaactttagttcttgacttagtctgcaccgtcatctagattgtattgtacatctcggtctgaacttcatcctggcaaaaacaaagttgcaggcacaacagtttaagaatgcattcctccagaagagtatctggtcaggttgaccctgagccttctttggacttgatttggaacttagcctggaaagcgaaagtggactgtccaacagaaagatgtcaacaaggaaaagaggagagccaagcgctagcatgccttttgcctctgcatatctgtgcacactgtatgttgttcatgatagcttgtctacaacttgactaggttggagttctggtaatagtggcaatcttgacattcttggtcagagtttagagagatgtaagactttcaattaatgtcttatttactcctttatgttgattagtctttgatacatgtgctgaatcagaaacctaaataaagataattttttaaaatgta

SEQ ID NO: 327374 - DNA, 4716 bp, Homo sapiens
ttgagctgtatctttcaggatgtggacaacttattggagataagcaatagagggaattggtgacacacacggaaagaaagatttaaggggatattttacagctctcgttgaaggacccaagtccagcagtttgttctacacaagttgtgcagtaattttatgtagctttttcataggtggaagtgtaaacactgccttatttaaattttattactagttcagaaaccagtagggatgaagaaagaaatccctggtttcttgtctttgttggttagtgtttgattagccccagtgccaagtcaggctgtgttaggtagaatgagatccacctgtacctagactgacttgctgttcctgtcccctctgcagaggccttcaccacggagaagcaacagtcctgacaaattcaaacggcccacgccgcctccatctcccaacacacagaccccagtccagccacctccacctccacctccgccacccatgcagcccacggtcccctcagcagccacctcgcagcctactccttcgcaacattcggcgcacccctcctcccagccttaatgcatgagcttagtctgaatttcaagttgggactcatccaatggagccgtctactcaacgccaaaggcttccttctctggcatatttggatatgacttatttgcactgaggttatctaggcttcactatccattgtgttgtaaatgtttgtcagaaatgcagccagtgttgtgggtctacaacactaaccagacgactttttccatcagtgttttacttgaatcttcatgtacgtccattccctggctggaaccttcgctgtttggtatttggtatttcagcagcagtgtgcaatttttgcttggcccagagcttcattctcctggcttttaggtttgtaaaagaaaaagggatatcttttttatatttttttccatgaatctgcagaaaattactgagctgttgttaccctcctctcattataatagtgtttaccaaacataccaataattcagcactacaattcagacctttgaaaatctggctttcagtgtagaacagaaagttagatgaatcagtgcccaagacatattttctgtttaacagaactttctacagatacattttttacaggttattttcattgtgttattgacatccatgtctctcgtaaaacagatggcccaaagtaatgaatcatgtggctgtaccttctccacataaatgggatggataattatcgtatattaagatgtgattctcttttttatccttaatgttaatctacttaacctggccccctctaacatgagtcgataaatgttgtcctactcaccggtggtttcaatggctaattagaatgtgttatttgatttctgctgcagaaggcagtgtgattgtaacaaaaacaatgcggcttccccctttcgtacttcatttgtgttctcttaaaatagagtttgaacaaatattttaaaggtgcaaaataccattagaaaatactatttgaaatggacattatcgcattatcttggcataatggccagaaaatattgtattgcttggcagaaaagaaaataaggtctaaaggaaagtagcacattagcattgatggctgttcatttcacccagtataagcaagtgcagtgtacaaagaagtatattctgaatacattatttccattcatttagcacaaataaatcatttggtttcactttgcagtggaacactgagtcactcttttcttaacacgtgcaacatcttaatttttgtttttcagcagttgctgttttgtactttggtagtgaagtgatttttaccacctgtgtttgcatatttatatatgctgtggatgaaaataacttactagagaatgtatattttatgacaagaatgtgtatctgttggatataatcagagaactgaaaagtaatttatcagtaatttttaagagtccatgttttgtgacaaccatctctaatagccaactctttattaaacacactcctaaaaataaggaaccatgacattgtagatatttaatattgtacagtatagaaacctccatttttgccttcgaatgcatatttaagagttaacagaatgaaaaaaaaaagtcttgttggataatagtgtttgactagcgttttaagaacttgagagtaaaagcaacaataagattttttcacctcttcctgcttccacccccaaactgagaacatcactcaattgtttggaagaaactgtaggtctatataaattttatttataatgtatgtgtaatatacataatcataatacagttctcagatgcagggaagaagtttggcatttaatcattgaggctttaggtttttgatgtgatcagactgggccatgtcaaacccggaattttcaccaacagttcactcaccctcctggtacattgccattccaaggaattctgagagtaggcaaacaaattttgccttcatggtacagttctcagtttttcttataggagaaatatggtatatgtttataagaatcttttatgagattatagatttcaatgctgtggatagtgtcttgcacccaaacaagaaagtccataatggaatgatcttccctcagcttcctatcgatttagttacctcttgaaagcacaaaaattaaaacattgccatatgttgaatttttaaaaagcacttggagtgagcgaacatttcctgataaatgccttttagagataggttcttgatattcagacatctgcagaaatgttctggttcccaaagtcatttcacttcgaaataaaacacagctccttcaaacagcactttttccacataaatctagttgcctctccctgtggacattcagaactgatagaacaaacactactcttttgaatttgatggttcgtgtcctttaaagtgtttgaggacctatgcagagcctgtaacacttgggtagtacctgctaggacaatttcttggcaattgtcttactactagggatcagtaagatttagattctgagcccataatggcaacagccccctcacctatgggaagctgacttccctcagtcgggcacttctcatgggggctgaacatggttcctgccattctgttacccactctcccaggtgagccctggattggctcccagaaggcctttgtaaaatcagtagccatcctgcaggcaggtgggagcaacaggggcttcagtagcttcattttcctgtcttgcagacagagacccttggctaccactgtgctgctaataggataagtactctgttgccagattaccatgccttttatacaaaaccaaattaacttacctaatacctgacacctctttgggctctgaactgctttctctcatcaagcatgctagcactctagacagaattctagaaatttggcagacagtggaagcctttaattgaacttactccttcgttgactgaaaggagttttaaattctgagctcctgagatactgactagcaaccatggaatgaatgtgtgaccagaaagtggctttgacaccaagtgctactgtccctttgtaattggcttctaacagattcaaccagaaataattgataatgtgaatttttgttaattgttcacttgtaggaaaatagaacatgtatcaccctttgttaggtagacatgaacttttcctgcacaaagccttgcttttagagaatgcccaataaggcaagaaaaagcatagtaacttgtgctttgagagctcaatatttgtatcttatcagtacagaagaaatatttctgtgtaacttgatcttctgtctagtacttgtcttataggtaaccaacactgaaaactttgtagtgatgactaccaaagaaatacatagtaaaacaaccttttatttccaaattgttaaagagccagccattgatgctgctacatgagttccatgctcaagagccattgtaagagattaaggggtttctaggtttttggtgattttttgtttgtttttttctttgttttttagggtttttttttcttctttaattttttgattaaaacatacacacagctgttagcataaagtcgtggggggcattttctggaatgctcagcagttctgattaactgccaagcccaggttgcctctcatgaggcaactgaaaaaatcctgtgtcttgatagcatgggtgctgtgtgtgtgcatgtgtgtgtctgcattcatgccttaactcgggttactgcacaactttagttcttgacttagtctgcaccgtcatctagattgtattgtacatctcggtctgaacttcatcctggcaaaaacaaagttgcaggcacaacagtttaagaatgcattcctccagaagagtatctggtcaggttgaccctgagccttctttggacttgatttggaacttagcctggaaagcgaaagtggactgtccaacagaaagatgtcaacaaggaaaagaggagagccaagcgctagcatgccttttgcctctgcatatctgtgcacactgtatgttgttcatgatagcttgtctacaacttgactaggttggagttctggtaatagtggcaatcttgacattcttggtcagagtttagagagatgtaagactttcaattaatgtcttatttactcctttatgttgattagtctttgatacatgtgctgaatcagaaacctaaataaagataattttttaaaatgta

SEQ ID NO: 327375 - DNA, 6954 bp, Homo sapiens
gcttcagtcccgcgaccgaagcagggcgcgcagcagcgctgagtgccccggaacgtgcgtcgcgcccccagtgtccgtcgcgtccgccgcgccccgggcggggatggggcggccagactgagcgccgcacccgccatccagacccgccggccctagccgcagtccctccagccgtggccccagcgcgcacgggcgatggcgaaggcgacgtccggtgccgcggggctgcgtctgctgttgctgctgctgctgccgctgctaggcaaagtggcattgggcctctacttctcgagggatgcttactgggagaagctgtatgtggaccaggcggccggcacgcccttgctgtacgtccatgccctgcgggacgcccctgaggaggtgcccagcttccgcctgggccagcatctctacggcacgtaccgcacacggctgcatgagaacaactggatctgcatccaggaggacaccggcctcctctaccttaaccggagcctggaccatagctcctgggagaagctcagtgtccgcaaccgcggctttcccctgctcaccgtctacctcaaggtcttcctgtcacccacatcccttcgtgagggcgagtgccagtggccaggctgtgcccgcgtatacttctccttcttcaacacctcctttccagcctgcagctccctcaagccccgggagctctgcttcccagagacaaggccctccttccgcattcgggagaaccgacccccaggcaccttccaccagttccgcctgctgcctgtgcagttcttgtgccccaacatcagcgtggcctacaggctcctggagggtgagggtctgcccttccgctgcgccccggacagcctggaggtgagcacgcgctgggccctggaccgcgagcagcgggagaagtacgagctggtggccgtgtgcaccgtgcacgccggcgcgcgcgaggaggtggtgatggtgcccttcccggtgaccgtgtacgacgaggacgactcggcgcccaccttccccgcgggcgtcgacaccgccagcgccgtggtggagttcaagcggaaggaggacaccgtggtggccacgctgcgtgtcttcgatgcagacgtggtacctgcatcaggggagctggtgaggcggtacacaagcacgctgctccccggggacacctgggcccagcagaccttccgggtggaacactggcccaacgagacctcggtccaggccaacggcagcttcgtgcgggcgaccgtacatgactataggctggttctcaaccggaacctctccatctcggagaaccgcaccatgcagctggcggtgctggtcaatgactcagacttccagggcccaggagcgggcgtcctcttgctccacttcaacgtgtcggtgctgccggtcagcctgcacctgcccagtacctactccctctccgtgagcaggagggctcgccgatttgcccagatcgggaaagtctgtgtggaaaactgccaggcgttcagtggcatcaacgtccagtacaagctgcattcctctggtgccaactgcagcacgctaggggtggtcacctcagccgaggacacctcggggatcctgtttgtgaatgacaccaaggccctgcggcggcccaagtgtgccgaacttcactacatggtggtggccaccgaccagcagacctctaggcaggcccaggcccagctgcttgtaacagtggaggggtcatatgtggccgaggaggcgggctgccccctgtcctgtgcagtcagcaagagacggctggagtgtgaggagtgtggcggcctgggctccccaacaggcaggtgtgagtggaggcaaggagatggcaaagggatcaccaggaacttctccacctgctctcccagcaccaagacctgccccgacggccactgcgatgttgtggagacccaagacatcaacatttgccctcaggactgcctccggggcagcattgttgggggacacgagcctggggagccccgggggattaaagctggctatggcacctgcaactgcttccctgaggaggagaagtgcttctgcgagcccgaagacatccaggatccactgtgcgacgagctgtgccgcacggtgatcgcagccgctgtcctcttctccttcatcgtctcggtgctgctgtctgccttctgcatccactgctaccacaagtttgcccacaagccacccatctcctcagctgagatgaccttccggaggcccgcccaggccttcccggtcagctactcctcttccggtgcccgccggccctcgctggactccatggagaaccaggtctccgtggatgccttcaagatcctggaggatccaaagtgggaattccctcggaagaacttggttcttggaaaaactctaggagaaggcgaatttggaaaagtggtcaaggcaacggccttccatctgaaaggcagagcagggtacaccacggtggccgtgaagatgctgaaagagaacgcctccccgagtgagcttcgagacctgctgtcagagttcaacgtcctgaagcaggtcaaccacccacatgtcatcaaattgtatggggcctgcagccaggatggcccgctcctcctcatcgtggagtacgccaaatacggctccctgcggggcttcctccgcgagagccgcaaagtggggcctggctacctgggcagtggaggcagccgcaactccagctccctggaccacccggatgagcgggccctcaccatgggcgacctcatctcatttgcctggcagatctcacaggggatgcagtatctggccgagatgaagctcgttcatcgggacttggcagccagaaacatcctggtagctgaggggcggaagatgaagatttcggatttcggcttgtcccgagatgtttatgaagaggattcctacgtgaagaggagccagggtcggattccagttaaatggatggcaattgaatccctttttgatcatatctacaccacgcaaagtgatgtatggtcttttggtgtcctgctgtgggagatcgtgaccctagggggaaacccctatcctgggattcctcctgagcggctcttcaaccttctgaagaccggccaccggatggagaggccagacaactgcagcgaggagatgtaccgcctgatgctgcaatgctggaagcaggagccggacaaaaggccggtgtttgcggacatcagcaaagacctggagaagatgatggttaagaggagagactacttggaccttgcggcgtccactccatctgactccctgatttatgacgacggcctctcagaggaggagacaccgctggtggactgtaataatgcccccctccctcgagccctcccttccacatggattgaaaacaaactctatggtagaatttcccatgcatttactagattctagcaccgctgtcccctctgcactatccttcctctctgtgatgctttttaaaaatgtttctggtctgaacaaaaccaaagtctgctctgaacctttttatttgtaaatgtctgactttgcatccagtttacatttaggcattattgcaactatgtttttctaaaaggaagtgaaaataagtgtaattaccacattgcccagcaacttaggatggtagaggaaaaaacagatcagggcggaactctcaggggagaccaagaacaggttgaataaggcgcttctggggtgggaatcaagtcatagtacttctactttaactaagtggataaatatacaaatctggggaggtattcagttgagaaaggagccaccagcaccactcagcctgcactgggagcacagccaggttcccccagacccctcctgggcaggcaggtgcctctcagaggccacccggcactggcgagcagccactggccaagcctcagccccagtcccagccacatgtcctccatcaggggtagcgaggttgcaggagctggctggccctgggaggacgcacccccactgctgttttcacatcctttcccttacccaccttcaggacggttgtcacttatgaagtcagtgctaaagctggagcagttgctttttgaaagaacatggtctgtggtgctgtggtcttacaatggacagtaaatatggttcttgccaaaactccttcttttgtctttgattaaatactagaaattttttctgtttcctaacttcatcattgattgtttgaaatcttggagtttaagcatttttttcaagctgagacggttccttttgcatgcctcctgactcactgactcctcactggctttgtgtctagtgccacactccatttgtgctgacgatgctatgaggctggcccgtgtgcaccctcgatttggaaggtcctcttctccgttgtaggctcagacaacagacgagtgcctcctttacgttagagaatgttttatagaacgtttccgctgcagtaagccattgagtgcagcagtgtgctgttgccctacactgccttagaaaaagagttaagcagttcgacaaatatacatcagattagagagtctcaagttcataaaagtcaaaattggtagtgtctgttaagttacatttaccaagagagcacatgatatttcccctaactataacagtgtttttggaaacctggaacacaaaaccattaatataattggcacagaaaccacgagtttggtttgaacatcaaagggagttttgccaaggccttactgtctgcacttgaagttttggttcttcagtgcagaacaaatgatctgttttcatttttaggcatgtcagacccgaactggcctggagagagtcctgtaccactcacgagagctgatggcactaacactgggtttccaagatatccaaatgatagtgtatatgctaactggatgctttcaccctcagcggcaaaattaatggacacgtttgatagttaacatttctttgtgaaaggtaatggactcacaaggggaagaaacatgctgagaatggaaagtctaccggccctttctttgtgaacgtcacattggccgagccgtgttcagttcccaggtggcagactcgtttttggtagtttgttttaacttccaaggtggttttacttctgatagccggtgattttccctcctagcagacatgccacaccgggtaagagctctgagtcttagtggttaagcattcctttctcttcagtgcccagcagcacccagtgttggtctgtgtccatcagtgaccaccaacattctgtgttcacatgtgtgggtccaacacttactacctggtgtatgaaattggacctgaactgttggatttttctagttgccgccaaacaaggcaaaaaaatttaaacatgaagcacacacacaaaaaaggcagtaggaaaaatgctggccctgatgacctgtccttattcagaatgagagactgcggggggggcctgggctcagcattcgagatcttgagaatgatttttttttaatcatgcaacctttccttaggaagacatttggttttcatcatgattaagatgattcctagatttagcacaatggagagattccatgccatctttactatgtggatggtggtatcagggaagagggctcacaagacacatttgtcccccgggcccaccacatcatcctcacgtgttcggtactgagcagccactacccctgatgagaacagtatgaagaaagggggctgttggagtcccagaattgctgacagcagaggctttgctgctgtgaatcccacctgccaccagcctgcagcacaccccacagccaagtagaggcgaaagcagtggctcatcctacctgttaggagcaggtagggcttgtactcactttaatttgaatcttatcaacttactcataaagggacaggctagctagctgtgttagaagtagcaatgacaatgaccaaggactgctacacctctgattacaattctgatgtgaaaaagatggtgtttggctcttatagagcctgtgtgaaaggcccatggatcagctcttcctgtgtttgtaatttaatgctgctacaagatgtttctgtttcttagattctgaccatgactcataagcttcttgtcattcttcattgcttgtttgtggtcacagatgcacaacactcctccagtcttgtgggggcagcttttgggaagtctcagcagctcttctggctgtgttgtcagcactgtaacttcgcagaaaagagtcggattaccaaaacactgcctgctcttcagacttaaagcactgataggacttaaaatagtctcattcaaatactgtattttatataggcatttcacaaaaacagcaaaattgtggcattttgtgaggccaaggcttggatgcgtgtgtaatagagccttatggtgtgtgcgcacacacccagagggagagtttgaaaaatgcttattggacacgtaacctggctctaatttgggctgtttttcagatacactgtgataagttcttttacaaatatctatagacatggtaaacttttggttttcagatatgcttaatgatagtcttactaaatgcagaaataagaataaactttctcaaattattaaaaatgcctacacagtaagtgtgaattgctgcaacaggtttgttctcaggagggtaagaactccaggtctaaacagctgacccagtgatggggaatttatccttgaccaatttatccttgaccaataacctaattgtctattcctgagttataaaagtccccatccttattagctctactggaattttcatacacgtaaatgcagaagttactaagtattaagtattactgagtattaagtagtaatctgtcagttattaaaatttgtaaaatctatttatgaaaggtcattaaaccagatcatgttcctttttttgtaatcaaggtgactaagaaaatcagttgtgtaaataaaatcatgtatcataaaatgtg

SEQ ID NO: 327376 - DNA, 5362 bp, Homo sapiens
cagatccagttgttctcatgcagccgtgtgcggtacgtgccgtagagatgctggcccaggcggaagctgggcacctccttactgtacttccataccctatggaagtacagtaaggaggtgcccagcttccgcctgggccagcatctctacggcacgtaccgcacacggctgcatgagaacaactggatctgcatccaggaggacaccggcctcctctaccttaaccggagcctggaccatagctcctgggagaagctcagtgtccgcaaccgcggctttcccctgctcaccgtctacctcaaggtcttcctgtcacccacatcccttcgtgagggcgagtgccagtggccaggctgtgcccgcgtatacttctccttcttcaacacctcctttccagcctgcagctccctcaagccccgggagctctgcttcccagagacaaggccctccttccgcattcgggagaaccgacccccaggcaccttccaccagttccgcctgctgcctgtgcagttcttgtgccccaacatcagcgtggcctacaggctcctggagggtgagggtctgcccttccgctgcgccccggacagcctggaggtgagcacgcgctgggccctggaccgcgagcagcgggagaagtacgagctggtggccgtgtgcaccgtgcacgccggcgcgcgcgaggaggtggtgatggtgcccttcccggtgaccgtgtacgacgaggacgactcggcgcccaccttccccgcgggcgtcgacaccgccagcgccgtggtggagttcaagcggaaggaggacaccgtggtggccacgctgcgtgtcttcgatgcagacgtggtacctgcatcaggggagctggtgaggcggtacacaagcacgctgctccccggggacacctgggcccagcagaccttccgggtggaacactggcccaacgagacctcggtccaggccaacggcagcttcgtgcgggcgaccgtacatgactataggctggttctcaaccggaacctctccatctcggagaaccgcaccatgcagctggcggtgctggtcaatgactcagacttccagggcccaggagcgggcgtcctcttgctccacttcaacgtgtcggtgctgccggtcagcctgcacctgcccagtacctactccctctccgtgagcaggagggctcgccgatttgcccagatcgggaaagtctgtgtggaaaactgccaggcgttcagtggcatcaacgtccagtacaagctgcattcctctggtgccaactgcagcacgctaggggtggtcacctcagccgaggacacctcggggatcctgtttgtgaatgacaccaaggccctgcggcggcccaagtgtgccgaacttcactacatggtggtggccaccgaccagcagacctctaggcaggcccaggcccagctgcttgtaacagtggaggggtcatatgtggccgaggaggcgggctgccccctgtcctgtgcagtcagcaagagacggctggagtgtgaggagtgtggcggcctgggctccccaacaggcaggtgtgagtggaggcaaggagatggcaaagggatcaccaggaacttctccacctgctctcccagcaccaagacctgccccgacggccactgcgatgttgtggagacccaagacatcaacatttgccctcaggactgcctccggggcagcattgttgggggacacgagcctggggagccccgggggattaaagctggctatggcacctgcaactgcttccctgaggaggagaagtgcttctgcgagcccgaagacatccaggatccactgtgcgacgagctgtgccgcacggtgatcgcagccgctgtcctcttctccttcatcgtctcggtgctgctgtctgccttctgcatccactgctaccacaagtttgcccacaagccacccatctcctcagctgagatgaccttccggaggcccgcccaggccttcccggtcagctactcctcttccggtgcccgccggccctcgctggactccatggagaaccaggtctccgtggatgccttcaagatcctggaggatccaaagtgggaattccctcggaagaacttggttcttggaaaaactctaggagaaggcgaatttggaaaagtggtcaaggcaacggccttccatctgaaaggcagagcagggtacaccacggtggccgtgaagatgctgaaagagaacgcctccccgagtgagcttcgagacctgctgtcagagttcaacgtcctgaagcaggtcaaccacccacatgtcatcaaattgtatggggcctgcagccaggatggcccgctcctcctcatcgtggagtacgccaaatacggctccctgcggggcttcctccgcgagagccgcaaagtggggcctggctacctgggcagtggaggcagccgcaactccagctccctggaccacccggatgagcgggccctcaccatgggcgacctcatctcatttgcctggcagatctcacaggggatgcagtatctggccgagatgaagctcgttcatcgggacttggcagccagaaacatcctggtagctgaggggcggaagatgaagatttcggatttcggcttgtcccgagatgtttatgaagaggattcctacgtgaagaggagccagggtcggattccagttaaatggatggcaattgaatccctttttgatcatatctacaccacgcaaagtgatgtatggtcttttggtgtcctgctgtgggagatcgtgaccctagggggaaacccctatcctgggattcctcctgagcggctcttcaaccttctgaagaccggccaccggatggagaggccagacaactgcagcgaggagatgtaccgcctgatgctgcaatgctggaagcaggagccggacaaaaggccggtgtttgcggacatcagcaaagacctggagaagatgatggttaagaggagagactacttggaccttgcggcgtccactccatctgactccctgatttatgacgacggcctctcagaggaggagacaccgctggtggactgtaataatgcccccctccctcgagccctcccttccacatggattgaaaacaaactctatggcatgtcagacccgaactggcctggagagagtcctgtaccactcacgagagctgatggcactaacactgggtttccaagatatccaaatgatagtgtatatgctaactggatgctttcaccctcagcggcaaaattaatggacacgtttgatagttaacatttctttgtgaaaggtaatggactcacaaggggaagaaacatgctgagaatggaaagtctaccggccctttctttgtgaacgtcacattggccgagccgtgttcagttcccaggtggcagactcgtttttggtagtttgttttaacttccaaggtggttttacttctgatagccggtgattttccctcctagcagacatgccacaccgggtaagagctctgagtcttagtggttaagcattcctttctcttcagtgcccagcagcacccagtgttggtctgtgtccatcagtgaccaccaacattctgtgttcacatgtgtgggtccaacacttactacctggtgtatgaaattggacctgaactgttggatttttctagttgccgccaaacaaggcaaaaaaatttaaacatgaagcacacacacaaaaaaggcagtaggaaaaatgctggccctgatgacctgtccttattcagaatgagagactgcggggggggcctgggggtagtgtcaatgcccctccagggctggaggggaagaggggccccgaggatgggcctgggctcagcattcgagatcttgagaatgatttttttttaatcatgcaacctttccttaggaagacatttggttttcatcatgattaagatgattcctagatttagcacaatggagagattccatgccatctttactatgtggatggtggtatcagggaagagggctcacaagacacatttgtcccccgggcccaccacatcatcctcacgtgttcggtactgagcagccactacccctgatgagaacagtatgaagaaagggggctgttggagtcccagaattgctgacagcagaggctttgctgctgtgaatcccacctgccaccagcctgcagcacaccccacagccaagtagaggcgaaagcagtggctcatcctacctgttaggagcaggtagggcttgtactcactttaatttgaatcttatcaacttactcataaagggacaggctagctagctgtgttagaagtagcaatgacaatgaccaaggactgctacacctctgattacaattctgatgtgaaaaagatggtgtttggctcttatagagcctgtgtgaaaggcccatggatcagctcttcctgtgtttgtaatttaatgctgctacaagatgtttctgtttcttagattctgaccatgactcataagcttcttgtcattcttcattgcttgtttgtggtcacagatgcacaacactcctccagtcttgtgggggcagcttttgggaagtctcagcagctcttctggctgtgttgtcagcactgtaacttcgcagaaaagagtcggattaccaaaacactgcctgctcttcagacttaaagcactgataggacttaaaatagtctcattcaaatactgtattttatataggcatttcacaaaaacagcaaaattgtggcattttgtgaggccaaggcttggatgcgtgtgtaatagagccttatggtgtgtgcgcacacacccagagggagagtttgaaaaatgcttattggacacgtaacctggctctaatttgggctgtttttcagatacactgtgataagttcttttacaaatatctatagacatggtaaacttttggttttcagatatgcttaatgatagtcttactaaatgcagaaataagaataaactttctcaaattattaaaaatgcctacacagtaagtgtgaattgctgcaacaggtttgttctcaggagggtaagaactccaggtctaaacagctgacccagtgatggggaatttatccttgaccaatttatccttgaccaataacctaattgtctattcctgagttataaaagtccccatccttattagctctactggaattttcatacacgtaaatgcagaagttactaagtattaagtattactgagtattaagtagtaatctgtcagttattaaaatttgtaaaatctatttatgaaaggtcattaaaccagatcatgttcctttttttgtaatcaaggtgactaagaaaatcagttgtgtaaataaaatcatgtatcataaaatgtg

SEQ ID NO: 327377 - DNA, 5680 bp, Homo sapiens
gcttcagtcccgcgaccgaagcagggcgcgcagcagcgctgagtgccccggaacgtgcgtcgcgcccccagtgtccgtcgcgtccgccgcgccccgggcggggatggggcggccagactgagcgccgcacccgccatccagacccgccggccctagccgcagtccctccagccgtggccccagcgcgcacgggcgatggcgaaggcgacgtccggtgccgcggggctgcgtctgctgttgctgctgctgctgccgctgctaggcaaagtggcattgggcctctacttctcgagggatgcttactgggagaagctgtatgtggaccaggcggccggcacgcccttgctgtacgtccatgccctgcgggacgcccctgaggaggtgcccagcttccgcctgggccagcatctctacggcacgtaccgcacacggctgcatgagaacaactggatctgcatccaggaggacaccggcctcctctaccttaaccggagcctggaccatagctcctgggagaagctcagtgtccgcaaccgcggctttcccctgctcaccgtctacctcaaggtcttcctgtcacccacatcccttcgtgagggcgagtgccagtggccaggctgtgcccgcgtatacttctccttcttcaacacctcctttccagcctgcagctccctcaagccccgggagctctgcttcccagagacaaggccctccttccgcattcgggagaaccgacccccaggcaccttccaccagttccgcctgctgcctgtgcagttcttgtgccccaacatcagcgtggcctacaggctcctggagggtgagggtctgcccttccgctgcgccccggacagcctggaggtgagcacgcgctgggccctggaccgcgagcagcgggagaagtacgagctggtggccgtgtgcaccgtgcacgccggcgcgcgcgaggaggtggtgatggtgcccttcccggtgaccgtgtacgacgaggacgactcggcgcccaccttccccgcgggcgtcgacaccgccagcgccgtggtggagttcaagcggaaggaggacaccgtggtggccacgctgcgtgtcttcgatgcagacgtggtacctgcatcaggggagctggtgaggcggtacacaagcacgctgctccccggggacacctgggcccagcagaccttccgggtggaacactggcccaacgagacctcggtccaggccaacggcagcttcgtgcgggcgaccgtacatgactataggctggttctcaaccggaacctctccatctcggagaaccgcaccatgcagctggcggtgctggtcaatgactcagacttccagggcccaggagcgggcgtcctcttgctccacttcaacgtgtcggtgctgccggtcagcctgcacctgcccagtacctactccctctccgtgagcaggagggctcgccgatttgcccagatcgggaaagtctgtgtggaaaactgcctggcagatctcacaggggatgcagtatctggccgagatgaagctcgttcatcgggacttggcagccagaaacatcctggtagctgaggggcggaagatgaagatttcggatttcggcttgtcccgagatgtttatgaagaggattcctacgtgaagaggagccagggtcggattccagttaaatggatggcaattgaatccctttttgatcatatctacaccacgcaaagtgatgtatggtcttttggtgtcctgctgtgggagatcgtgaccctagggggaaacccctatcctgggattcctcctgagcggctcttcaaccttctgaagaccggccaccggatggagaggccagacaactgcagcgaggagatgtaccgcctgatgctgcaatgctggaagcaggagccggacaaaaggccggtgtttgcggacatcagcaaagacctggagaagatgatggttaagaggagagactacttggaccttgcggcgtccactccatctgactccctgatttatgacgacggcctctcagaggaggagacaccgctggtggactgtaataatgcccccctccctcgagccctcccttccacatggattgaaaacaaactctatggtagaatttcccatgcatttactagattctagcaccgctgtcccctctgcactatccttcctctctgtgatgctttttaaaaatgtttctggtctgaacaaaaccaaagtctgctctgaacctttttatttgtaaatgtctgactttgcatccagtttacatttaggcattattgcaactatgtttttctaaaaggaagtgaaaataagtgtaattaccacattgcccagcaacttaggatggtagaggaaaaaacagatcagggcggaactctcaggggagaccaagaacaggttgaataaggcgcttctggggtgggaatcaagtcatagtacttctactttaactaagtggataaatatacaaatctggggaggtattcagttgagaaaggagccaccagcaccactcagcctgcactgggagcacagccaggttcccccagacccctcctgggcaggcaggtgcctctcagaggccacccggcactggcgagcagccactggccaagcctcagccccagtcccagccacatgtcctccatcaggggtagcgaggttgcaggagctggctggccctgggaggacgcacccccactgctgttttcacatcctttcccttacccaccttcaggacggttgtcacttatgaagtcagtgctaaagctggagcagttgctttttgaaagaacatggtctgtggtgctgtggtcttacaatggacagtaaatatggttcttgccaaaactccttcttttgtctttgattaaatactagaaattttttctgtttcctaacttcatcattgattgtttgaaatcttggagtttaagcatttttttcaagctgagacggttccttttgcatgcctcctgactcactgactcctcactggctttgtgtctagtgccacactccatttgtgctgacgatgctatgaggctggcccgtgtgcaccctcgatttggaaggtcctcttctccgttgtaggctcagacaacagacgagtgcctcctttacgttagagaatgttttatagaacgtttccgctgcagtaagccattgagtgcagcagtgtgctgttgccctacactgccttagaaaaagagttaagcagttcgacaaatatacatcagattagagagtctcaagttcataaaagtcaaaattggtagtgtctgttaagttacatttaccaagagagcacatgatatttcccctaactataacagtgtttttggaaacctggaacacaaaaccattaatataattggcacagaaaccacgagtttggtttgaacatcaaagggagttttgccaaggccttactgtctgcacttgaagttttggttcttcagtgcagaacaaatgatctgttttcatttttaggcatgtcagacccgaactggcctggagagagtcctgtaccactcacgagagctgatggcactaacactgggtttccaagatatccaaatgatagtgtatatgctaactggatgctttcaccctcagcggcaaaattaatggacacgtttgatagttaacatttctttgtgaaaggtaatggactcacaaggggaagaaacatgctgagaatggaaagtctaccggccctttctttgtgaacgtcacattggccgagccgtgttcagttcccaggtggcagactcgtttttggtagtttgttttaacttccaaggtggttttacttctgatagccggtgattttccctcctagcagacatgccacaccgggtaagagctctgagtcttagtggttaagcattcctttctcttcagtgcccagcagcacccagtgttggtctgtgtccatcagtgaccaccaacattctgtgttcacatgtgtgggtccaacacttactacctggtgtatgaaattggacctgaactgttggatttttctagttgccgccaaacaaggcaaaaaaatttaaacatgaagcacacacacaaaaaaggcagtaggaaaaatgctggccctgatgacctgtccttattcagaatgagagactgcggggggggcctgggctcagcattcgagatcttgagaatgatttttttttaatcatgcaacctttccttaggaagacatttggttttcatcatgattaagatgattcctagatttagcacaatggagagattccatgccatctttactatgtggatggtggtatcagggaagagggctcacaagacacatttgtcccccgggcccaccacatcatcctcacgtgttcggtactgagcagccactacccctgatgagaacagtatgaagaaagggggctgttggagtcccagaattgctgacagcagaggctttgctgctgtgaatcccacctgccaccagcctgcagcacaccccacagccaagtagaggcgaaagcagtggctcatcctacctgttaggagcaggtagggcttgtactcactttaatttgaatcttatcaacttactcataaagggacaggctagctagctgtgttagaagtagcaatgacaatgaccaaggactgctacacctctgattacaattctgatgtgaaaaagatggtgtttggctcttatagagcctgtgtgaaaggcccatggatcagctcttcctgtgtttgtaatttaatgctgctacaagatgtttctgtttcttagattctgaccatgactcataagcttcttgtcattcttcattgcttgtttgtggtcacagatgcacaacactcctccagtcttgtgggggcagcttttgggaagtctcagcagctcttctggctgtgttgtcagcactgtaacttcgcagaaaagagtcggattaccaaaacactgcctgctcttcagacttaaagcactgataggacttaaaatagtctcattcaaatactgtattttatataggcatttcacaaaaacagcaaaattgtggcattttgtgaggccaaggcttggatgcgtgtgtaatagagccttatggtgtgtgcgcacacacccagagggagagtttgaaaaatgcttattggacacgtaacctggctctaatttgggctgtttttcagatacactgtgataagttcttttacaaatatctatagacatggtaaacttttggttttcagatatgcttaatgatagtcttactaaatgcagaaataagaataaactttctcaaattattaaaaatgcctacacagtaagtgtgaattgctgcaacaggtttgttctcaggagggtaagaactccaggtctaaacagctgacccagtgatggggaatttatccttgaccaatttatccttgaccaataacctaattgtctattcctgagttataaaagtccccatccttattagctctactggaattttcatacacgtaaatgcagaagttactaagtattaagtattactgagtattaagtagtaatctgtcagttattaaaatttgtaaaatctatttatgaaaggtcattaaaccagatcatgttcctttttttgtaatcaaggtgactaagaaaatcagttgtgtaaataaaatcatgtatcataaaatgtg

SEQ ID NO: 327378 - DNA, 4861 bp, Homo sapiens
tctcacctccggacgtgagaattacaggcttggatctcaaaccgccgcggtttgccaataggattatcctgctgccatcatgtcttggtttgttgatcttgctggaaaggcagaagatcttttaaaccgagttgatcaaggggctgcaacagctctcagtaggaaagacaatgccagcaacatatatagcaaaaatactgactatactgaacttcaccagcaaaatacagatttgatatatcagactggacctaaatctacgtatatttcatcagcagctgataacattcgaaatcaaaaagccaccatcttagctggcactgcaaatgtgaaagtaggatctcggacaccagtagaggcctctcatcctgttgaaaatgcatctgttcctaggccttcatcccattttgtgcgaagaaaaaagtcagaacctgatgatgagctgctgtttgattttcttaatagttcacagaaggagcctaccgggagggtggaaatcagaaaggaaaaaggcaagacacctgtctttcagagctctcagacatcaagtgtcagttctgtgaaccccagtgtaaccaccatcaaaaccattgaagaaaattcttttgggagccaaacccacgaagctgccagtaactcagattctagccatgaaggtcaagaggaatcttcaaaggaaaatgtgtcatcaaatgctgcctgccctgaccacaccccaacacctaatgatgatggcaaatcacatgaactgtctaaccttcgactggagaatcagctgctgaggaatgaagttcagtctttaaatcaagaaatggcctcgttactccaaagatccaaagagactcaagaagaattaaacaaagcaagagcaagagttgaaaagtggaatgctgaccattcaaagagtgatcgaatgactcgaggactccgagcccaagtagatgacctgactgaagctgtggctgcaaaggattcccagctggctgtactgaaagtgagactccaggaagctgaccagctactgagtactcgcacagaagcattagaggccttacagagtgaaaaatcacgaataatgcaggatcaaagtgaaggtaacagcctgcagaatcaagctctgcagactcttcaggagagactgcatgaagcggatgccactctgaagagagagcaggagagctataaacagatgcagagcgagtttgctgcacgccttaataaagtggaaatggaacgtcagaatttagcagaagcaattacactggccgaaagaaaatactcagatgagaagaagagggttgatgaactgcagcagcaagtcaagctgtataagttgaacttggagtcctctaagcaggaattaattgactacaagcaaaaagctactagaatactgcaatctaaggaaaaattgattaacagcttgaaagaaggctctggttttgaaggcctagatagcagcactgccagtagcatggagctggaagaacttcggcatgagaaagagatgcagagggaggaaatacagaagctgatgggccagatacatcagctcagatccgaattgaggatccaaagtgggaattccctcggaagaacttggttcttggaaaaactctaggagaaggcgaatttggaaaagtggtcaaggcaacggccttccatctgaaaggcagagcagggtacaccacggtggccgtgaagatgctgaaagagaacgcctccccgagtgagcttcgagacctgctgtcagagttcaacgtcctgaagcaggtcaaccacccacatgtcatcaaattgtatggggcctgcagccaggatggcccgctcctcctcatcgtggagtacgccaaatacggctccctgcggggcttcctccgcgagagccgcaaagtggggcctggctacctgggcagtggaggcagccgcaactccagctccctggaccacccggatgagcgggccctcaccatgggcgacctcatctcatttgcctggcagatctcacaggggatgcagtatctggccgagatgaagctcgttcatcgggacttggcagccagaaacatcctggtagctgaggggcggaagatgaagatttcggatttcggcttgtcccgagatgtttatgaagaggattcctacgtgaagaggagccagggtcggattccagttaaatggatggcaattgaatccctttttgatcatatctacaccacgcaaagtgatgtatggtcttttggtgtcctgctgtgggagatcgtgaccctagggggaaacccctatcctgggattcctcctgagcggctcttcaaccttctgaagaccggccaccggatggagaggccagacaactgcagcgaggagatgtaccgcctgatgctgcaatgctggaagcaggagccggacaaaaggccggtgtttgcggacatcagcaaagacctggagaagatgatggttaagaggagagactacttggaccttgcggcgtccactccatctgactccctgatttatgacgacggcctctcagaggaggagacaccgctggtggactgtaataatgcccccctccctcgagccctcccttccacatggattgaaaacaaactctatggcatgtcagacccgaactggcctggagagagtcctgtaccactcacgagagctgatggcactaacactgggtttccaagatatccaaatgatagtgtatatgctaactggatgctttcaccctcagcggcaaaattaatggacacgtttgatagttaacatttctttgtgaaaggtaatggactcacaaggggaagaaacatgctgagaatggaaagtctaccggccctttctttgtgaacgtcacattggccgagccgtgttcagttcccaggtggcagactcgtttttggtagtttgttttaacttccaaggtggttttacttctgatagccggtgattttccctcctagcagacatgccacaccgggtaagagctctgagtcttagtggttaagcattcctttctcttcagtgcccagcagcacccagtgttggtctgtgtccatcagtgaccaccaacattctgtgttcacatgtgtgggtccaacacttactacctggtgtatgaaattggacctgaactgttggatttttctagttgccgccaaacaaggcaaaaaaatttaaacatgaagcacacacacaaaaaaggcagtaggaaaaatgctggccctgatgacctgtccttattcagaatgagagactgcggggggggcctgggggtagtgtcaatgcccctccagggctggaggggaagaggggccccgaggatgggcctgggctcagcattcgagatcttgagaatgatttttttttaatcatgcaacctttccttaggaagacatttggttttcatcatgattaagatgattcctagatttagcacaatggagagattccatgccatctttactatgtggatggtggtatcagggaagagggctcacaagacacatttgtcccccgggcccaccacatcatcctcacgtgttcggtactgagcagccactacccctgatgagaacagtatgaagaaagggggctgttggagtcccagaattgctgacagcagaggctttgctgctgtgaatcccacctgccaccagcctgcagcacaccccacagccaagtagaggcgaaagcagtggctcatcctacctgttaggagcaggtagggcttgtactcactttaatttgaatcttatcaacttactcataaagggacaggctagctagctgtgttagaagtagcaatgacaatgaccaaggactgctacacctctgattacaattctgatgtgaaaaagatggtgtttggctcttatagagcctgtgtgaaaggcccatggatcagctcttcctgtgtttgtaatttaatgctgctacaagatgtttctgtttcttagattctgaccatgactcataagcttcttgtcattcttcattgcttgtttgtggtcacagatgcacaacactcctccagtcttgtgggggcagcttttgggaagtctcagcagctcttctggctgtgttgtcagcactgtaacttcgcagaaaagagtcggattaccaaaacactgcctgctcttcagacttaaagcactgataggacttaaaatagtctcattcaaatactgtattttatataggcatttcacaaaaacagcaaaattgtggcattttgtgaggccaaggcttggatgcgtgtgtaatagagccttatggtgtgtgcgcacacacccagagggagagtttgaaaaatgcttattggacacgtaacctggctctaatttgggctgtttttcagatacactgtgataagttcttttacaaatatctatagacatggtaaacttttggttttcagatatgcttaatgatagtcttactaaatgcagaaataagaataaactttctcaaattattaaaaatgcctacacagtaagtgtgaattgctgcaacaggtttgttctcaggagggtaagaactccaggtctaaacagctgacccagtgatggggaatttatccttgaccaatttatccttgaccaataacctaattgtctattcctgagttataaaagtccccatccttattagctctactggaattttcatacacgtaaatgcagaagttactaagtattaagtattactgagtattaagtagtaatctgtcagttattaaaatttgtaaaatctatttatgaaaggtcattaaaccagatcatgttcctttttttgtaatcaaggtgactaagaaaatcagttgtgtaaataaaatcatgtatcataaaatgtg

SEQ ID NO: 327379 - DNA, 5041 bp, Homo sapiens
cagccccacgccggctgcagctccgcgagccgagccggatctcgagcggggtacacgggctgaggcggcggcggcggccccgcccggggctccattgttaaggcggctgcggctctgtcggctgttcagctgcgctccagtcggcccaggcgccgcggcgaggagcgagcgctgcgaggtggcggcctgagcaatggaagagttaatagttgaacttcgtctctttcttgaactcctggaccatgaatatctaacctcaactgtcagggagaaaaaggcagtgataaccaacattctgctaagaatacagtcatccaaaggttttgatgtgaaggaccatgctcagaagcaggagaccgctaacagcctgccagcccctcctcagatgcccctgccggagatccctcagccctggctggaggatccaaagtgggaattccctcggaagaacttggttcttggaaaaactctaggagaaggcgaatttggaaaagtggtcaaggcaacggccttccatctgaaaggcagagcagggtacaccacggtggccgtgaagatgctgaaagagaacgcctccccgagtgagcttcgagacctgctgtcagagttcaacgtcctgaagcaggtcaaccacccacatgtcatcaaattgtatggggcctgcagccaggatggcccgctcctcctcatcgtggagtacgccaaatacggctccctgcggggcttcctccgcgagagccgcaaagtggggcctggctacctgggcagtggaggcagccgcaactccagctccctggaccacccggatgagcgggccctcaccatgggcgacctcatctcatttgcctggcagatctcacaggggatgcagtatctggccgagatgaagctcgttcatcgggacttggcagccagaaacatcctggtagctgaggggcggaagatgaagatttcggatttcggcttgtcccgagatgtttatgaagaggattcctacgtgaagaggagccagggtcggattccagttaaatggatggcaattgaatccctttttgatcatatctacaccacgcaaagtgatgtatggtcttttggtgtcctgctgtgggagatcgtgaccctagggggaaacccctatcctgggattcctcctgagcggctcttcaaccttctgaagaccggccaccggatggagaggccagacaactgcagcgaggagatgtaccgcctgatgctgcaatgctggaagcaggagccggacaaaaggccggtgtttgcggacatcagcaaagacctggagaagatgatggttaagaggagagactacttggaccttgcggcgtccactccatctgactccctgatttatgacgacggcctctcagaggaggagacaccgctggtggactgtaataatgcccccctccctcgagccctcccttccacatggattgaaaacaaactctatggtagaatttcccatgcatttactagattctagcaccgctgtcccctctgcactatccttcctctctgtgatgctttttaaaaatgtttctggtctgaacaaaaccaaagtctgctctgaacctttttatttgtaaatgtctgactttgcatccagtttacatttaggcattattgcaactatgtttttctaaaaggaagtgaaaataagtgtaattaccacattgcccagcaacttaggatggtagaggaaaaaacagatcagggcggaactctcaggggagaccaagaacaggttgaataaggcgcttctggggtgggaatcaagtcatagtacttctactttaactaagtggataaatatacaaatctggggaggtattcagttgagaaaggagccaccagcaccactcagcctgcactgggagcacagccaggttcccccagacccctcctgggcaggcaggtgcctctcagaggccacccggcactggcgagcagccactggccaagcctcagccccagtcccagccacatgtcctccatcaggggtagcgaggttgcaggagctggctggccctgggaggacgcacccccactgctgttttcacatcctttcccttacccaccttcaggacggttgtcacttatgaagtcagtgctaaagctggagcagttgctttttgaaagaacatggtctgtggtgctgtggtcttacaatggacagtaaatatggttcttgccaaaactccttcttttgtctttgattaaatactagaaattttttctgtttcctaacttcatcattgattgtttgaaatcttggagtttaagcatttttttcaagctgagacggttccttttgcatgcctcctgactcactgactcctcactggctttgtgtctagtgccacactccatttgtgctgacgatgctatgaggctggcccgtgtgcaccctcgatttggaaggtcctcttctccgttgtaggctcagacaacagacgagtgcctcctttacgttagagaatgttttatagaacgtttccgctgcagtaagccattgagtgcagcagtgtgctgttgccctacactgccttagaaaaagagttaagcagttcgacaaatatacatcagattagagagtctcaagttcataaaagtcaaaattggtagtgtctgttaagttacatttaccaagagagcacatgatatttcccctaactataacagtgtttttggaaacctggaacacaaaaccattaatataattggcacagaaaccacgagtttggtttgaacatcaaagggagttttgccaaggccttactgtctgcacttgaagttttggttcttcagtgcagaacaaatgatctgttttcatttttaggcatgtcagacccgaactggcctggagagagtcctgtaccactcacgagagctgatggcactaacactgggtttccaagatatccaaatgatagtgtatatgctaactggatgctttcaccctcagcggcaaaattaatggacacgtttgatagttaacatttctttgtgaaaggtaatggactcacaaggggaagaaacatgctgagaatggaaagtctaccggccctttctttgtgaacgtcacattggccgagccgtgttcagttcccaggtggcagactcgtttttggtagtttgttttaacttccaaggtggttttacttctgatagccggtgattttccctcctagcagacatgccacaccgggtaagagctctgagtcttagtggttaagcattcctttctcttcagtgcccagcagcacccagtgttggtctgtgtccatcagtgaccaccaacattctgtgttcacatgtgtgggtccaacacttactacctggtgtatgaaattggacctgaactgttggatttttctagttgccgccaaacaaggcaaaaaaatttaaacatgaagcacacacacaaaaaaggcagtaggaaaaatgctggccctgatgacctgtccttattcagaatgagagactgcggggggggcctgggctcagcattcgagatcttgagaatgatttttttttaatcatgcaacctttccttaggaagacatttggttttcatcatgattaagatgattcctagatttagcacaatggagagattccatgccatctttactatgtggatggtggtatcagggaagagggctcacaagacacatttgtcccccgggcccaccacatcatcctcacgtgttcggtactgagcagccactacccctgatgagaacagtatgaagaaagggggctgttggagtcccagaattgctgacagcagaggctttgctgctgtgaatcccacctgccaccagcctgcagcacaccccacagccaagtagaggcgaaagcagtggctcatcctacctgttaggagcaggtagggcttgtactcactttaatttgaatcttatcaacttactcataaagggacaggctagctagctgtgttagaagtagcaatgacaatgaccaaggactgctacacctctgattacaattctgatgtgaaaaagatggtgtttggctcttatagagcctgtgtgaaaggcccatggatcagctcttcctgtgtttgtaatttaatgctgctacaagatgtttctgtttcttagattctgaccatgactcataagcttcttgtcattcttcattgcttgtttgtggtcacagatgcacaacactcctccagtcttgtgggggcagcttttgggaagtctcagcagctcttctggctgtgttgtcagcactgtaacttcgcagaaaagagtcggattaccaaaacactgcctgctcttcagacttaaagcactgataggacttaaaatagtctcattcaaatactgtattttatataggcatttcacaaaaacagcaaaattgtggcattttgtgaggccaaggcttggatgcgtgtgtaatagagccttatggtgtgtgcgcacacacccagagggagagtttgaaaaatgcttattggacacgtaacctggctctaatttgggctgtttttcagatacactgtgataagttcttttacaaatatctatagacatggtaaacttttggttttcagatatgcttaatgatagtcttactaaatgcagaaataagaataaactttctcaaattattaaaaatgcctacacagtaagtgtgaattgctgcaacaggtttgttctcaggagggtaagaactccaggtctaaacagctgacccagtgatggggaatttatccttgaccaatttatccttgaccaataacctaattgtctattcctgagttataaaagtccccatccttattagctctactggaattttcatacacgtaaatgcagaagttactaagtattaagtattactgagtattaagtagtaatctgtcagttattaaaatttgtaaaatctatttatgaaaggtcattaaaccagatcatgttcctttttttgtaatcaaggtgactaagaaaatcagttgtgtaaataaaatcatgtatcataaaatgtg

SEQ ID NO: 327380 - DNA, 5171 bp, Homo sapiens
gcgccctggtgccaggcgctcagctcggcgctcccctgtgctcgcccggcgcccactcattcgcagcccggccttcgtcgccgccgcctccctgctgctcctcctcctttccccagcccgccgcggccatggcggacagcgccagcgagagcgacacggacggggcggggggcaacagcagcagctcggccgccatgcagtcgtcctgctcgtcgacctcgggcggcggcggtggcggcgggggaggcggcggcggtgggaagtcggggggcattgtcatctcgccgttccgcctggaggagctcaccaaccgcctggcctcgctgcagcaagagaacaaggtgctgaagatagagctggagacctacaaactgaagtgcaaggcactgcaggaggagaaccgcgacctgcgcaaagccagcgttaccatcatactggagaacaggccatctgttctgtttctacctgtcccctggaggctgcccagaaaccggccctcgctggactccatggagaaccaggtctccgtggatgccttcaagatcctggaggatccaaagtgggaattccctcggaagaacttggttcttggaaaaactctaggagaaggcgaatttggaaaagtggtcaaggcaacggccttccatctgaaaggcagagcagggtacaccacggtggccgtgaagatgctgaaagagaacgcctccccgagtgagcttcgagacctgctgtcagagttcaacgtcctgaagcaggtcaaccacccacatgtcatcaaattgtatggggcctgcagccaggatggcccgctcctcctcatcgtggagtacgccaaatacggctccctgcggggcttcctccgcgagagccgcaaagtggggcctggctacctgggcagtggaggcagccgcaactccagctccctggaccacccggatgagcgggccctcaccatgggcgacctcatctcatttgcctggcagatctcacaggggatgcagtatctggccgagatgaagctcgttcatcgggacttggcagccagaaacatcctggtagctgaggggcggaagatgaagatttcggatttcggcttgtcccgagatgtttatgaagaggattcctacgtgaagaggagccagggtcggattccagttaaatggatggcaattgaatccctttttgatcatatctacaccacgcaaagtgatgtatggtcttttggtgtcctgctgtgggagatcgtgaccctagggggaaacccctatcctgggattcctcctgagcggctcttcaaccttctgaagaccggccaccggatggagaggccagacaactgcagcgaggagatgtaccgcctgatgctgcaatgctggaagcaggagccggacaaaaggccggtgtttgcggacatcagcaaagacctggagaagatgatggttaagaggagagactacttggaccttgcggcgtccactccatctgactccctgatttatgacgacggcctctcagaggaggagacaccgctggtggactgtaataatgcccccctccctcgagccctcccttccacatggattgaaaacaaactctatggtagaatttcccatgcatttactagattctagcaccgctgtcccctctgcactatccttcctctctgtgatgctttttaaaaatgtttctggtctgaacaaaaccaaagtctgctctgaacctttttatttgtaaatgtctgactttgcatccagtttacatttaggcattattgcaactatgtttttctaaaaggaagtgaaaataagtgtaattaccacattgcccagcaacttaggatggtagaggaaaaaacagatcagggcggaactctcaggggagaccaagaacaggttgaataaggcgcttctggggtgggaatcaagtcatagtacttctactttaactaagtggataaatatacaaatctggggaggtattcagttgagaaaggagccaccagcaccactcagcctgcactgggagcacagccaggttcccccagacccctcctgggcaggcaggtgcctctcagaggccacccggcactggcgagcagccactggccaagcctcagccccagtcccagccacatgtcctccatcaggggtagcgaggttgcaggagctggctggccctgggaggacgcacccccactgctgttttcacatcctttcccttacccaccttcaggacggttgtcacttatgaagtcagtgctaaagctggagcagttgctttttgaaagaacatggtctgtggtgctgtggtcttacaatggacagtaaatatggttcttgccaaaactccttcttttgtctttgattaaatactagaaattttttctgtttcctaacttcatcattgattgtttgaaatcttggagtttaagcatttttttcaagctgagacggttccttttgcatgcctcctgactcactgactcctcactggctttgtgtctagtgccacactccatttgtgctgacgatgctatgaggctggcccgtgtgcaccctcgatttggaaggtcctcttctccgttgtaggctcagacaacagacgagtgcctcctttacgttagagaatgttttatagaacgtttccgctgcagtaagccattgagtgcagcagtgtgctgttgccctacactgccttagaaaaagagttaagcagttcgacaaatatacatcagattagagagtctcaagttcataaaagtcaaaattggtagtgtctgttaagttacatttaccaagagagcacatgatatttcccctaactataacagtgtttttggaaacctggaacacaaaaccattaatataattggcacagaaaccacgagtttggtttgaacatcaaagggagttttgccaaggccttactgtctgcacttgaagttttggttcttcagtgcagaacaaatgatctgttttcatttttaggcatgtcagacccgaactggcctggagagagtcctgtaccactcacgagagctgatggcactaacactgggtttccaagatatccaaatgatagtgtatatgctaactggatgctttcaccctcagcggcaaaattaatggacacgtttgatagttaacatttctttgtgaaaggtaatggactcacaaggggaagaaacatgctgagaatggaaagtctaccggccctttctttgtgaacgtcacattggccgagccgtgttcagttcccaggtggcagactcgtttttggtagtttgttttaacttccaaggtggttttacttctgatagccggtgattttccctcctagcagacatgccacaccgggtaagagctctgagtcttagtggttaagcattcctttctcttcagtgcccagcagcacccagtgttggtctgtgtccatcagtgaccaccaacattctgtgttcacatgtgtgggtccaacacttactacctggtgtatgaaattggacctgaactgttggatttttctagttgccgccaaacaaggcaaaaaaatttaaacatgaagcacacacacaaaaaaggcagtaggaaaaatgctggccctgatgacctgtccttattcagaatgagagactgcggggggggcctgggctcagcattcgagatcttgagaatgatttttttttaatcatgcaacctttccttaggaagacatttggttttcatcatgattaagatgattcctagatttagcacaatggagagattccatgccatctttactatgtggatggtggtatcagggaagagggctcacaagacacatttgtcccccgggcccaccacatcatcctcacgtgttcggtactgagcagccactacccctgatgagaacagtatgaagaaagggggctgttggagtcccagaattgctgacagcagaggctttgctgctgtgaatcccacctgccaccagcctgcagcacaccccacagccaagtagaggcgaaagcagtggctcatcctacctgttaggagcaggtagggcttgtactcactttaatttgaatcttatcaacttactcataaagggacaggctagctagctgtgttagaagtagcaatgacaatgaccaaggactgctacacctctgattacaattctgatgtgaaaaagatggtgtttggctcttatagagcctgtgtgaaaggcccatggatcagctcttcctgtgtttgtaatttaatgctgctacaagatgtttctgtttcttagattctgaccatgactcataagcttcttgtcattcttcattgcttgtttgtggtcacagatgcacaacactcctccagtcttgtgggggcagcttttgggaagtctcagcagctcttctggctgtgttgtcagcactgtaacttcgcagaaaagagtcggattaccaaaacactgcctgctcttcagacttaaagcactgataggacttaaaatagtctcattcaaatactgtattttatataggcatttcacaaaaacagcaaaattgtggcattttgtgaggccaaggcttggatgcgtgtgtaatagagccttatggtgtgtgcgcacacacccagagggagagtttgaaaaatgcttattggacacgtaacctggctctaatttgggctgtttttcagatacactgtgataagttcttttacaaatatctatagacatggtaaacttttggttttcagatatgcttaatgatagtcttactaaatgcagaaataagaataaactttctcaaattattaaaaatgcctacacagtaagtgtgaattgctgcaacaggtttgttctcaggagggtaagaactccaggtctaaacagctgacccagtgatggggaatttatccttgaccaatttatccttgaccaataacctaattgtctattcctgagttataaaagtccccatccttattagctctactggaattttcatacacgtaaatgcagaagttactaagtattaagtattactgagtattaagtagtaatctgtcagttattaaaatttgtaaaatctatttatgaaaggtcattaaaccagatcatgttcctttttttgtaatcaaggtgactaagaaaatcagttgtgtaaataaaatcatgtatcataaaatgtg

SEQ ID NO: 327381 - DNA, 363 bp, Homo sapiens
aaactgaacctcgaggccctgggttgccttgacctccagctcccaggaacaggggcagctggtaacatgtggcctgagtggaacggggcagggcagggctggggcaggtgggtgggtatgaaggctctgaggggtggaggacagggtgctcgggggggctgctgtctccaggcccagttgggggctgttccaggacttaggctgtgtgggaatctctaccctcaggccattacaggccggtccagctgcctggctaaggtgttcccctgtgcccccctagatcgggaaagtctgtgtggaaaactgccaggcgttcagtggcatcaacgtccagtacaagctgcattcctctggtgccaactg

SEQ ID NO: 327382 - DNA, 5626 bp, Homo sapiens
gcttcagtcccgcgaccgaagcagggcgcgcagcagcgctgagtgccccggaacgtgcgtcgcgcccccagtgtccgtcgcgtccgccgcgccccgggcggggatggggcggccagactgagcgccgcacccgccatccagacccgccggccctagccgcagtccctccagccgtggccccagcgcgcacgggcgatggcgaaggcgacgtccggtgccgcggggctgcgtctgctgttgctgctgctgctgccgctgctaggcaaagtggcattgggcctctacttctcgagggatgcttactgggagaagctgtatgtggaccaggcggccggcacgcccttgctgtacgtccatgccctgcgggacgcccctgaggaggtgcccagcttccgcctgggccagcatctctacggcacgtaccgcacacggctgcatgagaacaactggatctgcatccaggaggacaccggcctcctctaccttaaccggagcctggaccatagctcctgggagaagctcagtgtccgcaaccgcggctttcccctgctcaccgtctacctcaaggtcttcctgtcacccacatcccttcgtgagggcgagtgccagtggccaggctgtgcccgcgtatacttctccttcttcaacacctcctttccagcctgcagctccctcaagccccgggagctctgcttcccagagacaaggccctccttccgcattcgggagaaccgacccccaggcaccttccaccagttccgcctgctgcctgtgcagttcttgtgccccaacatcagcgtggcctacaggctcctggagggtgagggtctgcccttccgctgcgccccggacagcctggaggtgagcacgcgctgggccctggaccgcgagcagcgggagaagtacgagctggtggccgtgtgcaccgtgcacgccggcgcgcgcgaggaggtggtgatggtgcccttcccggtgaccgtgtacgacgaggacgactcggcgcccaccttccccgcgggcgtcgacaccgccagcgccgtggtggagttcaagcggaaggaggacaccgtggtggccacgctgcgtgtcttcgatgcagacgtggtacctgcatcaggggagctggtgaggcggtacacaagcacgctgctccccggggacacctgggcccagcagaccttccgggtggaacactggcccaacgagacctcggtccaggccaacggcagcttcgtgcgggcgaccgtacatgactataggctggttctcaaccggaacctctccatctcggagaaccgcaccatgcagctggcggtgctggtcaatgactcagacttccagggcccaggagcgggcgtcctcttgctccacttcaacgtgtcggtgctgccggtcagcctgcacctgcccagtacctactccctctccgtgagcaggagggctcgccgatttgcccagatcgggaaagtctgtgtggaaaactgccaggcgttcagtggcatcaacgtccagtacaagctgcattcctctggtgccaactgcagcacgctaggggtggtcacctcagccgaggacacctcggggatcctgtttgtgaatgacaccaaggccctgcggcggcccaagtgtgccgaacttcactacatggtggtggccaccgaccagcagacctctaggcaggcccaggcccagctgcttgtaacagtggaggggtcatatgtggccgaggaggcgggctgccccctgtcctgtgcagtcagcaagagacggctggagtgtgaggagtgtggcggcctgggctccccaacaggcaggtgtgagtggaggcaaggagatggcaaagggatcaccaggaacttctccacctgctctcccagcaccaagacctgccccgacggccactgcgatgttgtggagacccaagacatcaacatttgccctcaggactgcctccggggcagcattgttgggggacacgagcctggggagccccgggggattaaagctggctatggcacctgcaactgcttccctgaggaggagaagtgcttctgcgagcccgaagacatccaggatccactgtgcgacgagctgtgccgcacggtgatcgcagccgctgtcctcttctccttcatcgtctcggtgctgctgtctgccttctgcatccactgctaccacaagtttgcccacaagccacccatctcctcagctgagatgaccttccggaggcccgcccaggccttcccggtcagctactcctcttccggtgcccgccggccctcgctggactccatggagaaccaggtctccgtggatgccttcaagatcctggaggatccaaagtgggaattccctcggaagaacttggttcttggaaaaactctaggagaaggcgaatttggaaaagtggtcaaggcaacggccttccatctgaaaggcagagcagggtacaccacggtggccgtgaagatgctgaaagagaacgcctccccgagtgagcttcgagacctgctgtcagagttcaacgtcctgaagcaggtcaaccacccacatgtcatcaaattgtatggggcctgcagccaggatggcccgctcctcctcatcgtggagtacgccaaatacggctccctgcggggcttcctccgcgagagccgcaaagtggggcctggctacctgggcagtggaggcagccgcaactccagctccctggaccacccggatgagcgggccctcaccatgggcgacctcatctcatttgcctggcagatctcacaggggatgcagtatctggccgagatgaagctcgttcatcgggacttggcagccagaaacatcctggtagctgaggggcggaagatgaagatttcggatttcggcttgtcccgagatgtttatgaagaggattcctacgtgaagaggagccagggtcggattccagttaaatggatggcaattgaatccctttttgatcatatctacaccacgcaaagtgatgtatggtcttttggtgtcctgctgtgggagatcgtgaccctagggggaaacccctatcctgggattcctcctgagcggctcttcaaccttctgaagaccggccaccggatggagaggccagacaactgcagcgaggagatgtaccgcctgatgctgcaatgctggaagcaggagccggacaaaaggccggtgtttgcggacatcagcaaagacctggagaagatgatggttaagaggagagactacttggaccttgcggcgtccactccatctgactccctgatttatgacgacggcctctcagaggaggagacaccgctggtggactgtaataatgcccccctccctcgagccctcccttccacatggattgaaaacaaactctatggcatgtcagacccgaactggcctggagagagtcctgtaccactcacgagagctgatggcactaacactgggtttccaagatatccaaatgatagtgtatatgctaactggatgctttcaccctcagcggcaaaattaatggacacgtttgatagttaacatttctttgtgaaaggtaatggactcacaaggggaagaaacatgctgagaatggaaagtctaccggccctttctttgtgaacgtcacattggccgagccgtgttcagttcccaggtggcagactcgtttttggtagtttgttttaacttccaaggtggttttacttctgatagccggtgattttccctcctagcagacatgccacaccgggtaagagctctgagtcttagtggttaagcattcctttctcttcagtgcccagcagcacccagtgttggtctgtgtccatcagtgaccaccaacattctgtgttcacatgtgtgggtccaacacttactacctggtgtatgaaattggacctgaactgttggatttttctagttgccgccaaacaaggcaaaaaaatttaaacatgaagcacacacacaaaaaaggcagtaggaaaaatgctggccctgatgacctgtccttattcagaatgagagactgcggggggggcctgggggtagtgtcaatgcccctccagggctggaggggaagaggggccccgaggatgggcctgggctcagcattcgagatcttgagaatgatttttttttaatcatgcaacctttccttaggaagacatttggttttcatcatgattaagatgattcctagatttagcacaatggagagattccatgccatctttactatgtggatggtggtatcagggaagagggctcacaagacacatttgtcccccgggcccaccacatcatcctcacgtgttcggtactgagcagccactacccctgatgagaacagtatgaagaaagggggctgttggagtcccagaattgctgacagcagaggctttgctgctgtgaatcccacctgccaccagcctgcagcacaccccacagccaagtagaggcgaaagcagtggctcatcctacctgttaggagcaggtagggcttgtactcactttaatttgaatcttatcaacttactcataaagggacaggctagctagctgtgttagaagtagcaatgacaatgaccaaggactgctacacctctgattacaattctgatgtgaaaaagatggtgtttggctcttatagagcctgtgtgaaaggcccatggatcagctcttcctgtgtttgtaatttaatgctgctacaagatgtttctgtttcttagattctgaccatgactcataagcttcttgtcattcttcattgcttgtttgtggtcacagatgcacaacactcctccagtcttgtgggggcagcttttgggaagtctcagcagctcttctggctgtgttgtcagcactgtaacttcgcagaaaagagtcggattaccaaaacactgcctgctcttcagacttaaagcactgataggacttaaaatagtctcattcaaatactgtattttatataggcatttcacaaaaacagcaaaattgtggcattttgtgaggccaaggcttggatgcgtgtgtaatagagccttatggtgtgtgcgcacacacccagagggagagtttgaaaaatgcttattggacacgtaacctggctctaatttgggctgtttttcagatacactgtgataagttcttttacaaatatctatagacatggtaaacttttggttttcagatatgcttaatgatagtcttactaaatgcagaaataagaataaactttctcaaattattaaaaatgcctacacagtaagtgtgaattgctgcaacaggtttgttctcaggagggtaagaactccaggtctaaacagctgacccagtgatggggaatttatccttgaccaatttatccttgaccaataacctaattgtctattcctgagttataaaagtccccatccttattagctctactggaattttcatacacgtaaatgcagaagttactaagtattaagtattactgagtattaagtagtaatctgtcagttattaaaatttgtaaaatctatttatgaaaggtcattaaaccagatcatgttcctttttttgtaatcaaggtgactaagaaaatcagttgtgtaaataaaatcatgtatcataaaatgtg

SEQ ID NO: 327383 - DNA, 4220 bp, Homo sapiens
gcttcagtcccgcgaccgaagcagggcgcgcagcagcgctgagtgccccggaacgtgcgtcgcgcccccagtgtccgtcgcgtccgccgcgccccgggcggggatggggcggccagactgagcgccgcacccgccatccagacccgccggccctagccgcagtccctccagccgtggccccagcgcgcacgggcgatggcgaaggcgacgtccggtgccgcggggctgcgtctgctgttgctgctgctgctgccgctgctaggcaaagtggcattgggcctctacttctcgagggatgcttactgggagaagctgtatgtggaccaggcggccggcacgcccttgctgtacgtccatgccctgcgggacgcccctgaggaggtgcccagcttccgcctgggccagcatctctacggcacgtaccgcacacggctgcatgagaacaactggatctgcatccaggaggacaccggcctcctctaccttaaccggagcctggaccatagctcctgggagaagctcagtgtccgcaaccgcggctttcccctgctcaccgtctacctcaaggtcttcctgtcacccacatcccttcgtgagggcgagtgccagtggccaggctgtgcccgcgtatacttctccttcttcaacacctcctttccagcctgcagctccctcaagccccgggagctctgcttcccagagacaaggccctccttccgcattcgggagaaccgacccccaggcaccttccaccagttccgcctgctgcctgtgcagttcttgtgccccaacatcagcgtggcctacaggctcctggagggtgagggtctgcccttccgctgcgccccggacagcctggaggtgagcacgcgctgggccctggaccgcgagcagcgggagaagtacgagctggtggccgtgtgcaccgtgcacgccggcgcgcgcgaggaggtggtgatggtgcccttcccggtgaccgtgtacgacgaggacgactcggcgcccaccttccccgcgggcgtcgacaccgccagcgccgtggtggagttcaagcggaaggaggacaccgtggtggccacgctgcgtgtcttcgatgcagacgtggtacctgcatcaggggagctggtgaggcggtacacaagcacgctgctccccggggacacctgggcccagcagaccttccgggtggaacactggcccaacgagacctcggtccaggccaacggcagcttcgtgcgggcgaccgtacatgactataggctggttctcaaccggaacctctccatctcggagaaccgcaccatgcagctggcggtgctggtcaatgactcagacttccagggcccaggagcgggcgtcctcttgctccacttcaacgtgtcggtgctgccggtcagcctgcacctgcccagtacctactccctctccgtgagcaggagggctcgccgatttgcccagatcgggaaagtctgtgtggaaaactgccaggcgttcagtggcatcaacgtccagtacaagctgcattcctctggtgccaactgcagcacgctaggggtggtcacctcagccgaggacacctcggggatcctgtttgtgaatgacaccaaggccctgcggcggcccaagtgtgccgaacttcactacatggtggtggccaccgaccagcagacctctaggcaggcccaggcccagctgcttgtaacagtggaggggtcatatgtggccgaggaggcgggctgccccctgtcctgtgcagtcagcaagagacggctggagtgtgaggagtgtggcggcctgggctccccaacaggcaggtgtgagtggaggcaaggagatggcaaagggatcaccaggaacttctccacctgctctcccagcaccaagacctgccccgacggccactgcgatgttgtggagacccaagacatcaacatttgccctcaggactgcctccggggcagcattgttgggggacacgagcctggggagccccgggggattaaagctggctatggcacctgcaactgcttccctgaggaggagaagtgcttctgcgagcccgaagacatccaggatccactgtgcgacgagctgtgccgcacggtgatcgcagccgctgtcctcttctccttcatcgtctcggtgctgctgtctgccttctgcatccactgctaccacaagtttgcccacaagccacccatctcctcagctgagatgaccttccggaggcccgcccaggccttcccggtcagctactcctcttccggtgcccgccggccctcgctggactccatggagaaccaggtctccgtggatgccttcaagatcctggaggatccaaagtgggaattccctcggaagaacttggttcttggaaaaactctaggagaaggcgaatttggaaaagtggtcaaggcaacggccttccatctgaaaggcagagcagggtacaccacggtggccgtgaagatgctgaaagagaacgcctccccgagtgagcttcgagacctgctgtcagagttcaacgtcctgaagcaggtcaaccacccacatgtcatcaaattgtatggggcctgcagccaggatggcccgctcctcctcatcgtggagtacgccaaatacggctccctgcggggcttcctccgcgagagccgcaaagtggggcctggctacctgggcagtggaggcagccgcaactccagctccctggaccacccggatgagcgggccctcaccatgggcgacctcatctcatttgcctggcagatctcacaggggatgcagtatctggccgagatgaagctcgttcatcgggacttggcagccagaaacatcctggtagctgaggggcggaagatgaagatttcggatttcggcttgtcccgagatgtttatgaagaggattcctacgtgaagaggagccagggtcggattccagttaaatggatggcaattgaatccctttttgatcatatctacaccacgcaaagtgatgtatggtcttttggtgtcctgctgtgggagatcgtgaccctagggggaaacccctatcctgggattcctcctgagcggctcttcaaccttctgaagaccggccaccggatggagaggccagacaactgcagcgaggagatgtaccgcctgatgctgcaatgctggaagcaggagccggacaaaaggccggtgtttgcggacatcagcaaagacctggagaagatgatggttaagaggagagactacttggaccttgcggcgtccactccatctgactccctgatttatgacgacggcctctcagaggaggagacaccgctggtggactgtaataatgcccccctccctcgagccctcccttccacatggattgaaaacaaactctatgatgcacaacactcctccagtcttgtgggggcagcttttgggaagtctcagcagctcttctggctgtgttgtcagcactgtaacttcgcagaaaagagtcggattaccaaaacactgcctgctcttcagacttaaagcactgataggacttaaaatagtctcattcaaatactgtattttatataggcatttcacaaaaacagcaaaattgtggcattttgtgaggccaaggcttggatgcgtgtgtaatagagccttatggtgtgtgcgcacacacccagagggagagtttgaaaaatgcttattggacacgtaacctggctctaatttgggctgtttttcagatacactgtgataagttcttttacaaatatctatagacatggtaaacttttggttttcagatatgcttaatgatagtcttactaaatgcagaaataagaataaactttctcaaattattaaaaatgcctacacagtaagtgtgaattgctgcaacaggtttgttctcaggagggtaagaactccaggtctaaacagctgacccagtgatggggaatttatccttgaccaatttatccttgaccaataacctaattgtctattcctgagttataaaagtccccatccttattagctctactggaattttcatacacgtaaatgcagaagttactaagtattaagtattactgagtattaagtagtaatctgtcagttattaaaatttgtaaaatctatttatgaaaggtcattaaaccagatcatgttcctttttttgtaatcaaggtgactaagaaaatcagttgtgtaaataaaatcatgtatcataaaatgtg

SEQ ID NO: 327384 - DNA, 699 bp, Homo sapiens
  misc_feature (682)..(682): n is a, c, g, or t
ccgcttcgtccataggatagtgtctcacggcagctcaggcagcggaacctggggctctcctggtttggaagctggttgcataacagcccagaggactacagccctggaggacccgggtccgcattcttatccaggctgatgggagcaagatcgcgcatcttgctcccatcaggtttttaaagaatgaagtggaacggctgaagaagcaactgagagctgctcagttacagcattcagagaaaatggcacagtatctggaggaggaacgtctgatgggagtcttgctcccatcagcaacataacattcccccctgggtggttcttaacctgtgtggggactccaggcccagctacttaacaaaatggggataatgaggcttgcagagcaggcagactgatgggagaagactggcgcagtcttcttcccatcagaaaaaaatgggttccttgctgtcccagtaaggcatagcttttccagccctaactttaaaactcagtgaggacttagatgggaaagaatgaggtaaatacaaaggattgcaggacaacaactacagcgttgtgtactgtgggaaggggagttgggcactcttggaggactcctgctgaaggtggtcagcctgcctgacaattggagacatacttgaatggggagcagggtatgtgctttcatatgaaaaangagctgatgggagcaag

SEQ ID NO: 327385 - DNA, 4460 bp, Homo sapiens
gcgccctggtgccaggcgctcagctcggcgctcccctgtgctcgcccggcgcccactcattcgcagcccggccttcgtcgccgccgcctccctgctgctcctcctcctttccccagcccgccgcggccatggcggacagcgccagcgagagcgacacggacggggcggggggcaacagcagcagctcggccgccatgcagtcgtcctgctcgtcgacctcgggcggcggcggtggcggcgggggaggcggcggcggtgggaagtcggggggcattgtcatctcgccgttccgcctggaggagctcaccaaccgcctggcctcgctgcagcaagagaacaaggtgctgaagatagagctggagacctacaaactgaagtgcaaggcactgcaggaggagaaccgcgacctgcgcaaagccagcgttaccatccaagccagggctgagcaggaagaagaattcattagtaacactttattcaagaaaattcaggctttgcagaaggagaaagaaacccttgctgtaaattatgagaaagaagaagaattcctcactaatgagctctccagaaaattgatgcagttgcagcatgagaaagccgaactagaacagcatcttgaacaagagcaggaatttcaggtcaacaaactgatgaagaaaattaaaaaactggagaatgacaccatttctaagcaacttacattagaacagttgagacgggagaagattgaccttgaaaatacattggaacaagaacaagaagcactagttaatcgcctctggaaaaggatggataagcttgaagctgaaaagcgaatcctgcaggaaaaattagaccagcccgtctctgctccaccatcgcctagagatatctccatggagattgattctccagaaaatatgatgcgtcacatcaggtttttaaagaatgaagtggaacggctgaagaagcaactgagagctgctcagttacagcattcagagaaaatggcacagtatctggaggaggaacgtcacatgagagaagagaacttgaggctccagaggaagctgcagagggagatggagagaagagaagccctctgtcgacagctctccgagagtgagtccagcttagaaatggacgacgaaaggtattttaatgagatgtctgcacaaggattaagacctcgcactgtgtccagcccgatcccttacacaccttctccgagttcaagcaggcctatatcacctggtctatcatatgcaagtcacacggttggtttcacgccaccaacttcactgactagagctggaatgtcttattacaattccccgggtcttcacgtgcagcacatgggaacatcccatggtatcacaaggccttcaccacggagaagcaacagtcctgacaaattcaaacggcccacgccgcctccatctcccaacacacagaccccagtccagccacctccacctccacctccgccacccatgcagcccacggtcccctcagcagccacctcgcagcctactccttcgcaacattcggcgcacccctcctcccagccttaatgcatgagcttagtctgaatttcaagttgggactcatccaatggagccgtctactcaacgccaaaggcttccttctctggcatatttggatatgacttatttgcactgaggttatctaggcttcactatccattgtgttgtaaatgtttgtcagaaatgcagccagtgttgtgggtctacaacactaaccagacgactttttccatcagtgttttacttgaatcttcatgtacgtccattccctggctggaaccttcgctgtttggtatttggtatttcagcagcagtgtgcaatttttgcttggcccagagcttcattctcctggcttttaggtttgtaaaagaaaaagggatatcttttttatatttttttccatgaatctgcagaaaattactgagctgttgttaccctcctctcattataatagtgtttaccaaacataccaataattcagcactacaattcagacctttgaaaatctggctttcagtgtagaacagaaagttagatgaatcagtgcccaagacatattttctgtttaacagaactttctacagatacattttttacaggttattttcattgtgttattgacatccatgtctctcgtaaaacagatggcccaaagtaatgaatcatgtggctgtaccttctccacataaatgggatggataattatcgtatattaagatgtgattctcttttttatccttaatgttaatctacttaacctggccccctctaacatgagtcgataaatgttgtcctactcaccggtggtttcaatggctaattagaatgtgttatttgatttctgctgcagaaggcagtgtgattgtaacaaaaacaatgcggcttccccctttcgtacttcatttgtgttctcttaaaatagagtttgaacaaatattttaaaggtgcaaaataccattagaaaatactatttgaaatggacattatcgcattatcttggcataatggccagaaaatattgtattgcttggcagaaaagaaaataaggtctaaaggaaagtagcacattagcattgatggctgttcatttcacccagtataagcaagtgcagtgtacaaagaagtatattctgaatacattatttccattcatttagcacaaataaatcatttggtttcactttgcagtggaacactgagtcactcttttcttaacacgtgcaacatcttaatttttgtttttcagcagttgctgttttgtactttggtagtgaagtgatttttaccacctgtgtttgcatatttatatatgctgtggatgaaaataacttactagagaatgtatattttatgacaagaatgtgtatctgttggatataatcagagaactgaaaagtaatttatcagtaatttttaagagtccatgttttgtgacaaccatctctaatagccaactctttattaaacacactcctaaaaataaggaaccatgacattgtagatatttaatattgtacagtatagaaacctccatttttgccttcgaatgcatatttaagagttaacagaatgaaaaaaaaaagtcttgttggataatagtgtttgactagcgttttaagaacttgagagtaaaagcaacaataagattttttcacctcttcctgcttccacccccaaactgagaacatcactcaattgtttggaagaaactgtaggtctatataaattttatttataatgtatgtgtaatatacataatcataatacagttctcagatgcagggaagaagtttggcatttaatcattgaggctttaggtttttgatgtgatcagactgggccatgtcaaacccggaattttcaccaacagttcactcaccctcctggtacattgccattccaaggaattctgagagtaggcaaacaaattttgccttcatggtacagttctcagtttttcttataggagaaatatggtatatgtttataagaatcttttatgagattatagatttcaatgctgtggatagtgtcttgcacccaaacaagaaagtccataatggaatgatcttccctcagcttcctatcgatttagttacctcttgaaagcacaaaaattaaaacattgccatatgttgaatttttaaaaagcacttggagtgagcgaacatttcctgataaatgccttttagagataggttcttgatattcagacatctgcagaaatgttctggttcccaaagtcatttcacttcgaaataaaacacagctccttcaaacagcactttttccacataaatctagttgcctctccctgtggacattcagaactgatagaacaaacactactcttttgaatttgatggttcgtgtcctttaaagtgtttgaggacctatgcagagcctgtaacacttgggtagtacctgctaggacaatttcttggcaattgtcttactactagggatcagtaagatttagattctgagcccataatggcaacagccccctcacctatgggaagctgacttccctcagtcgggcacttctcatgggggctgaacatggttcctgccattctgttacccactctcccaggtgagccctggattggctcccagaaggcctttgtaaaatcagtagccatcctgcaggcaggtgggagcaacaggggcttcagtagcttcattttcctgtcttgcagacagagacccttggctaccactgtgctgctaataggataagtactctgttgccagattaccatgccttttatacaaaaccaaattaacttacctaatacctgacattcttggtcagagtttagagagatgtaagactttcaattaatgtcttatttactcctttatgttgattagtctttgatacatgtgctgaatcagaaacctaaataaagataattttttaaaatgta

SEQ ID NO: 327386 - DNA, 4164 bp, Homo sapiens
gcttcagtcccgcgaccgaagcagggcgcgcagcagcgctgagtgccccggaacgtgcgtcgcgcccccagtgtccgtcgcgtccgccgcgccccgggcggggatggggcggccagactgagcgccgcacccgccatccagacccgccggccctagccgcagtccctccagccgtggccccagcgcgcacgggcgatggcgaaggcgacgtccggtgccgcggggctgcgtctgctgttgctgctgctgctgccgctgctaggcaaagtggcattgggcctctacttctcgagggatgcttactgggagaagctgtatgtggaccaggcggccggcacgcccttgctgtacgtccatgccctgcgggacgcccctgaggaggtgcccagcttccgcctgggccagcatctctacggcacgtaccgcacacggctgcatgagaacaactggatctgcatccaggaggacaccggcctcctctaccttaaccggagcctggaccatagctcctgggagaagctcagtgtccgcaaccgcggctttcccctgctcaccgtctacctcaaggtcttcctgtcacccacatcccttcgtgagggcgagtgccagtggccaggctgtgcccgcgtatacttctccttcttcaacacctcctttccagcctgcagctccctcaagccccgggagctctgcttcccagagacaaggccctccttccgcattcgggagaaccgacccccaggcaccttccaccagttccgcctgctgcctgtgcagttcttgtgccccaacatcagcgtggcctacaggctcctggagggtgagggtctgcccttccgctgcgccccggacagcctggaggtgagcacgcgctgggccctggaccgcgagcagcgggagaagtacgagctggtggccgtgtgcaccgtgcacgccggcgcgcgcgaggaggtggtgatggtgcccttcccggtgaccgtgtacgacgaggacgactcggcgcccaccttccccgcgggcgtcgacaccgccagcgccgtggtggagttcaagcggaaggaggacaccgtggtggccacgctgcgtgtcttcgatgcagacgtggtacctgcatcaggggagctggtgaggcggtacacaagcacgctgctccccggggacacctgggcccagcagaccttccgggtggaacactggcccaacgagacctcggtccaggccaacggcagcttcgtgcgggcgaccgtacatgactataggctggttctcaaccggaacctctccatctcggagaaccgcaccatgcagctggcggtgctggtcaatgactcagacttccagggcccaggagcgggcgtcctcttgctccacttcaacgtgtcggtgctgccggtcagcctgcacctgcccagtacctactccctctccgtgagcaggagggctcgccgatttgcccagatcgggaaagtctgtgtggaaaactgccaggcgttcagtggcatcaacgtccagtacaagctgcattcctctggtgccaactgcagcacgctaggggtggtcacctcagccgaggacacctcggggatcctgtttgtgaatgacaccaaggccctgcggcggcccaagtgtgccgaacttcactacatggtggtggccaccgaccagcagacctctaggcaggcccaggcccagctgcttgtaacagtggaggggtcatatgtggccgaggaggcgggctgccccctgtcctgtgcagtcagcaagagacggctggagtgtgaggagtgtggcggcctgggctccccaacaggcaggtgtgagtggaggcaaggagatggcaaagggatcaccaggaacttctccacctgctctcccagcaccaagacctgccccgacggccactgcgatgttgtggagacccaagacatcaacatttgccctcaggactgcctccggggcagcattgttgggggacacgagcctggggagccccgggggattaaagctggctatggcacctgcaactgcttccctgaggaggagaagtgcttctgcgagcccgaagacatccaggatccactgtgcgacgagctgtgccgcacggtgatcgcagccgctgtcctcttctccttcatcgtctcggtgctgctgtctgccttctgcatccactgctaccacaagtttgcccacaagccacccatctcctcagctgagatgaccttccggaggcccgcccaggccttcccggtcagctactcctcttccggtgcccgccggccctcgctggactccatggagaaccaggtctccgtggatgccttcaagatcctggaggatccaaagtgggaattccctcggaagaacttggttcttggaaaaactctaggagaaggcgaatttggaaaagtggtcaaggcaacggccttccatctgaaaggcagagcagggtacaccacggtggccgtgaagatgctgaaagagaacgcctccccgagtgagcttcgagacctgctgtcagagttcaacgtcctgaagcaggtcaaccacccacatgtcatcaaattgtatggggcctgcagccaggatggcccgctcctcctcatcgtggagtacgccaaatacggctccctgcggggcttcctccgcgagagccgcaaagtggggcctggctacctgggcagtggaggcagccgcaactccagctccctggaccacccggatgagcgggccctcaccatgggcgacctcatctcatttgcctggcagatctcacaggggatgcagtatctggccgagatgaagctcgttcatcgggacttggcagccagaaacatcctggtagctgaggggcggaagatgaagatttcggatttcggcttgtcccgagatgtttatgaagaggattcctacgtgaagaggagccagggtcggattccagttaaatggatggcaattgaatccctttttgatcatatctacaccacgcaaagtgatgtatggtcttttggtgtcctgctgtgggagatcgtgaccctagggggaaacccctatcctgggattcctcctgagcggctcttcaaccttctgaagaccggccaccggatggagaggccagacaactgcagcgaggagatgtaccgcctgatgctgcaatgctggaagcaggagccggacaaaaggccggtgtttgcggacatcagcaaagacctggagaagatgatggttaagaggagagactacttggaccttgcggcgtccactccatctgactccctgatttatgacgacggcctctcagaggaggagacaccgctggtggactgtaataatgcccccctccctcgagccctcccttccacatggattgaaaacaaactctatggtagaatttcccatgcatttactagattctagcaccgctgtcccctctgcactatccttcctctctgtgatgctttttaaaaatgtttctggtctgaacaaaaccaaagtctgctctgaacctttttatttgtaaatgtctgactttgcatccagtttacatttaggcattattgcaactatgtttttctaaaaggaagtgaaaataagtgtaattaccacattgcccagcaacttaggatggtagaggaaaaaacagatcagggcggaactctcaggggagaccaagaacaggttgaataaggcgcttctggggtgggaatcaagtcatagtacttctactttaactaagtggataaatatacaaatctggggaggtattcagttgagaaaggagccaccagcaccactcagcctgcactgggagcacagccaggttcccccagacccctcctgggcaggcaggtgcctctcagaggccacccggcactggcgagcagccactggccaagcctcagccccagtcccagccacatgtcctccatcaggggtagcgaggttgcaggagctggctggccctgggaggacgcacccccactgctgttttcacatcctttcccttacccaccttcaggacggttgtcacttatgaagtcagtgctaaagctggagcagttgctttttgaaagaacatggtctgtggtgctgtggtcttacaatggacagtaaatatggttcttgccaaaactccttcttttgtctttgattaaatactagaaattt

SEQ ID NO: 327387 - DNA, 5958 bp, Homo sapiens
caggccggcgccatggcctccgggagtgtggccgagtgcctgcagcaggagaccacctgccccgtgtgcctgcagtacttcgcagagcccatgatgctcgactgcggccataacatctgttgcgcgtgcctcgcccgctgctggggcacggcagagactaacgtgtcgtgcccgcagtgccgggagaccttcccgcagaggcacatgcggcccaaccggcacctggccaacgtgacccaactggtaaagcagctgcgcaccgagcggccgtcggggcccggcggcgagatgggcgtgtgcgagaagcaccgcgagcccctgaagctgtactgcgaggaggaccagatgcccatctgcgtggtgtgcgaccgctcccgcgagcaccgcggccacagcgtgctgccgctcgaggaggcggtggagggcttcaaggagcaaatccagaaccagctcgaccatttaaaaagagtgaaagatttaaagaagagacgtcgggcccagggggaacaggcacgagctgaactcttgagcctaacccagatggagagggagaagattgtttgggagtttgagcagctgtatcactccttaaaggagcatgagtatcgcctcctggcccgccttgaggagctagacttggccatctacaatagcatcaatggtgccatcacccagttctcttgcaacatctcccacctcagcagcctgatcgctcagctagaagagaagcagcagcagcccaccagggagctcctgcaggacattggggacacattgagcagggctgaaagaatcaggattcctgaaccttggatcacacctccagatttgcaagagaaaatccacatttttgccccaaaatgtctattcttgacggagagtctaaagcagttcacagaaaaaatgcagtcagatatggagaaaatccaagaattaagagaggctcagttatactcagggggcagcattgttgggggacacgagcctggggagccccgggggattaaagctggctatggcacctgcaactgcttccctgaggaggagaagtgcttctgcgagcccgaagacatccaggatccactgtgcgacgagctgtgccgcacggtgatcgcagccgctgtcctcttctccttcatcgtctcggtgctgctgtctgccttctgcatccactgctaccacaagtttgcccacaagccacccatctcctcagctgagatgaccttccggaggcccgcccaggccttcccggtcagctactcctcttccggtgcccgccggccctcgctggactccatggagaaccaggtctccgtggatgccttcaagatcctggaggatccaaagtgggaattccctcggaagaacttggttcttggaaaaactctaggagaaggcgaatttggaaaagtggtcaaggcaacggccttccatctgaaaggcagagcagggtacaccacggtggccgtgaagatgctgaaagagaacgcctccccgagtgagcttcgagacctgctgtcagagttcaacgtcctgaagcaggtcaaccacccacatgtcatcaaattgtatggggcctgcagccaggatggcccgctcctcctcatcgtggagtacgccaaatacggctccctgcggggcttcctccgcgagagccgcaaagtggggcctggctacctgggcagtggaggcagccgcaactccagctccctggaccacccggatgagcgggccctcaccatgggcgacctcatctcatttgcctggcagatctcacaggggatgcagtatctggccgagatgaagctcgttcatcgggacttggcagccagaaacatcctggtagctgaggggcggaagatgaagatttcggatttcggcttgtcccgagatgtttatgaagaggattcctacgtgaagaggagccagggtcggattccagttaaatggatggcaattgaatccctttttgatcatatctacaccacgcaaagtgatgtatggtcttttggtgtcctgctgtgggagatcgtgaccctagggggaaacccctatcctgggattcctcctgagcggctcttcaaccttctgaagaccggccaccggatggagaggccagacaactgcagcgaggagatgtaccgcctgatgctgcaatgctggaagcaggagccggacaaaaggccggtgtttgcggacatcagcaaagacctggagaagatgatggttaagaggagagactacttggaccttgcggcgtccactccatctgactccctgatttatgacgacggcctctcagaggaggagacaccgctggtggactgtaataatgcccccctccctcgagccctcccttccacatggattgaaaacaaactctatggtagaatttcccatgcatttactagattctagcaccgctgtcccctctgcactatccttcctctctgtgatgctttttaaaaatgtttctggtctgaacaaaaccaaagtctgctctgaacctttttatttgtaaatgtctgactttgcatccagtttacatttaggcattattgcaactatgtttttctaaaaggaagtgaaaataagtgtaattaccacattgcccagcaacttaggatggtagaggaaaaaacagatcagggcggaactctcaggggagaccaagaacaggttgaataaggcgcttctggggtgggaatcaagtcatagtacttctactttaactaagtggataaatatacaaatctggggaggtattcagttgagaaaggagccaccagcaccactcagcctgcactgggagcacagccaggttcccccagacccctcctgggcaggcaggtgcctctcagaggccacccggcactggcgagcagccactggccaagcctcagccccagtcccagccacatgtcctccatcaggggtagcgaggttgcaggagctggctggccctgggaggacgcacccccactgctgttttcacatcctttcccttacccaccttcaggacggttgtcacttatgaagtcagtgctaaagctggagcagttgctttttgaaagaacatggtctgtggtgctgtggtcttacaatggacagtaaatatggttcttgccaaaactccttcttttgtctttgattaaatactagaaattttttctgtttcctaacttcatcattgattgtttgaaatcttggagtttaagcatttttttcaagctgagacggttccttttgcatgcctcctgactcactgactcctcactggctttgtgtctagtgccacactccatttgtgctgacgatgctatgaggctggcccgtgtgcaccctcgatttggaaggtcctcttctccgttgtaggctcagacaacagacgagtgcctcctttacgttagagaatgttttatagaacgtttccgctgcagtaagccattgagtgcagcagtgtgctgttgccctacactgccttagaaaaagagttaagcagttcgacaaatatacatcagattagagagtctcaagttcataaaagtcaaaattggtagtgtctgttaagttacatttaccaagagagcacatgatatttcccctaactataacagtgtttttggaaacctggaacacaaaaccattaatataattggcacagaaaccacgagtttggtttgaacatcaaagggagttttgccaaggccttactgtctgcacttgaagttttggttcttcagtgcagaacaaatgatctgttttcatttttaggcatgtcagacccgaactggcctggagagagtcctgtaccactcacgagagctgatggcactaacactgggtttccaagatatccaaatgatagtgtatatgctaactggatgctttcaccctcagcggcaaaattaatggacacgtttgatagttaacatttctttgtgaaaggtaatggactcacaaggggaagaaacatgctgagaatggaaagtctaccggccctttctttgtgaacgtcacattggccgagccgtgttcagttcccaggtggcagactcgtttttggtagtttgttttaacttccaaggtggttttacttctgatagccggtgattttccctcctagcagacatgccacaccgggtaagagctctgagtcttagtggttaagcattcctttctcttcagtgcccagcagcacccagtgttggtctgtgtccatcagtgaccaccaacattctgtgttcacatgtgtgggtccaacacttactacctggtgtatgaaattggacctgaactgttggatttttctagttgccgccaaacaaggcaaaaaaatttaaacatgaagcacacacacaaaaaaggcagtaggaaaaatgctggccctgatgacctgtccttattcagaatgagagactgcggggggggcctgggctcagcattcgagatcttgagaatgatttttttttaatcatgcaacctttccttaggaagacatttggttttcatcatgattaagatgattcctagatttagcacaatggagagattccatgccatctttactatgtggatggtggtatcagggaagagggctcacaagacacatttgtcccccgggcccaccacatcatcctcacgtgttcggtactgagcagccactacccctgatgagaacagtatgaagaaagggggctgttggagtcccagaattgctgacagcagaggctttgctgctgtgaatcccacctgccaccagcctgcagcacaccccacagccaagtagaggcgaaagcagtggctcatcctacctgttaggagcaggtagggcttgtactcactttaatttgaatcttatcaacttactcataaagggacaggctagctagctgtgttagaagtagcaatgacaatgaccaaggactgctacacctctgattacaattctgatgtgaaaaagatggtgtttggctcttatagagcctgtgtgaaaggcccatggatcagctcttcctgtgtttgtaatttaatgctgctacaagatgtttctgtttcttagattctgaccatgactcataagcttcttgtcattcttcattgcttgtttgtggtcacagatgcacaacactcctccagtcttgtgggggcagcttttgggaagtctcagcagctcttctggctgtgttgtcagcactgtaacttcgcagaaaagagtcggattaccaaaacactgcctgctcttcagacttaaagcactgataggacttaaaatagtctcattcaaatactgtattttatataggcatttcacaaaaacagcaaaattgtggcattttgtgaggccaaggcttggatgcgtgtgtaatagagccttatggtgtgtgcgcacacacccagagggagagtttgaaaaatgcttattggacacgtaacctggctctaatttgggctgtttttcagatacactgtgataagttcttttacaaatatctatagacatggtaaacttttggttttcagatatgcttaatgatagtcttactaaatgcagaaataagaataaactttctcaaattattaaaaatgcctacacagtaagtgtgaattgctgcaacaggtttgttctcaggagggtaagaactccaggtctaaacagctgacccagtgatggggaatttatccttgaccaatttatccttgaccaataacctaattgtctattcctgagttataaaagtccccatccttattagctctactggaattttcatacacgtaaatgcagaagttactaagtattaagtattactgagtattaagtagtaatctgtcagttattaaaatttgtaaaatctatttatgaaaggtcattaaaccagatcatgttcctttttttgtaatcaaggtgactaagaaaatcagttgtgtaaataaaatcatgtatcataaaatgtg

SEQ ID NO: 327388 - DNA, 5340 bp, Homo sapiens
cagagaaccatggagtctggcagtaccgccgccagtgaggaggcacgcagccttcgagaatgtgagctctacgtccagaagcataacattcaagcactgctcaaagattctattgtgcagttgtgcactgctcgacctgagagacccatggcattcctcagggaatactttgagaggttggagaaggaggaggcaaaacagattcagaatctgcagaaagcaggcactcgtacagactcaagggaggatgagatttctcctcctccacccaacccagtggttaaaggtaggaggcgacgaggtgctatcagcgctgaggtctacacggaggaagatgcggcatcctatgttagaaaggttataccaaaagattacaagacaatggccgctttagccaaagccattgaaaagaatgtgctgttttcacatcttgatgataatgagagaagtgatatttttgatgccatgttttcggtctcctttatcgcaggagagactgtgattcagcaaggtgatgaaggggataacttctatgtgattgatcaaggagagacggatgtctatgttaacaatgaatgggcaaccagtgttggggaaggagggagctttggagaacttgctttgatttatggaacaccgagagcagccactgtcaaagcaaagacaaatgtgaaattgtggggcatcgaccgagacagctatagaagaatcctcatggaggatccaaagtgggaattccctcggaagaacttggttcttggaaaaactctaggagaaggcgaatttggaaaagtggtcaaggcaacggccttccatctgaaaggcagagcagggtacaccacggtggccgtgaagatgctgaaagagaacgcctccccgagtgagcttcgagacctgctgtcagagttcaacgtcctgaagcaggtcaaccacccacatgtcatcaaattgtatggggcctgcagccaggatggcccgctcctcctcatcgtggagtacgccaaatacggctccctgcggggcttcctccgcgagagccgcaaagtggggcctggctacctgggcagtggaggcagccgcaactccagctccctggaccacccggatgagcgggccctcaccatgggcgacctcatctcatttgcctggcagatctcacaggggatgcagtatctggccgagatgaagctcgttcatcgggacttggcagccagaaacatcctggtagctgaggggcggaagatgaagatttcggatttcggcttgtcccgagatgtttatgaagaggattcctacgtgaagaggagccagggtcggattccagttaaatggatggcaattgaatccctttttgatcatatctacaccacgcaaagtgatgtatggtcttttggtgtcctgctgtgggagatcgtgaccctagggggaaacccctatcctgggattcctcctgagcggctcttcaaccttctgaagaccggccaccggatggagaggccagacaactgcagcgaggagatgtaccgcctgatgctgcaatgctggaagcaggagccggacaaaaggccggtgtttgcggacatcagcaaagacctggagaagatgatggttaagaggagagactacttggaccttgcggcgtccactccatctgactccctgatttatgacgacggcctctcagaggaggagacaccgctggtggactgtaataatgcccccctccctcgagccctcccttccacatggattgaaaacaaactctatggtagaatttcccatgcatttactagattctagcaccgctgtcccctctgcactatccttcctctctgtgatgctttttaaaaatgtttctggtctgaacaaaaccaaagtctgctctgaacctttttatttgtaaatgtctgactttgcatccagtttacatttaggcattattgcaactatgtttttctaaaaggaagtgaaaataagtgtaattaccacattgcccagcaacttaggatggtagaggaaaaaacagatcagggcggaactctcaggggagaccaagaacaggttgaataaggcgcttctggggtgggaatcaagtcatagtacttctactttaactaagtggataaatatacaaatctggggaggtattcagttgagaaaggagccaccagcaccactcagcctgcactgggagcacagccaggttcccccagacccctcctgggcaggcaggtgcctctcagaggccacccggcactggcgagcagccactggccaagcctcagccccagtcccagccacatgtcctccatcaggggtagcgaggttgcaggagctggctggccctgggaggacgcacccccactgctgttttcacatcctttcccttacccaccttcaggacggttgtcacttatgaagtcagtgctaaagctggagcagttgctttttgaaagaacatggtctgtggtgctgtggtcttacaatggacagtaaatatggttcttgccaaaactccttcttttgtctttgattaaatactagaaattttttctgtttcctaacttcatcattgattgtttgaaatcttggagtttaagcatttttttcaagctgagacggttccttttgcatgcctcctgactcactgactcctcactggctttgtgtctagtgccacactccatttgtgctgacgatgctatgaggctggcccgtgtgcaccctcgatttggaaggtcctcttctccgttgtaggctcagacaacagacgagtgcctcctttacgttagagaatgttttatagaacgtttccgctgcagtaagccattgagtgcagcagtgtgctgttgccctacactgccttagaaaaagagttaagcagttcgacaaatatacatcagattagagagtctcaagttcataaaagtcaaaattggtagtgtctgttaagttacatttaccaagagagcacatgatatttcccctaactataacagtgtttttggaaacctggaacacaaaaccattaatataattggcacagaaaccacgagtttggtttgaacatcaaagggagttttgccaaggccttactgtctgcacttgaagttttggttcttcagtgcagaacaaatgatctgttttcatttttaggcatgtcagacccgaactggcctggagagagtcctgtaccactcacgagagctgatggcactaacactgggtttccaagatatccaaatgatagtgtatatgctaactggatgctttcaccctcagcggcaaaattaatggacacgtttgatagttaacatttctttgtgaaaggtaatggactcacaaggggaagaaacatgctgagaatggaaagtctaccggccctttctttgtgaacgtcacattggccgagccgtgttcagttcccaggtggcagactcgtttttggtagtttgttttaacttccaaggtggttttacttctgatagccggtgattttccctcctagcagacatgccacaccgggtaagagctctgagtcttagtggttaagcattcctttctcttcagtgcccagcagcacccagtgttggtctgtgtccatcagtgaccaccaacattctgtgttcacatgtgtgggtccaacacttactacctggtgtatgaaattggacctgaactgttggatttttctagttgccgccaaacaaggcaaaaaaatttaaacatgaagcacacacacaaaaaaggcagtaggaaaaatgctggccctgatgacctgtccttattcagaatgagagactgcggggggggcctgggctcagcattcgagatcttgagaatgatttttttttaatcatgcaacctttccttaggaagacatttggttttcatcatgattaagatgattcctagatttagcacaatggagagattccatgccatctttactatgtggatggtggtatcagggaagagggctcacaagacacatttgtcccccgggcccaccacatcatcctcacgtgttcggtactgagcagccactacccctgatgagaacagtatgaagaaagggggctgttggagtcccagaattgctgacagcagaggctttgctgctgtgaatcccacctgccaccagcctgcagcacaccccacagccaagtagaggcgaaagcagtggctcatcctacctgttaggagcaggtagggcttgtactcactttaatttgaatcttatcaacttactcataaagggacaggctagctagctgtgttagaagtagcaatgacaatgaccaaggactgctacacctctgattacaattctgatgtgaaaaagatggtgtttggctcttatagagcctgtgtgaaaggcccatggatcagctcttcctgtgtttgtaatttaatgctgctacaagatgtttctgtttcttagattctgaccatgactcataagcttcttgtcattcttcattgcttgtttgtggtcacagatgcacaacactcctccagtcttgtgggggcagcttttgggaagtctcagcagctcttctggctgtgttgtcagcactgtaacttcgcagaaaagagtcggattaccaaaacactgcctgctcttcagacttaaagcactgataggacttaaaatagtctcattcaaatactgtattttatataggcatttcacaaaaacagcaaaattgtggcattttgtgaggccaaggcttggatgcgtgtgtaatagagccttatggtgtgtgcgcacacacccagagggagagtttgaaaaatgcttattggacacgtaacctggctctaatttgggctgtttttcagatacactgtgataagttcttttacaaatatctatagacatggtaaacttttggttttcagatatgcttaatgatagtcttactaaatgcagaaataagaataaactttctcaaattattaaaaatgcctacacagtaagtgtgaattgctgcaacaggtttgttctcaggagggtaagaactccaggtctaaacagctgacccagtgatggggaatttatccttgaccaatttatccttgaccaataacctaattgtctattcctgagttataaaagtccccatccttattagctctactggaattttcatacacgtaaatgcagaagttactaagtattaagtattactgagtattaagtagtaatctgtcagttattaaaatttgtaaaatctatttatgaaaggtcattaaaccagatcatgttcctttttttgtaatcaaggtgactaagaaaatcagttgtgtaaataaaatcatgtatcataaaatgtg

SEQ ID NO: 327389 - DNA, 3085 bp, Homo sapiens
gcttcagtcccgcgaccgaagcagggcgcgcagcagcgctgagtgccccggaacgtgcgtcgcgcccccagtgtccgtcgcgtccgccgcgccccgggcggggatggggcggccagactgagcgccgcacccgccatccagacccgccggccctagccgcagtccctccagccgtggccccagcgcgcacgggcgatggcgaaggcgacgtccggtgccgcggggctgcgtctgctgttgctgctgctgctgccgctgctaggcaaagtggcattgggcctctacttctcgagggatgcttactgggagaagctgtatgtggaccaggcggccggcacgcccttgctgtacgtccatgccctgcgggacgcccctgaggaggtgcccagcttccgcctgggccagcatctctacggcacgtaccgcacacggctgcatgagaacaactggatctgcatccaggaggacaccggcctcctctaccttaaccggagcctggaccatagctcctgggagaagctcagtgtccgcaaccgcggctttcccctgctcaccgtctacctcaaggtcttcctgtcacccacatcccttcgtgagggcgagtgccagtggccaggctgtgcccgcgtatacttctccttcttcaacacctcctttccagcctgcagctccctcaagccccgggagctctgcttcccagagacaaggccctccttccgcattcgggagaaccgacccccaggcaccttccaccagttccgcctgctgcctgtgcagttcttgtgccccaacatcagcgtggcctacaggctcctggagggtgagggtctgcccttccgctgcgccccggacagcctggaggtgagcacgcgctgggccctggaccgcgagcagcgggagaagtacgagctggtggccgtgtgcaccgtgcacgccggcgcgcgcgaggaggtggtgatggtgcccttcccggtgaccgtgtacgacgaggacgactcggcgcccaccttccccgcgggcgtcgacaccgccagcgccgtggtggagttcaagcggaaggaggacaccgtggtggccacgctgcgtgtcttcgatgcagacgtggtacctgcatcaggggagctggtgaggcggtacacaagcacgctgctccccggggacacctgggcccagcagaccttccgggtggaacactggcccaacgagacctcggtccaggccaacggcagcttcgtgcgggcgaccgtacatgactataggctggttctcaaccggaacctctccatctcggagaaccgcaccatgcagctggcggtgctggtcaatgactcagacttccagggcccaggagcgggcgtcctcttgctccacttcaacgtgtcggtgctgccggtcagcctgcacctgcccagtacctactccctctccgtgagcaggagggctcgccgatttgcccagatcgggaaagtctgtgtggaaaactgccaggcgttcagtggcatcaacgtccagtacaagctgcattcctctggtgccaactgcagcacgctaggggtggtcacctcagccgaggacacctcggggatcctgtttgtgaatgacaccaaggccctgcggcggcccaagtgtgccgaacttcactacatggtggtggccaccgaccagcagacctctaggcaggcccaggcccagctgcttgtaacagtggaggggtcatatgtggccgaggaggcgggctgccccctgtcctgtgcagtcagcaagagacggctggagtgtgaggagtgtggcggcctgggctccccaacaggcaggtgtgagtggaggcaaggagatggcaaagggatcaccaggaacttctccacctgctctcccagcaccaagacctgccccgacggccactgcgatgttgtggagacccaagacatcaacatttgccctcaggactgcctccggggcagcattgttgggggacacgagcctggggagccccgggggattaaagctggctatggcacctgcaactgcttccctgaggaggagaagtgcttctgcgagcccgaagacatccaggatccactgtgcgacgagctgtgccgcacggtgatcgcagccgctgtcctcttctccttcatcgtctcggtgctgctgtctgccttctgcatccactgctaccacaagtttgcccacaagccacccatctcctcagctgagatgaccttccggaggcccgcccaggccttcccggtcagctactcctcttccggtgcccgccggccctcgctggactccatggagaaccaggtctccgtggatgccttcaagatcctggaggatccaaagtgggaattccctcggaagaacttggttcttggaaaaactctaggagaaggcgaatttggaaaagtggtcaaggcaacggccttccatctgaaaggcagagcagggtacaccacggtggccgtgaagatgctgaaagagaacgcctccccgagtgagcttcgagacctgctgtcagagttcaacgtcctgaagcaggtcaaccacccacatgtcatcaaattgtatggggcctgcagccaggatggcccgctcctcctcatcgtggagtacgccaaatacggctccctgcggggcttcctccgcgagagccgcaaagtggggcctggctacctgggcagtggaggcagccgcaactccagctccctggaccacccggatgagcgggccctcaccatgggcgacctcatctcatttgcctggcagatctcacaggggatgcagtatctggccgagatgaagctcgttcatcgggacttggcagccagaaacatcctggtagctgaggggcggaagatgaagatttcggatttcggcttgtcccgagatgtttatgaagaggattcctacgtgaagaggagccaggttcggatcccgtttcactggtggcattgactcctttgaccattttatccacgcaagtgttgttggtctttggccctgcgggggaatccggccctggggaacccatctggattccctgggggtcccttagacgccggtggggcgccactgcggtttcccg

SEQ ID NO: 327390 - DNA, 247 bp, Homo sapiens
atcattctttatttttttgtctataaatcttcttccaccacgtggctgcgctggagtctctgtgaatctgctgtgattctgggcctgcccaatttgcaaatcgttcattgctcaattaaactcctttaaatgtaattcggctgaagtttttattttatcacaaggcttagtgtttcccaatccacagatgtctctgttgttgtactgctgaaatttgcagttaaagttgagaaaatttgttaaatat

SEQ ID NO: 327391 - DNA, 496 bp, Homo sapiens
ccttcccaatgttcctagtgcttgtttctgagaaatggctcattcagtggccggttcaaagcattcttgctgcttaaattaagctcttaggtgacctcaactcttcttctagaagagtgtcacatttgtctttcatgaactttccatgaagatacagttggagaaaccaaaagaatagaaggaggggcctcaccaagcttacaggacaggatgtatgattgtttttattcctgcttactaatcaaacttggattgtgagggtgaatcgaacccgagaccaagtgttgaggctgtgaggatggtttctttatcctcacccacctccaaattctggagtttttaacatccactgagagggacctggtagatatgaaggaccaggttagctgaggttggtttttagcatggcagggatgggacagaagagtttggggaaggttcctcaagcatccatcacggaagggacaagaagggagagagagtggatgccagggac

SEQ ID NO: 327392 - DNA, 117 bp, Homo sapiens
agtgctggataaaaggctgactttgaaactgctctacagagacctaattttcttgctgtttttaaagacaaaggcatcctcacatctggcacggaggtagacctgagcaagccaggg

SEQ ID NO: 327393 - DNA, 421 bp, Homo sapiens
tcacagccaagcggatgcaagagctcaaccagcacgtggcttccatcccacacagggcctccgcacgcacagctcgagagggcaccatcccgtcaaagctcaacagaacagcgcctcctggagtggggcagtgaacagcctgcccagcaaacaacgacagaagcataagcaatggccacatccccacatcttttctctaccttcatgttccccctttcggcattaagacgttagatacttggccaggtgtggtggctcatgcctgtaatcccagcactttgggaggccgaggctggcagatcacaaccaggatggagatcaagaccatcctgactaacacggtgaaacctcatctctactaaaaatacaaaaaattagccaggagtggtggcaggtgcctgtagtcccagctactcgggag

SEQ ID NO: 327394 - DNA, 402 bp, Homo sapiens
ttccctttcatgtgatgaactataccacagaaaagaaactggagagagtaaaaaaaatttgacaacaaaaggttttcatctactgctgattcagcactgacataaggaggaagaatcctcaggaggcacttgcttcatcaatttagtcaaaactgcaacctgtcaaaataattcattagtgaagaaaatttgtttctctcagctaccttctccaagggaaatcacaatatggaaagtgttactaccttttaaacttgttctaaaatcttccaaaagttactgattggaactctctagtttcaaatcgattatctcaaacagaaactcctcacaatagtcttaatttcagttaattttctttctatggagaaatcctgcaataatttcaaagccatcctttta

SEQ ID NO: 327395 - DNA, 438 bp, Homo sapiens
catcatgtcagcattaagagtcttagataagttaacaaggtacattctttctaatatctttcaagtctaacatgtattgactgcatactatgtgttccactgttctaattatcatctttaattctcaaaactattgaggcaggtgctattattattgaaatataaatgagaaaatggagatatagagatcatagagctactaagtagcatgttaaaattaggatctagagcttgtcctcttaactattaggcgatgctctgtctcagtgagtgacacatcttgtatatcatggagatattttgttaaatgattttattatttgtaaaacacacattatgtctaaccattatttcactagtaattattttagaaggattaaattatacttattctcttgggacaataatttaaaaatttcaaatttaggttggtaaagt

SEQ ID NO: 327396 - DNA, 971 bp, Homo sapiens
caggctccaatggggcggggcttctctccgcgggtgggactcttccctgggaaccgccctcctgattaaggcgtggcttctgcaggaatcccggctccagagcaggaaattcagcccaccagccacctcatccccaaccccctgtaaggttccatccacccctgcgtcgagctgggaaggttccatgaagcgagtcgggtccccaacccgtgcccctgggatccgagggcccctctccaagcgcctggctttggaatgctccaggcgcgccgacgcctgtgccaccccttcctcagcctggggtttgaccacccacctgaccaggggccctacctggggaaagcctgaagggcctcccagcccccaaccccaagaccaagcttagtcctgggagaggacagggacttcgcagaggcaagcgaccgaggccctcccaaagaggcccgccctgcccgggctcccacaccgtcaggtactcctgccagggaactggcctgctgcgccccaggccccgcccgtctctgctctgctcagctgcgcccccttctttgcagctgccagcccctcctccctgccctcgggtctccccacctgcactccatccagctacaggagagatagaagcctctcgtcccgtccctccctttcctccgcctgtccacagccccttaagggaaaggtaggaagagaggtccagccccccaggctgcccagagctgctggtctcatttgggggcgttcgggaggtttggggggcatcaaccccccgactgtgctgctcgcgaaggtcccacagccctgagatgggccggcccccttcctggcccctcatggcgggactggagaaatggtccgctttcctggagccaatggcccggcccctcctgactcatccgcctggcccgggaatgaatggggaggccgctgaacccacccggcccatatccctggttgcctcatggccagcgccc

SEQ ID NO: 327397 - DNA, 427 bp, Homo sapiens
gaaaggaagatcatagactcttgttttaatgaacttgatcaccatcagctacattagagcgaaaaatttaaaatttaaaactctactaatatattctgagggttcattcttggcttgtctttgaaagaaattgaactaaagcaactatatgactgtattgtattatgttggagtctttatatttcacctttaccccttctttcctcttcaaagcaactaattttagcagttcatagacatccagatagtacttctttaaaagaaaagggccaggcgtggtggcttacgcttgtaatcccagcactttgggagactgaggccagtggatcacctgaggagttcaagaccagcctggtccaacatggtgaaaccccccctctactaaaaatacaaaaattagccgggcatggtggccggtgcctgtaat

SEQ ID NO: 327398 - DNA, 240 bp, Homo sapiens
tctcagcaaaaaagtaaggcctccgccgcacaaaaaataagaaagacagagaaaccaccttccaagcgactttgcggcagaagcgttggggccgctccgtataggttccacgcacagggccaaccgccctcggggacttactaacaaaatgagccacttgcattcaatgatctcaactgctccgtgctacatccaattcagtaaagcacagttttttcatttttcacattcagattgaag

SEQ ID NO: 327399 - DNA, 447 bp, Homo sapiens
tatagagatgcatccccaaccccatctacaaaagcgagaacgatgccagaaacaatactatgcactgaaatctctcagtgatctaaataactcaggtccaaagaccaagaacattcttcatgctgcattaaagtgacattgctcttggtattattaaaacacttataagtggccatgctgaaacccaattctctgtaccactgaaaactcaataccataaatcccaatggttttatctggactttaaaaaataaacttgaggtgcctatctaccaactcccgaaacagcattccagactattaagcactgccctctgctttattttttaaaaatgcattattcaaattcaaataaaagaaacaagaacttgagttcctccttaggagtaaaggctaggcaagctatttccatctagaggtgactaccatgacatcttggtttatgtg

SEQ ID NO: 327400 - DNA, 364 bp, Homo sapiens
tcatcaaagacactgttaaagccacattctaagggaaaatatggtcaagaactcatgtctagaacatgtaagaacttcaacagcttacatattttttaaaatctaatttacaagtagataaagatttgaatagaaacttcacaaaaagatacataagcagctaatgagcacatgaaagagtgtttaacatcctccaacctcagcctcccaggttcaagcgattctcctgcctcagcctcccaagtagctgggagtacaggcagctaccaccaggcccggctaattttggtatttttagttgagacagggtttcaccatgttggccaggctggtctcgaaatcttgacgtcagttgattcaccca

SEQ ID NO: 327401 - DNA, 507 bp, Homo sapiens
atgctttattttatgcttaaaataaaacatatcacatagtagcattgtaacttttattttaataatgatgatgtgagattgggtttatttccacaaatatcctgatattttcattcacctaaaaaattccaaaacatttcagttttagataaagcaatgttataagttttcatcacccagcaggtctatgtattatgaatacattgagcaatgacccaaccctcagctttgttggaatggcacttgtctcatgagtaggcattattttgaattttcccgaaaattttatttgcatgtcccttttaattttttttcttttttctttttcctgttttttgagatggagtctctctctgtcacccaggctggagtgcaatggtgtgatctcagctcactgcaacctctgcctcccgaatctcctgcctcagctggattacagcatagatgctggctcctagggtgggcagattctggtcctgcaccaaccctgactggtgaccttcttgt

SEQ ID NO: 327402 - DNA, 4216 bp, Homo sapiens
  misc_feature (4213)..(4216): n is a, c, g, or t
atgtgtatatatatatatgcaaatgtttgcagtatatttcaaaaattgaaacgattttatgtctcccaggggaaagagtggtggcctttgctgctgtagaaggagttttcttctcaggatcttttgctgctatattctggctaaagaagagaggtcttatgccaggactcactttttccaatgaactcatcagcagagatgaaggacttcactgtgactttgcttgcctgatgttccaatacttagtaaataagccttcagaagaaagggtcagggagatcattgttgatgctgtcaaaattgagcaggagtttttaacagaagccttgccagttggcctcattggaatgaattgcattttgatgaaacagtacattgagtttgtagctgacagattacttgtggaacttggattctcaaaggtttttcaggcagaaaatccttttgattttatggaaaacatttctttagaaggaaaaacaaatttctttgagaaacgagtttcagagtatcagcgttttgcagttatggcagaaaccacagataacgtcttcaccttggatgcagatttttaaaaaacctctcgttttaaaactctataaacttgtcattggtaaatagtagtctattttcctctgcttaaaaaaaattttaagtatatcctttaaaggactgggggtttgctcaaaaggaaatccaaaacctattctaaacaatttgcatttatataattttcctgtttaacaacaagagtgtgacctaaatgcttttgtcttgtcactgaaataaaagatggcattatgtggttaagagcatggggcgaggggtcagacatgagtctaaggttctgcccttactccagtgtgtgacccttggcaagtcagttaatcttggtaaacctcggtgtacttatctttaaaatgggagtaatagtaggtcctaaattcatagagtggatattaggattaggatgcaaaaataaatgcttaaccaacactactactgttagcaccactactaattatcattcattgataatattaattgcaatgatgttgtaataaaatactctcatttccttaaaataattgtgattctaggtcctaggatctagaattagatctttgtatttttaatgcttaggggaagaatataagtatctccttaaaaagaacataattctcattcacgcaagaataagttctttgaattccttagtatgtagtgaagaaaatttagttgttagttgctttgggaagcctacttatggagtggaaaccaggaggttatcatggtagttgaccttataagaaaaatgattcttcttcagaaattaaaaacataactattgccagatttagctctggaatgtttagaatcaggctagaatagcattttccaaagaatattctaagagctattagctcctctagatatttttttgggggaaaaaggggattctgtggtcagatgagtttgggaaatgctgaacacttcattcttctttagcaagtacagtcagtacatcaaagactgagcagttcagtggtacataaatttatctcgccctgcatattcccaacatacttaacacagatgttttttacctgttaacatctcacccagctagtgttcctcagaacaaagattggaaaaagctggccgagaaccatttatacatagaggaagggcttatggactgagaaagggagaacatggtagggattattgaatcatttcaaatttataccagcctgaatagtgtaccagcaattgacttaggctgtgtttctttatggttttaaaactcttgagctgttataagagatagttcttttaatgtgactatgcaacatgatagccaatggtgagggaaaaggaggtttctctagaagagtctgatgaaaggccgggaaccaaggtttttgagaagtctgcccctatttatttttagtaagtatcaagaggtagcctgagcctagttagagttagacctgtctttggatgaagaagtcttaatactgaaatactgaatttttaatacattattatttggtattctgtataccccttcaagcagttgtttcccattcccaacaaactgtactttatacaattctggatgctaaaacttagagattttctctttgcataaattttggctccattctttccataacaatctaatcaaaactgggagttctcaagtgaatgcaaaaggagcaggccataactttatttgttagatacactgtcagaaacttgagatcttttggcctatgataataccattaatttttgcattgcttcagtttgccaagtgtttttacatcatctcatttgatctcaaaacagcttgacagagcaactgttattgaaatattacagatggaaagaatgaggctcagggaagttaaatgacttggccaagatctgctcatcgtcactgtctgtacagtatttttttttagaggttgtaatgtctcagatttagtcctttaccatctatgttgatttgcttttgtctatttcctcattaattgaatatactttaaatatatatattaaagtatcaaaatatagagagacatttgaactgtattcaggtaatatgtttaaagatatttatatattgccatacaaaaacttaacatttaaaactgataatatctgtaatgacatcagaatgaaagaaaaaaaattgtacagtgtatattcctttgttttgaatccaaatctttttcataggtaatgacagatgccttaatgtgaagcttatttataatagcaataaacctaactggatttggatgaagaagtcttaatactgacatactggatttttaatgcactggtttgttatttggtattctatctctttttccaggcctccaggttgcacatttatttattatgttcaatactttggttcttagttcttaaagaatcaagaagttgtgtaatcttttaaaaatattatcttgcagataaagaaaaaaattaagagtgtgtttacaactgttttctcttttttacagtacatgtatttaaatcattgctataataaagttaagttcattaggaatataaaaacttgcagttctatgatagattgcatttattaaaaatgtttcattgtatcacatagaaatatggccaggaaggacttgagaagacagtttgatccattgcttttagacaggactgggttttgctgtccaattatatacaataatagtttttcttacaactaagctggccccagccttgtcttgatattaatacatgaaatttttataattgtctcattgtctcatttagaaacatccatatttttctgctttttctattgccattttttatttgtgcatgaattgattattgagaaaatgtagcagtttgcatatttaaaaattaatcattttgcattttacatttaaatatgctaacatcactgtcatagaattcccaaatttcatttgtagatactgaactaagggctaatgtcaggagctgatttttaatgataaagctgcagatgggctaaataaaagccaaattaatcctacaatcaggtattatgtttttaaaccaagttgagtgaattggtagtggacttgggaaatcttccccagcagaatctggatgaatggcacagaattgaaatctctttgtttcccaccatttccctttaagtgctctgctcctttgtaaaaagttaaagatttgaaagagaatctcatattcccgaggcattaggaagaaaggatttaatcccttcaatttggggcttaatcttgtttaaaaaaatgtaagtgaagatggaaggctggagagaatgattgctttttgtacagttaaataaggtcacaatattcttacatactttgttttacaactgtgttttcattttttcaaatgtctggccatttagcaaagttatttactatttactgtgtacatagaaagctttattatgtgtggtgtatctaaattttttttgctgaaatacattatggtcaatcaagccaagcctgcatgtacagaatttgtttttttttcaaataaattagttgttttcttatttttttggcttagtatgttgaaataaactatggtatcttcatcattttgtacatttcctttttgaggaaggtttctttataagtgcaagggctaccctaataaaggaatgtatatacttacaaaaaannnn

SEQ ID NO: 327403 - DNA, 4887 bp, Homo sapiens
  misc_feature (4884)..(4887): n is a, c, g, or t
ggctggccgaagttaggcggagccccgaggcgggggaggcggggccgggccggcgcagggagagtcactcaatggacaggcgagaaagcaggaccggcgcggcggggcggggccggccgagtccctagagctgggggcggggcggacccagcggaccagcggaccacctgggtgctgtcgtagttggaggtggcctgaggagctcagttccctcagcgcccgtagcttcggcggagtctgcgcgatgggcgacccggaaaggccggaagcggccgggctggatcaggatgagagatcatcttcagacaccaacgaaagtgaaataaagtcaaatgaagagccactcctaagaaagagttctcgccggtttgtcatctttccaatccagtaccctgatatttggaaaatgtataaacaggcacaggcttccttctggacagcagaagaggtcgacttatcaaaggatctccctcactggaacaagcttaaagcagatgagaagtacttcatctctcacatcttagccttttttgcagccagtgatggaattgtaaatgaaaatttggtggagcgctttagtcaggaggtgcaggttccagaggctcgctgtttctatggctttcaaattctcatcgagaatgttcactcagagatgtacagtttgctgatagacacttacatcagagatcccaagaaaagggaatttttatttaatgcaattgaaaccatgccctatgttaagaaaaaagcagattgggccttgcgatggatagcagatagaaaatctacttttggggaaagagtggtggcctttgctgctgtagaaggagttttcttctcaggatcttttgctgctatattctggctaaagaagagaggtcttatgccaggactcactttttccaatgaactcatcagcagagatgaaggacttcactgtgactttgcttgcctgatgttccaatacttagtaaataagccttcagaagaaagggtcagggagatcattgttgatgctgtcaaaattgagcaggagtttttaacagaagccttgccagttggcctcattggaatgaattgcattttgatgaaacagtacattgagtttgtagctgacagattacttgtggaacttggattctcaaaggtttttcaggcagaaaatccttttgattttatggaaaacatttctttagaaggaaaaacaaatttctttgagaaacgagtttcagagtatcagcgttttgcagttatggcagaaaccacagataacgtcttcaccttggatgcagatttttaaaaaacctctcgttttaaaactctataaacttgtcattggtaaatagtagtctattttcctctgcttaaaaaaaattttaagtatatcctttaaaggactgggggtttgctcaaaaggaaatccaaaacctattctaaacaatttgcatttatataattttcctgtttaacaacaagagtgtgacctaaatgcttttgtcttgtcactgaaataaaagatggcattatgtggttaagagcatggggcgaggggtcagacatgagtctaaggttctgcccttactccagtgtgtgacccttggcaagtcagttaatcttggtaaacctcggtgtacttatctttaaaatgggagtaatagtaggtcctaaattcatagagtggatattaggattaggatgcaaaaataaatgcttaaccaacactactactgttagcaccactactaattatcattcattgataatattaattgcaatgatgttgtaataaaatactctcatttccttaaaataattgtgattctaggtcctaggatctagaattagatctttgtatttttaatgcttaggggaagaatataagtatctccttaaaaagaacataattctcattcacgcaagaataagttctttgaattccttagtatgtagtgaagaaaatttagttgttagttgctttgggaagcctacttatggagtggaaaccaggaggttatcatggtagttgaccttataagaaaaatgattcttcttcagaaattaaaaacataactattgccagatttagctctggaatgtttagaatcaggctagaatagcattttccaaagaatattctaagagctattagctcctctagatatttttttgggggaaaaaggggattctgtggtcagatgagtttgggaaatgctgaacacttcattcttctttagcaagtacagtcagtacatcaaagactgagcagttcagtggtacataaatttatctcgccctgcatattcccaacatacttaacacagatgttttttacctgttaacatctcacccagctagtgttcctcagaacaaagattggaaaaagctggccgagaaccatttatacatagaggaagggcttatggactgagaaagggagaacatggtagggattattgaatcatttcaaatttataccagcctgaatagtgtaccagcaattgacttaggctgtgtttctttatggttttaaaactcttgagctgttataagagatagttcttttaatgtgactatgcaacatgatagccaatggtgagggaaaaggaggtttctctagaagagtctgatgaaaggccgggaaccaaggtttttgagaagtctgcccctatttatttttagtaagtatcaagaggtagcctgagcctagttagagttagacctgtctttggatgaagaagtcttaatactgaaatactgaatttttaatacattattatttggtattctgtataccccttcaagcagttgtttcccattcccaacaaactgtactttatacaattctggatgctaaaacttagagattttctctttgcataaattttggctccattctttccataacaatctaatcaaaactgggagttctcaagtgaatatcttttggcctatgataataccattaatttttgcattgcttcagtttgccaagtgtttttacatcatctcatttgatctcaaaacagcttgacagagcaactgttattgaaatattacagatggaaagaatgaggctcagggaagttaaatgacttggccaagatctgctcatcgtcactgtctgtacagtatttttttttagaggttgtaatgtctcagatttagtcctttaccatctatgttgatttgcttttgtctatttcctcattaattgaatatactttaaatatatatattaaagtatcaaaatatagagagacatttgaactgtattcaggtaatatgtttaaagatatttatatattgccatacaaaaacttaacatttaaaactgataatatctgtaatgacatcagaatgaaagaaaaaaaattgtacagtgtatattcctttgttttgaatccaaatctttttcataggtaatgacagatgccttaatgtgaagcttatttataatagcaataaacctaactggatttggatgaagaagtcttaatactgacatactggatttttaatgcactggtttgttatttggtattctatctctttttccaggcctccaggttgcacatttatttattatgttcaatactttggttcttagttcttaaagaatcaagaagttgtgtaatcttttaaaaatattatcttgcagataaagaaaaaaattaagagtgtgtttacaactgttttctcttttttacagtacatgtatttaaatcattgctataataaagttaagttcattaggaatataaaaacttgcagttctatgatagattgcatttattaaaaatgtttcattgtatcacatagaaatatggccaggaaggacttgagaagacagtttgatccattgcttttagacaggactgggttttgctgtccaattatatacaataatagtttttcttacaactaagctggccccagccttgtcttgatattaatacatgaaatttttataattgtctcattgtctcatttagaaacatccatatttttctgctttttctattgccattttttatttgtgcatgaattgattattgagaaaatgtagcagtttgcatatttaaaaattaatcattttgcattttacatttaaatatgctaacatcactgtcatagaattcccaaatttcatttgtagatactgaactaagggctaatgtcaggagctgatttttaatgataaagctgcagatgggctaaataaaagccaaattaatcctacaatcaggtattatgtttttaaaccaagttgagtgaattggtagtggacttgggaaatcttccccagcagaatctggatgaatggcacagaattgaaatctctttgtttcccaccatttccctttaagtgctctgctcctttgtaaaaagttaaagatttgaaagagaatctcatattcccgaggcattaggaagaaaggatttaatcccttcaatttggggcttaatcttgtttaaaaaaatgtaagtgaagatggaaggctggagagaatgattgctttttgtacagttaaataaggtcacaatattcttacatactttgttttacaactgtgttttcattttttcaaatgtctggccatttagcaaagttatttactatttactgtgtacatagaaagctttattatgtgtggtgtatctaaattttttttgctgaaatacattatggtcaatcaagccaagcctgcatgtacagaatttgtttttttttcaaataaattagttgttttcttatttttttggcttagtatgttgaaataaactatggtatcttcatcattttgtacatttcctttttgaggaaggtttctttataagtgcaagggctaccctaataaaggaatgtatatacttacaaaaaannnn

SEQ ID NO: 327404 - DNA, 4941 bp, Homo sapiens
  misc_feature (4938)..(4941): n is a, c, g, or t
ggctggccgaagttaggcggagccccgaggcgggggaggcggggccgggccggcgcagggagagtcactcaatggacaggcgagaaagcaggaccggcgcggcggggcggggccggccgagtccctagagctgggggcggggcggacccagcggaccagcggaccacctgggtgctgtcgtagttggaggtggcctgaggagctcagttccctcagcgcccgtagcttcggcggagtctgcgcgatgggcgacccggaaaggccggaagcggccgggctggatcaggatgagagatcatcttcagacaccaacgaaagtgaaataaagtcaaatgaagagccactcctaagaaagagttctcgccggtttgtcatctttccaatccagtaccctgatatttggaaaatgtataaacaggcacaggcttccttctggacagcagaagaggtcgacttatcaaaggatctccctcactggaacaagcttaaagcagatgagaagtacttcatctctcacatcttagccttttttgcagccagtgatggaattgtaaatgaaaatttggtggagcgctttagtcaggaggtgcaggttccagaggctcgctgtttctatggctttcaaattctcatcgagaatgttcactcagagatgtacagtttgctgatagacacttacatcagagatcccaagaaaagggaatttttatttaatgcaattgaaaccatgccctatgttaagaaaaaagcagattgggccttgcgatggatagcagatagaaaatctacttttggggaaagagtggtggcctttgctgctgtagaaggagttttcttctcaggatcttttgctgctatattctggctaaagaagagaggtcttatgccaggactcactttttccaatgaactcatcagcagagatgaaggacttcactgtgactttgcttgcctgatgttccaatacttagtaaataagccttcagaagaaagggtcagggagatcattgttgatgctgtcaaaattgagcaggagtttttaacagaagccttgccagttggcctcattggaatgaattgcattttgatgaaacagtacattgagtttgtagctgacagattacttgtggaacttggattctcaaaggtttttcaggcagaaaatccttttgattttatggaaaacatttctttagaaggaaaaacaaatttctttgagaaacgagtttcagagtatcagcgttttgcagttatggcagaaaccacagataacgtcttcaccttggatgcagatttttaaaaaacctctcgttttaaaactctataaacttgtcattggtaaatagtagtctattttcctctgcttaaaaaaaattttaagtatatcctttaaaggactgggggtttgctcaaaaggaaatccaaaacctattctaaacaatttgcatttatataattttcctgtttaacaacaagagtgtgacctaaatgcttttgtcttgtcactgaaataaaagatggcattatgtggttaagagcatggggcgaggggtcagacatgagtctaaggttctgcccttactccagtgtgtgacccttggcaagtcagttaatcttggtaaacctcggtgtacttatctttaaaatgggagtaatagtaggtcctaaattcatagagtggatattaggattaggatgcaaaaataaatgcttaaccaacactactactgttagcaccactactaattatcattcattgataatattaattgcaatgatgttgtaataaaatactctcatttccttaaaataattgtgattctaggtcctaggatctagaattagatctttgtatttttaatgcttaggggaagaatataagtatctccttaaaaagaacataattctcattcacgcaagaataagttctttgaattccttagtatgtagtgaagaaaatttagttgttagttgctttgggaagcctacttatggagtggaaaccaggaggttatcatggtagttgaccttataagaaaaatgattcttcttcagaaattaaaaacataactattgccagatttagctctggaatgtttagaatcaggctagaatagcattttccaaagaatattctaagagctattagctcctctagatatttttttgggggaaaaaggggattctgtggtcagatgagtttgggaaatgctgaacacttcattcttctttagcaagtacagtcagtacatcaaagactgagcagttcagtggtacataaatttatctcgccctgcatattcccaacatacttaacacagatgttttttacctgttaacatctcacccagctagtgttcctcagaacaaagattggaaaaagctggccgagaaccatttatacatagaggaagggcttatggactgagaaagggagaacatggtagggattattgaatcatttcaaatttataccagcctgaatagtgtaccagcaattgacttaggctgtgtttctttatggttttaaaactcttgagctgttataagagatagttcttttaatgtgactatgcaacatgatagccaatggtgagggaaaaggaggtttctctagaagagtctgatgaaaggccgggaaccaaggtttttgagaagtctgcccctatttatttttagtaagtatcaagaggtagcctgagcctagttagagttagacctgtctttggatgaagaagtcttaatactgaaatactgaatttttaatacattattatttggtattctgtataccccttcaagcagttgtttcccattcccaacaaactgtactttatacaattctggatgctaaaacttagagattttctctttgcataaattttggctccattctttccataacaatctaatcaaaactgggagttctcaagtgaatgcaaaaggagcaggccataactttatttgttagatacactgtcagaaacttgagatcttttggcctatgataataccattaatttttgcattgcttcagtttgccaagtgtttttacatcatctcatttgatctcaaaacagcttgacagagcaactgttattgaaatattacagatggaaagaatgaggctcagggaagttaaatgacttggccaagatctgctcatcgtcactgtctgtacagtatttttttttagaggttgtaatgtctcagatttagtcctttaccatctatgttgatttgcttttgtctatttcctcattaattgaatatactttaaatatatatattaaagtatcaaaatatagagagacatttgaactgtattcaggtaatatgtttaaagatatttatatattgccatacaaaaacttaacatttaaaactgataatatctgtaatgacatcagaatgaaagaaaaaaaattgtacagtgtatattcctttgttttgaatccaaatctttttcataggtaatgacagatgccttaatgtgaagcttatttataatagcaataaacctaactggatttggatgaagaagtcttaatactgacatactggatttttaatgcactggtttgttatttggtattctatctctttttccaggcctccaggttgcacatttatttattatgttcaatactttggttcttagttcttaaagaatcaagaagttgtgtaatcttttaaaaatattatcttgcagataaagaaaaaaattaagagtgtgtttacaactgttttctcttttttacagtacatgtatttaaatcattgctataataaagttaagttcattaggaatataaaaacttgcagttctatgatagattgcatttattaaaaatgtttcattgtatcacatagaaatatggccaggaaggacttgagaagacagtttgatccattgcttttagacaggactgggttttgctgtccaattatatacaataatagtttttcttacaactaagctggccccagccttgtcttgatattaatacatgaaatttttataattgtctcattgtctcatttagaaacatccatatttttctgctttttctattgccattttttatttgtgcatgaattgattattgagaaaatgtagcagtttgcatatttaaaaattaatcattttgcattttacatttaaatatgctaacatcactgtcatagaattcccaaatttcatttgtagatactgaactaagggctaatgtcaggagctgatttttaatgataaagctgcagatgggctaaataaaagccaaattaatcctacaatcaggtattatgtttttaaaccaagttgagtgaattggtagtggacttgggaaatcttccccagcagaatctggatgaatggcacagaattgaaatctctttgtttcccaccatttccctttaagtgctctgctcctttgtaaaaagttaaagatttgaaagagaatctcatattcccgaggcattaggaagaaaggatttaatcccttcaatttggggcttaatcttgtttaaaaaaatgtaagtgaagatggaaggctggagagaatgattgctttttgtacagttaaataaggtcacaatattcttacatactttgttttacaactgtgttttcattttttcaaatgtctggccatttagcaaagttatttactatttactgtgtacatagaaagctttattatgtgtggtgtatctaaattttttttgctgaaatacattatggtcaatcaagccaagcctgcatgtacagaatttgtttttttttcaaataaattagttgttttcttatttttttggcttagtatgttgaaataaactatggtatcttcatcattttgtacatttcctttttgaggaaggtttctttataagtgcaagggctaccctaataaaggaatgtatatacttacaaaaaannnn

SEQ ID NO: 327405 - DNA, 4851 bp, Homo sapiens
ggctggccgaagttaggcggagccccgaggcgggggaggcggggccgggccggcgcagggagagtcactcaatggacaggcgagaaagcaggaccggcgcggcggggcggggccggccgagtccctagagctgggggcggggcggacccagcggaccagcggaccacctgggtgctgtcgtagttggaggtggcctgaggagctcagttccctcagcgcccgtagcttcggcggagtctgcgcgatgggcgacccggaaaggccggaagcggccgggctggatcaggatgagagatcatcttcagacaccaacgaaagtgaaataaagtcaaatgaagagccactcctaagaaagagttctcgccggtttgtcatctttccaatccagtaccctgatatttggaaaatgtataaacaggcacaggcttccttctggacagcagaagaggtcgacttatcaaaggatctccctcactggaacaagcttaaagcagatgagaagtacttcatctctcacatcttagccttttttgcagccagtgatggaattgtaaatgaaaatttggtggagcgctttagtcaggaggtgcaggttccagaggctcgctgtttctatggctttcaaattctcatcgagaatgttcactcagagatgtacagtttgctgatagacacttacatcagagatcccaagaaaagggaatttttatttaatgcaattgaaaccatgccctatgttaagaaaaaagcagattgggccttgcgatggatagcagatagaaaatctacttttggggaaagagtggtggcctttgctgctgtagaaggagttttcttctcaggatcttttgctgctatattctggctaaagaagagaggtcttatgccaggactcactttttccaatgaactcatcagcagagatgaaggacttcactgtgactttgcttgcctgatgttccaatacttagtaaataagccttcagaagaaagggtcagggagatcattgttgatgctgtcaaaattgagcaggagtttttaacagaagccttgccagttggcctcattggaatgaattgcattttgatgaaacagtacattgagtttgtagctgacagattacttgtggaacttggattctcaaaggtttttcaggcagaaaatccttttgattttatggaaaacatttctttagaaggaaaaacaaatttctttgagaaacgagtttcagagtatcagcgttttgcagttatggcagaaaccacagataacgtcttcaccttggatgcagatttttaaaaaacctctcgttttaaaactctataaacttgtcattggtaaatagtagtctattttcctctgcttaaaaaaaattttaagtatatcctttaaaggactgggggtttgctcaaaaggaaatccaaaacctattctaaacaatttgcatttatataattttcctgtttaacaacaagagtgtgacctaaatgcttttgtcttgtcactgaaataaaagatggcattatgtggttaagagcatggggcgaggggtcagacatgagtctaaggttctgcccttactccagtgtgtgacccttggcaagtcagttaatcttggtaaacctcggtgtacttatctttaaaatgggagtaatagtaggtcctaaattcatagagtggatattaggattaggatgcaaaaataaatgcttaaccaacactactactgttagcaccactactaattatcattcattgataatattaattgcaatgatgttgtaataaaatactctcatttccttaaaataattgtgattctaggtcctaggatctagaattagatctttgtatttttaatgcttaggggaagaatataagtatctccttaaaaagaacataattctcattcacgcaagaataagttctttgaattccttagtatgtagtgaagaaaatttagttgttagttgctttgggaagcctacttatggagtggaaaccaggaggttatcatggtagttgaccttataagaaaaatgattcttcttcagaaattaaaaacataactattgccagatttagctctggaatgtttagaatcaggctagaatagcattttccaaagaatattctaagagctattagctcctctagatatttttttgggggaaaaaggggattctgtggtcagatgagtttgggaaatgctgaacacttcattcttctttagcaagtacagtcagtacatcaaagactgagcagttcagtggtacataaatttatctcgccctgcatattcccaacatacttaacacagatgttttttacctgttaacatctcacccagctagtgttcctcagaacaaagattggaaaaagctggccgagaaccatttatacatagaggaagggcttatggactgagaaagggagaacatggtagggattattgaatcatttcaaatttataccagcctgaatagtgtaccagcaattgacttaggctgtgtttctttatggttttaaaactcttgagctgttataagagatagttcttttaatgtgactatgcaacatgatagccaatggtgagggaaaaggaggtttctctagaagagtctgatgaaaggccgggaaccaaggtttttgagaagtctgcccctatttatttttagtaagtatcaagaggtagcctgagcctagttagagttagacctgtctttggatgaagaagtcttaatactgaaatactgaatttttaatacattattatttggtattctgtataccccttcaagcagttgtttcccattcccaacaaactgtactttatacaattctggatgctaaaacttagagattttctctttgcataaattttggctccattctttccataacaatctaatcaaaactgggagttctcaagtgaatgcaaaaggagcaggccataactttatttgttagatacactgtcagaaacttgagatcttttggcctatgataataccattaatttttgcattgcttcagtttgccaagtgtttttacatcatctcatttgatctcaaaacagcttgacagagcaactgttattgaaatattacagatggaaagaatgaggctcagggaagttaaatgacttggccaagatctgctcatcgtcactgtctgtacagtatttttttttagaggttgtaatgtctcagatttagtcctttaccatctatgttgatttgcttttgtctatttcctcattaattgaatatactttaaatatatatattaaagtatcaaaatatagagagacatttgaactgtattcaggtaatatgtttaaagatatttatatattgccatacaaaaacttaacatttaaaactgataatatctgtaatgacatcagaatgaaagaaaaaaaattgtacagtgtatattcctttgttttgaatccaaatctttttcataggtaatgacagatgccttaatgtgaagcttatttataatagcaataaacctaactggatttggatgaagaagtcttaatactgacatactggatttttaatgcactggtttgttatttggtattctatctctttttccaggcctccaggttgcacatttatttattatgttcaatactttggttcttagttcttaaagaatcaagaagttgtgtaatcttttaaaaatattatcttgcagataaagaaaaaaattaagagtgtgtttacaactgttttctcttttttacagtacatgtatttaaatcattgctataataaagttaagttcattaggaatataaaaacttgcagttctatgatagattgcatttattaaaaatgtttcattgtatcacatagaaatatggccaggaaggacttgagaagacagtttgatccattgcttttagacaggactgggttttgctgtccaattatatacaataatagtttttcttacaactaagctggccccagccttgtcttgatattaatacatgaaatttttataattgtctcattgtctcatttagaaacatccatatttttctgctttttctattgccattttttatttgtgcatgaattgattattgagaaaatgtagcagtttgcatatttaaaaattaatcattttgcattttacatttaaatatgctaacatcactgtcatagaattcccaaatttcatttgtagatactgaactaagggctaatgtcaggagctgatttttaatgataaagctgcagatgggctaaataaaagccaaattaatcctacaatcaggtattatgtttttaaaccaagttgagtgaattggtagtggacttgggaaatcttccccagcagaatctggatgaatggcacagaattgaaatctctttgtttcccaccatttccctttaagtgctctgctcctttgtaaaaagttaaagatttgaaagagaatctcatattcccgaggcattaggaagaaaggatttaatcccttcaatttggggcttaatcttgtttaaaaaaatgtaagtgaagatggaaggctggagagaatgattgctttttgtacagttaaataaggtcacaatattcttacatactttgttttacaactgtgttttcattttttcaaatgtctggccatttagcaaagttatttactatttactgtgtacatagaaagctttattatgtgtggtgtatctaaattttttttgctgaaatacattatggtcaatcaagccaagcctgcatgtacagaatttgtttttttttcaaataaattagttgttttcttatttttttggcttagtatgttgaaataaactatggtatcttca

SEQ ID NO: 327406 - DNA, 1918 bp, Homo sapiens
ggctggccgaagttaggcggagccccgaggcgggggaggcggggccgggccggcgcagggagagtcactcaatggacaggcgagaaagcaggaccggcgcggcggggcggggccggccgagtccctagagctgggggcggggcggacccagcggaccagcggaccacctgggtgctgtcgtagttggaggtggcctgaggagctcagttccctcagcgcccgtagcttcggcggagtctgcgcgatgggcgacccggaaaggccggaagcggccgggctggatcaggatgagagatcatcttcagacaccaacgaaagtgaaataaagtcaaatgaagagccactcctaagaaagagttctcgccggtttgtcatctttccaatccagtaccctgatatttggaaaatgtataaacaggcacaggcttccttctggacagcagaagaggtcgacttatcaaaggatctccctcactggaacaagcttaaagcagatgagaagtacttcatctctcacatcttagccttttttgcagccagtgatggaattgtaaatgaaaatttggtggagcgctttagtcaggaggtgcaggttccagaggctcgctgtttctatggctttcaaattctcatcgagaatgttcactcagagatgtacagtttgctgatagacacttacatcagagatcccaagaaaagggaatttttatttaatgcaattgaaaccatgccctatgttaagaaaaaagcagattgggccttgcgatggatagcagatagaaaatctacttttggggaaagagtggtggcctttgctgctgtagaaggagttttcttctcaggatcttttgctgctatattctggctaaagaagagaggtcttatgccaggactcactttttccaatgaactcatcagcagagatgaaggacttcactgtgactttgcttgcctgatgttccaatacttagtaaataagccttcagaagaaagggtcagggagatcattgttgatgctgtcaaaattgagcaggagtttttaacagaagccttgccagttggcctcattggaatgaattgcattttgatgaaacagtacattgagtttgtagctgacagattacttgtggaacttggattctcaaaggtttttcaggcagaaaatccttttgattttatggaaaacatttctttagaaggaaaaacaaatttctttgagaaacgagtttcagagtatcagcgttttgcagttatggcagaaaccacagataacgtcttcaccttggatgcagatttttaaaaaacctctcgttttaaaactctataaacttgtcattggtaaatagtagtctattttcctctgcttaaaaaaaattttaagtatatcctttaaaggactgggggtttgctcaaaaggaaatccaaaacctattctaaacaatttgcatttatataattttcctgtttaacaacaagagtgtgacctaaatgcttttgtcttgtcactgaaataaaagatggcattatgtggttaagagcatggggcgaggggtcagacatgagtctaaggttctgcccttactccagtgtgtgacccttggcaagtcagttaatcttggtaaacctcggtgtacttatctttaaaatgggagtaatagtaggtcctaaattcatagagtggatattaggattaggatgcaaaaataaatgcttaaccaacactactactgttagcaccactactaattatcattcattgataatattaattgcaatgatgttgtaataaaatactctcatttccttaaaaaaaaacaaaacctccaacaccaacaaaaacaataacccacattcccctgggaatctctacctacccaataaaattgcggcccgaattggggctcacttggcccattcg

SEQ ID NO: 327407 - DNA, 1435 bp, Homo sapiens
agcatcacacattgctgcatcagagaggtcttaagacaggaagctagagtcttggtgcatgctcgaagtgagacggtgtcagcacagagcagggtaaagtcttcccgttaactcttcaccagagctatgactggaatcagaggttgaaaagatgtgagactgtacccaagaagcatcttataagcctacgtaatatactgttagactcatcgaaatctatttcctcccttctttataatcaaaacttcagtgtccagaataaagttggcagaagggttaaattggaaagttaaatgtactagaaggtgtacatttataagttttgaccttgagtcgtgttcaaggagaaagtgacattggaacttggaaaatttaaaaatgattctacttgaaaaatttgaccattgcatagaaatattagctatcgtctaatcttttgtaatcttagaaacaatcgtgaattgtttggtgaaaaatgaaaaaataaccatttcttatgtctccgtgacctttatagaccaatgtcaccaacttttcctaaggtaattgtttcctactgtcaaatagctctagtgatataaatcttaacaatcaatgaagggaaaactggtggaaacataggaggaaaaatactgggataattttcatcacaaagtattggcattaacattggttagaataggggagaaactgcatgacttgacaactggacattcctgtatgttgtatgaggccctgtcttaacagaaatagtgatgtcatcatcatcctctcttatttggtcttgaattgccaccaatcggataaaacctttgaattatttaactcaaaaaaaaaaaaaaaaaaaaaaaaaaaaagtgtgtggtgggggcgccgcggggccccgggaaaagatttctctaagaacacaaacgagaggggggccgcgggccccacataaggtaaagtggaacaaggtggcacaaagcggtgagtcccaagagggaacaccgggggacatggacaaaggggcggggagaatctcctaacgaacaatataaaaaaaagcgcgcgcggggggggcgaaacaaggggaggcgtgctctcggagagaacacaaatccacacagaagagggagagagacacaagagcgcgagcacataacagcggggggagccactatatatacacaaaagcgggagagtactccacaagggaggagaaaaccctgcgcacagaattcatcaacaaaaattatcgacagcccacggcacgggatggaggggggggggtgatgaaacaagaacgcagacgacgccagaacgactacgacacacagagactgcaaaagcaacatccaagaccaacacaaaccaaaccgcgaacagacaatccacagcacaaaatacacaaccacaacacaacaacagcgacacccacgcgaaagaatacaac

SEQ ID NO: 327408 - DNA, 2360 bp, Homo sapiens
agcatcacacattgctgcatcagagaggtcttaagacaggaagctagagtcttggtgcatgctcgaagtgagacggtgtcagcacagagcagggtaaagtcttcccgttaactcttcaccagagctatgactggaatcagaggttgaaaagatgtgagactgtacccaagaagcatcttataagcctacgtaatatactgttagactcatcgaaatctatttcctcccttctttataatcaaaacttcagtgtccagaataaagttggcagaagggttaaattggaaagttaaatgtactagaaggtgtacatttataagttttgaccttgagtcgtgttcaaggagaaagtgacattggaacttggaaaatttaaaaatgattctacttgaaaaatttgaccattgcatagaaatattagctatcgtctaatcttttgtaatcttagaaacaatcgtgaattgtttggtgaaaaatgaaaaaataaccatttcttatgtctccgtgacctttatagaccaatgtcaccaacttttcctaaggtaattgtttcctactgtcaaatagctctagtgatataaatcttaacaatcaatgaagggaaaactggtggaaacataggaggaaaaatactgggataattttcatcacaaagtattggcattaacattggttagaataggggagaaactgcatgacttgacaactggacattcctgtatgttgtatgaggccctgtcttaacagaaatagtgatgtcatcatcatcctctcttatttggtcttgaattgccaccaatcggataaaacctttgaattatttaactcaatatatgttaagtttctactatgtgctgtgtattggtactataaatatgaataagacataagatattacattcaaaaacatcagaatacatgttcttttaaagtataccccaaaacatttaccatgtgttctggggcgcatgttaggctggatcacaaatcaagtctcaagaaatttcaaaagattgaaatcatatagagtatgaattaaaccagaaatcaagtacataaaggtaacaaaaaatttccaaaatgcattaatttaaggaacatacacctcatgacccatgagccaaaaaataaatcacggcaaaattgcaaaaatattttgaaatgaattttaaagaaaatacttagcatattaaatacttagcatattaaagctctaagtacatatgttagaaattttaccgaaaggttggctatcagtgtttccagaagccagggaaaaagtttatacaatttgatcgctgaggcagggaaacaaagtgagacctccgatcgccctgcctttctgaggtgagcactctggatcccatcgcaggagatcagagtcttgctgagttgaggagaggaagattggagttgatactgagatagcttgaattttcaggacaaagtatcaacaaggaggaaggtagacaaaaaaatccagaaatctatgtagagaccccattgtgtacattgcggaacactaagcctaacaattctcaaaattagcgtgagattgggaaatatctaatttccatccagccacagtggagagtcctgactgaaaaccaggcattcgctaaagatcccagaaaggttgtgtgttacatacgtagggctaaactatcctgactaaaaactacactacacttgctcctcacccccacaaaaagcttaaaaacaagcctcaatagtataaagctgatctgtaagtaactaaactacctgcagaacaaagtccaaatttattagttccagtactccaaaaaaaacacatgtaaaaaaaaaatagatttacaagacatttatttggggaaaaaaagaatgcctgagggttgaaatggagaggaagccagagagacagagtcctcagaatacataaaatttctggcctccatggaggtgtgatggttaattttatgcatgtcaacttcgctgggccacaggatgccccatatatgatcgaacattatttctggttgtgttcatgaagctttttctggaggaaattcgcatttgaattgatggactgaataaagcagattgcagtccccagtgtggatgggcttgatccagtcttctaaggacccaaataaaataggtggaggaagcttgaattttctgcctgactgtggcgctgggacacccatcttctcctgcccttgaactgggactgacaccatcagtgctcctggttctcagacttcggacagcagacttggggccttctcggcctccattattgtgtaagccaattccttataataaataagggtttatttattgataaatccttataggttgattataaaaaaaaaaaa

SEQ ID NO: 327409 - DNA, 249 bp, Homo sapiens
gagttcacagtttaccatatgctgtattaggagttagcatacttttcctgtaaaggaccaggtggtaaatattttaggctttgtaggccacatgtgatctctgttgcaactactcaactcttttcttatagcacaaaagcaacaatagacaatacataaaattttatttagggacattgaaattaaattttatatgatttttatgtgtcacaaagtattgctctgtttaaaatttgttttcaacaatta

SEQ ID NO: 327410 - DNA, 391 bp, Homo sapiens
ggaaagaaatggacgtgctgcagagaaaggcagaagcaagagttaataacaaaattaagcaattcaagcttcccaagctcttgctgtttttgaagttaatatggattagaggctatatcagggcaaagaaagcagcagtttagcagtggagagatctgaggctcattctcaataactatgagaacctgggcaagacccttcaccactccagatgccacacttgcttcagaatctataacgtgagatgaagagagacggtccccactgtgccccttccatagtgaggggatgacatagtgagggaggctcagacctttgagataagattaccctctgaaagcaaatgtggtcaagcacagtgcccgagaagagatcaactctctgtaaaatc

SEQ ID NO: 327411 - DNA, 2301 bp, Homo sapiens
tcaggctagtacgaggctgggttaatcggccgagggaattgaaaaaggatcccaaaggagtcgattcttaaaaactctgcttctgttggtattatccaaagagatgagtcacccatggaaaaagggctctctggtctacgaggaagggactttgagctgtctgacgtgttttatttctccaagaagggattggaagccattgtagaagatgaagtgacccagaggttttcctcagaggagctagtgtcatggaatctcctcacaagaaccaatgtaaatttccagtacatcagtctgcggctcactatggtgtgggtgctgggcgtcatagtgcgctattgtgtcctactgcctctgagggttaccttggctttcattgggatcagtttgctggttataggaactacactggttgggcagctgccagacagcagcctcaaaaactggctgagtgaactggtccatctgacttgctgccggatctgtgtgcgagccctctctggtaccattcattatcataacaagcagtacagaccccagaagggaggcatttgtgttgccaaccatacttcccccattgatgttttaatcttgacaacggatggatgttatgctatggttggccaggttcatggcggcttgatgggaattattcagagagctatggtcaaggcttgtcctcatgtctggtttgaacgctcagaaatgaaggatcgacacctggttactaagagactaaaagaacatattgctgataagaagaaactacccatactaatttttcctgaaggaacttgcatcaacaatacttcagtcatgatgtttaaaaaggggagctttgaaattggaggaaccatacatccagttgcaattaagtataaccctcagttcggtgatgcattttggaacagtagtaaatacaacatggtgagctacctgcttcgaatgatgaccagctgggccatcgtctgtgacgtgtggtacatgccccccatgaccagagaggaaggagaagatgcagtccagtttgctaacagggttaagtctgctattgctatacaaggaggcctgactgaacttccctgggatggaggactaaagagagcaaaggtgaaggacatctttaaggaagagcagcagaaaaattacagcaagatgattgtgggcaatggatctctcagctaagaggacggatgacagcctttagatctagaactagcccttagaaatggaatggcttttttgttttgttttgttttattgttttgtttttattattgttaatcttttctacagaatgattgtctctacctctttatgccagaggcagaacctacaggtgccctttttggcttttgttgttgttgtaacattagccccatggattgtaaggtggtttactgagttaaaacagattctgcttttgtaaaatgatggcatcactgtggactgaatgaaatatttgtatagaaaaaagtgcttgaaaagtgtgtttggaactcatcgatagggtaattctccaaaaatgcccaaactctctttctgtaattagccttgccactttcttcagtcacttaaatggtgagattacacatcagtgcaagatgaccattatggttatggtctactgcaaggttgaaaggaaaaatggaggattgtatttaggaaaagggacaactttgtggccacctgctctgaaagtcaaaaggaaatgtaaattagtgtcattagtgtgttggaagagaaatactattcagtaagcttcgccaaagaaaagtgagtcaaagttaatgtgtgtgcgcatttatatgtaggcagctcgtagaccacattttagccagcaactggtaacaaagagcttagttttccttgtttgaatgctgtagatctgtacctagtacccctcccatctactgatttgtttgtttttgtaaccaaacacattttcagatagaaggagccttaaaaaaaaaaaaatcacattgagtaacttcagtatgaatgaatgagagtgtgtggagctacccctcaccctccacccctttgtgctttttattcccgaattttcccagtctcttaaacagaaaaatgactgatataattatcttttggaaactgagccttaattttttttagagggggaaataagttttccccaactcacacagcataagcaatgtttgacagcaatataatgccgttgtaaactactgagagtattgtatctgttctggtaaccatgtacagaatgtgaaactgtcttatgaatataaataaattctatatttctaaaaaaaaaaa

SEQ ID NO: 327412 - DNA, 1149 bp, Homo sapiens
aatggaatggctagttctagatctaaaggctgtcatccgtcctcttagctgagagatctagaactagcccttagaaatggaatggcttttttgttttgttttgttttattgttttgtttttattattgttaatcttttctacagaatgattgtctctacctctttatgccagaggcagaacctacaggtgccctttttggcttttgttgttgttgtaacattagccccatggattgtaaggtggtttactgagttaaaacagattctgcttttgtaaaatgatggcatcactgtggactgaatgaaatatttgtatagaaaaaagtgcttgaaaagtgtgtttggaactcatcgatagggtaattctccaaaaatgcccaaactctctttctgtaattagccttgccactttcttcagtcacttaaatggtgagattacacatcagtgcaagatgaccattatggttatggtctactgcaaggttgaaaggaaaaatggaggattgtatttaggaaaagggacaactttgtggccacctgctctgaaagtcaaaaggaaatgtaaattagtgtcattagtgtgttggaagagaaatactattcagtaagcttcgccaaagaaaagtgagtcaaagttaatgtgtgtgcgcatttatatgtaggcagctcgtagaccacattttagccagcaactggtaacaaagagcttagttttccttgtttgaatgctgtagatctgtacctagtacccctcccatctactgatttgtttgtttttgtaaccaaacacattttcagatagaaggagccttaaaaaaaaaaaaatcacattgagtaacttcagtatgaatgaatgagagtgtgtggagctacccctcaccctccacccctttgtgctttttattcccgaattttcccagtctcttaaacagaaaaatgactgatataattatcttttggaaactgagccttaattttttttagagggggaaataagttttccccaactcacacagcataagcaatgtttgacagcaatataatgccgttgtaaactactgagagtattgtatctgttctggtaaccatgtacagaatgtgaaactgtcttatgaatataaataaattctatatttctaaaaaaaaaaa

SEQ ID NO: 327413 - DNA, 812 bp, Homo sapiens
agctatggtcaaggctgtcctcatgtctggtttgaacgctcagaaatgaaggatcgacacctggttactaagaggtaaccaggtgtcgatccctcatgtctggtttgaacgctcagaaatgaaggatcgacacctggttactaagaggtaagcagtgaaattactcagcattcactggagtagcataaaagctgaccaatcttggccttgctaccaaagagggccgagcagcactgagtctcaaaactgaaacagagccctgtttgctgttggatttttctggcaaatcacctgtcttagccagatttttaaaaaatgtaattctgtagtcatggtaggatatatgatgggattggaaggccaatgtatttatattgctgtgacttagatatagtccagtcactgaattttcaaagataaaaattaccacctttaaattagatatgatctcacttgagtataagcaattaaaaaaataaattagatatgtatactttacctcaataaaaaatatataaaaaagaaaaaaaaaccaccttgaaggttaaatatttgataactacttgctaaatatatgattgattaagtgtttgctgaatgattgttatcacttaaatccagctagaagctgggcatggtggctgacgtctgtaatcctagcactttgggaggccaaggtaggagaatggcttgaacccaggagttcaagaccagcctgggcagtatagtgagacctcatctctacaaaaaataaataaaattagccaaatgtggtggcatatgcctgtggtcccagctacttgggaggaagg

SEQ ID NO: 327414 - DNA, 1399 bp, Homo sapiens
tcaggctagtacgaggctgggttaatcggccgagggaattgaaaaaggatcccaaaggagtcgattcttaaaaactctgcttctgttggtattatccaaagagatgagtcacccatggaaaaagggctctctggtctacgaggaagggactttgagctgtctgacgtgttttatttctccaagaagggattggaagccattgtagaagatgaagtgacccagaggttttcctcagaggagctagtgtcatggaatctcctcacaagaaccaatgtaaatttccagtacatcagtctgcggctcactatggtgtgggtgctgggcgtcatagtgcgctattgtgtcctactgcctctgagggttaccttggctttcattgggatcagtttgctggttataggaactacactggttgggcagctgccagacagcagcctcaaaaactggctgagtgaactggtccatctgacttgctgccggatctgtgtgcgagccctctctggtaccattcattatcataacaagcagtacagaccccagaagggaggcatttgtgttgccaaccatacttcccccattgatgttttaatcttgacaacggatggatgttatgctatggttggccaggttcatggcggcttgatgggaattattcagagagctatggtcaaggcttgtcctcatgtctggtttgaacgctcagaaatgaaggatcgacacctggttactaagaggtaagcagtgaaattactcagcattcactggagtagcataaaagctgaccaatcttggccttgctaccaaagagggccgagcagcactgagtctcaaaactgaaacagagccctgtttgctgttggatttttctggcaaatcacctgtcttagccagatttttaaaaaatgtaattctgtagtcatggtaggatatatgatgggattggaaggccaatgtatttatattgctgtgacttagatatagtccagtcactgaattttcaaagataaaaattaccacctttaaattagatatgatctcacttgagtataagcaattaaaaaaataaattagatatgtatactttacctcaataaaaaatatataaaaaagaaaaaaaaaccaccttgaaggttaaatatttgataactacttgctaaatatatgattgattaagtgtttgctgaatgattgttatcacttaaatccagctagaagctgggcatggtggctgacgtctgtaatcctagcactttgggaggccaaggtaggagaatggcttgaacccaggagttcaagaccagcctgggcagtatagtgagacctcatctctacaaaaaataaataaaattagccaaatgtggtggcatatgcctgtggtcccagctacttgggaggaagg

SEQ ID NO: 327415 - DNA, 366 bp, Homo sapiens
gcctctgagcagaagctaagccatcataacccctgtgacctgcatgtatacatccagacggcctggagcaatggaagaacaacaaaagatgacattccatcatttgatttgttcctgccccaccccaactaatcaatcgaccttgtgacattcctcccctggacaatgagtcccatgatctccccaccctgcaccttgtgacccctgcccctgcccgcaagagataaccaactttaactgtaattttccattacctacccaaatcctataaaactgccccactcctatctccctttgctgaatcctttctccgactcagcccacttgcacccaagtgaataaacagccttgttgctcacacgaagc

SEQ ID NO: 327416 - DNA, 1562 bp, Homo sapiens
cggacacggggcggagggcggggcgccgggtccggagggagccacgcccaccacaacaacgcgtctgcgcatgcccgggcgctgggttcaggggctttccgccgctctgggttcacagctggacgtcgggagtgctagtttggagtacgccatttgagagtaggcgtgagaagttgctctgtgtgctgagcgttctaaaggaaggcgtccgttggccttcgtacccgtcttgattgaggtgacgagtgttttctagtactggggtcggccgcgcagccctctcaggggtgggtggcaggaagagtgccgggtcccgcgtggtgcaaaaggtgggttcaggtttgcggccacacagcgctactcaggactttttagtcttgtttattttctccgtgcctgttcccgccccccgcagctccacctctgggagaggggcgggttcagctccaggaggcggggacttcccggcttggcgtggctggggtgtcccgtggaccccagtctcggcgcggtgacccacttatgggacttggcctttctttgttgtttgtttaaggcagggtttctcagcctgggcactactgaggttttgggccggctaattctgtctgggttggggagggtgctgtcccgtgcttcgcaggttgtgtagctgcatcccccgcctctacccagtggatgcaagtagcagccccagtgaaccaaaaatgcccccagactttgccaaatatcccctcccggggaagatcgcctcgcttgagaaccactgttggaggagagcctgggttttcgggaggtaaccgtttacaaaggggagaacggtaagaagccggaagcaacgatgacttagctacgtgaaagacttgcggccgggctcgcccctcttctagaagccgtcagtttgggtctcgcgtctggaatcaccgtcaaggagtcagatccagccccggagagggagcagggtcgaggtctccttgcagaaggcgccaccgcaggaagcacaggcgcaacgtgcagtctccctagcggaggcgctcgcgatcctgcagccgccggtccgggaggtgctcggtagccctccttggtgcctgtccggtagctggtcactctcgggggaaggtcgtgtgcagaagggcacatgcgatcacacagagacggcgttgctgcggctttgacccgatggtgcacccgaaagaacacagagggtggagggggagatccaggaagtggtcgcggagcagaaccccctttcacttcagtcaaaaatgtgggtcaattgtcattaagagatacgcacaggttcatctgattgacatgtacggcggcagtatatgagtgagatgggaaccaaggtgactgttgtttcctttgatggatgaaactttcatccctttggggttttttgtttttggcgggatattagccgattagtagataaaactgcatgatacaatctatagcctgtttttaaatggacaagttcttaccactcaggaggtttatcgtgattgtttaatgtctcagggtggaggaatctagtgcaggcagttcttaatgaaacc

SEQ ID NO: 327417 - DNA, 809 bp, Homo sapiens
cggacacggggcggagggcggggcgccgggtccggagggagccacgcccaccacaacaacgcgtctgcgcatgcccgggcgctgggttcaggggctttccgccgctctgggttcacagctggacgtcgggagtgctagtttggagtacgccatttgagagtaggcgtgagaagttgctctgtgtgctgagcgttctaaaggaaggcgtccgttggccttcgtacccgtcttgattgagctctcacactttggatacgctcctctaatcctgtctgaaagagctaagctgacccccaccaccgttggaggaaactcctggagcagtgctggggttttcactgcaatcagctgctccaactttgtcttgtacatggctctttgaccttgggcttgtggattaggggcctgtggaggagctctgtgactgctctgatatctgtggatggttctgaggcattgtatttagtgaaaaaactggaaaccatatgcatgtccatgaataaaaaatggggcataggccgggcgccgtggctcacacctgtaatcccagcactttgggaggcgaggtgggcggatcacctgaggtcgggagttcgagaccagcctgaccaacatggagaaaccccatctctactaaaaatacaaaattagctggacgtggtcgcgcatgtcagtaatcccagctactcgggaggctgagtcaggaaaatcgcttgaacccgggaggcggaggttgcagtgagccgagaccgtgcagcctgggcaataagagcgaaactccatctcaaaaacaaacaaacaaaaaaaca

SEQ ID NO: 327418 - DNA, 721 bp, Homo sapiens
cggacacggggcggagggcggggcgccgggtccggagggagccacgcccaccacaacaacgcgtctgcgcatgcccgggcgctgggttcaggggctttccgccgctctgggttcacagctggacgtcgggagtgctagtttggagtacgccatttgagagtaggcgtgagaagttgctctgtgtgctgagcgttctaaaggaaggcgtccgttggccttcgtacccgtcttgattgagctctcacactttggatacgctcctctaatcctgtctgaaagagctaagctgacccccaccaccgttggaggaaactcctggagcagtgctggggttttcactgcaatcagctgctccaactttgtcttgtacatggctctttgaccttgggcttgtggattaggggcctgtggaggagctctgtgactgctctgatatctgtggatggttctgaggcattgtatttagtgaaaaaactggaaaccccttcttgtggagtaaaagttaaatattaaatttgaactcaattggacttgaacacaaggaatggttacctgccagaaatctgtccctgggcacttgctcaggaaccggatggacatactgattggtcttgataaatcatcatctgcctcgaggcaataaacaaaaccttgaaaataggctgacctttccgtgttccttgagtccaatgacaaaaggcccttgtgcctaggcctcatg

SEQ ID NO: 327419 - DNA, 796 bp, Homo sapiens
cggacacggggcggagggcggggcgccgggtccggagggagccacgcccaccacaacaacgcgtctgcgcatgcccgggcgctgggttcaggggctttccgccgctctgggttcacagctggacgtcgggagtgctagtttggagtacgccatttgagagtaggcgtgagaagttgctctgtgtgctgagcgttctaaaggaaggcgtccgttggccttcgtacccgtcttgattgaggtgacgagtgttttctagtactggggtcggccgcgcagccctctcaggggtgggtggcaggaagagtgccgggtcccgcgtggtgcaaaaggtgggttcaggtttgcggccacacagcgctactcaggactttttagtcttgtttattttctccgtgcctgttcccgccccccgcagctccacctctgggagaggggcgggttcagctccaggaggcggggacttcccggcttggcgtggctggggtgtcccgtggaccccagtctcggcgcggtgacccacttatgggacttggcctttctttgttgtttgtttaaggcagggtttctcagcctgggcactactgaggcgggcggatcacctgaggtcagcagttagagaccagcctgaccaacatgaagaaaccctgtctctactaaaaatacaaaattagccaggcatggtggtgcatgcctgtaatcccagctactcgggaggctgaggcaggagaatcgcttgaacccgggaggtggaggttgcggtgagctgagattgcgccattgcactccagcctgggca

SEQ ID NO: 327420 - DNA, 501 bp, Homo sapiens
cctttttcctctttgtagctctcacactttggatacgctcctctaatcctgtctgaaagagctaagctgacccccaccaccgttggaggaaactcctggagcagtgctggggttttcactgcaatcagctgctccaactttgtcttgtacatggctctttgaccttgggcttgtggattaggggcctgtggaggagctctgtgactgctctgatatctgtggatggttctgaggcattgtatttagtgaaaaaactggaaaccccttcttgtggagtaaaagttaaatattaaatttgaactcaattggacttgaacacaaggaatggttacctgccagaaatctgtccctgggcacttgctcaggaaccggatggacatactgattggtcttgataaatcatcatctgcctcgaggcaataaacaaaaccttgaaaataggctgacctttccgtgttccttgagtccaatgacaaaaggcccttgtgcctaggcctcatg

SEQ ID NO: 327421 - DNA, 490 bp, Homo sapiens
cggacacggggcggagggcggggcgccgggtccggagggagccacgcccaccacaacaacgcgtctgcgcatgcccgggcgctgggttcaggggctttccgccgctctgggttcacagctggacgtcgggagtgctagtttggagtacgccatttgagagtaggcgtgagaagttgctctgtgtgctgagcgttctaaaggaaggcgtccgttggccttcgtacccgtcttgattgaggtgctggagaatcggtaaaagcaccattgtgaagcacatgaggatcctgcatgttaatgggtttaatggagatgagaacgcctccaaagtgcaggacatcaaaaacaacctgaaagaggcgattgaaaccattgtggccgccatgagcaacctcttgccccccgtggagctggccaaccccgagaaccagttcagagaggactaccttctgagtgtgatgaacgtgcctgactatgacttccctcccgaatt

SEQ ID NO: 327422 - DNA, 94 bp, Homo sapiens
gctgctaggatgttgctgttgtgtgagaatatgaagggggatgagaaaaaaacaatggaatggaatgaattcaagaccaaataaagtccgtggt

SEQ ID NO: 327423 - DNA, 522 bp, Homo sapiens
ctagacttcagggctgcacctgtcaggcctgggagcataccatcgactgagcaaggagttgttcaagaaatcagcctataccagactgtgtgtgatattccttgaccacagagacaagatttagaacatgcacacgattcagtctggaacaagatgcaagatgcgacggtttcttgcaaagttatggggatgaagtttaactgctctggacagaaagctgctaggagataatctttctttgctcgtcatgacataaggatgacccctgggattgcttcaaccattttgccaccaatatggaactcttctgctaaagaactaagtccgtacggagaagagcggaaccaaaggggttagagagaaacaggtggaaatgccggcttgagcctgccccaagtcccttcctgtctctggactccaggtacaggggccaataagctgagtgatattaagagtatgaaacaacttgtatagtatgttatatatgtacatataagccaatatataataaactactcatat

SEQ ID NO: 327424 - DNA, 125 bp, Homo sapiens
ctcacttctgtaacttccttcccacctcacgtagttctcgctttttagatgtttaaaagtaggagggccgggtacggtggctcatgtctgtaatcccagcactttgggaggctgaggcaggtgga

SEQ ID NO: 327425 - DNA, 321 bp, Homo sapiens
tattgctacattgtaagaagagcaaactttcatcttgttaataagtaacacggaaattttttattaaaaaacttttttaaaaaactgtgaggaaattcatttattcgctatacaccatatctttttatgtgattatgccttgtaaaagaggtatcattgtgataagaatgtttaaaagttgtagtttgctaaattaagtgctcctctatttgtttttgaatgtgttatttttaaacagttttatggtaacggattttgatctagagtcgtgtttctgcattatgcatttgtggtttctggctacattgggggcgtgggggg

SEQ ID NO: 327426 - DNA, 217 bp, Homo sapiens
atcacacatacacacaaacacacccccacaaccacacatgcacacatcattgtgcacactcatacaggcacatttcctcttttctcaggttgcatatcccacctaccccctcccgcagtggactggccactagaaaggaccctgcagtttggtctgagaaacagtggttggagcttctggagacatggtctctcaaactctacttgccttgcttatt

SEQ ID NO: 327427 - DNA, 127 bp, Homo sapiens
cgccgccgccgcgagtccagctcgcaggaggaggaggtcatcgacggcttcgccatcgccagcttcagcaccctggaggccctggagaaggatatggccctgaagccacatgagcggaaggagaagt

SEQ ID NO: 327428 - DNA, 1873 bp, Homo sapiens
cccccttccccggctggggcggctggagagccgggagtcgctgggtgcgtggggctgcctcgccgcgtctcgccacgggctctgccagcagacagccttggcacacaggcacaagggctggagcccagagatgagagtgcccaagggagatgtgagcctggcgggctgcccgctaacctgtcgctgaagccccagaagcgggccctcaggccaggcctaccctgcctccggcccagcatgcgcctgtcggtgcggagggtgctgctggcagccggctgcgccctggtcctggtgctggcggttcagctgggacagcaggtgctagagtgccgggcggtgctggcgggcctgcggagcccccggggggccatgcggcctgagcaggaggagctggtgatggtgggcaccaaccacgtggaataccgctatggcaaggccatgccgctcatcttcgtgggtggcgtgcctcgcagtggcaccacgttgatgcgcgccatgctggacgcccaccccgaggtgcgctgcggcgaggagacccgcatcatcccgcgcgtgctggccatgcgccaggcctggtccaagtctggccgtgagaagctgcggctggatgaggcgggggtgacggatgaggtgctggacgccgccatgcaggccttcatcctggaggtgattgccaagcacggagagccggcccgcgtgctctgcaacaaggacccatttacgctcaagtcctcggtctacctgtcgcgcctgttccccaactccaagttcctgctgatggtgcgggacggccgggcctccgtgcactccatgatcacgcgcaaagtcaccattgcgggctttgacctcagcagctaccgtgactgcctcaccaagtggaacaaggccatcgaggtgatgtacgcccagtgcatggaggtaggcaaggagaagtgcctgcctgtgtactacgagcagctggtgctgcaccccaggcgctcactcaagctcatcctcgacttcctcggcatcgcctggagcgacgctgtcctccaccatgaagacctcattggcaagcccggtggtgtctccctgtccaagatcgagcggtccacggaccaggtcatcaagcctgttaacctggaagcgctctccaagtggactggccacatccctggggatgtggtgcgggacatggcccagatcgcccccatgctggctcagctcggctatgacccttatgcaaacccccccaactatggcaaccctgaccccttcgtcatcaacaacacacagcgggtcttgaaaggggactataaaacaccagccaatctgaaaggatattttcaggtgaaccagaacagcacctcctcccacttaggaagctcgtgatttccagatctccgcaaatgacttcattgccaagaagagaagaaaatgcatttaagtggaaatcggacctctaatccaagcatattgcttgctattaatcgccaaaacaggactgctgatgaggaatgtatttgcatatgtttgcaaaagctgaatcattgaaaacgtaccttgaaactctctatctctggacactccagggtagagaatgaagggtatggaagtagtccggcttttgaaacttaggtattttatatttttcccctcaagaacttttttttaagagacagatttgccatcctccttaatttgcaggactgccttggtggctttgtttgctgggacaaggcccacaacctgtgcctctcctattgacccttactttgaattcaaagaatctatttaagagtttaatatatgaggctttctttgattcctcctcagttctacctagtttcacagaggaaaaaaatactctttgaataaagtgaacagaggctca

SEQ ID NO: 327429 - DNA, 1677 bp, Homo sapiens
cccccttccccggctggggcggctggagagccgggagtcgctgggtgcgtggggctgcctcgccgcgtctcgccacgggctctgccagcagacagccttggcacacaggcacaagggctggagcccagagatgagagtgcccaagggagatgtgagcctggcgggctgcccgctaacctgtcgctgaagccccagaagcgggccctcaggccaggcctaccctgcctccggcccagcatgcgcctgtcggtgcggagggtgctgctggcagccggctgcgccctggtcctggtgctggcggttcagctgggacagcaggtgctagagtgccgggcggtgctggcgggcctgcggagcccccggggggccatgcggcctgagcaggaggagctggtgatggtgggcaccaaccacgtggaataccgctatggcaaggccatgccgctcatcttcgtgggtggcgtgcctcgcagtggcaccacgttgatgcgcgccatgctggacgcccaccccgaggtgcgctgcggcgaggagacccgcatcatcccgcgcgtgctggccatgcgccaggcctggtccaagtctggccgtgagaagctgcggctggatgaggcgggggtgacggatgaggtgctggacgccgccatgcaggccttcatcctggaggtgattgccaagcacggagagccggcccgcgtgctctgcaacaaggacccatttacgctcaagtcctcggtctacctgtcgcgcctgttccccaactccaagttcctgctgatggtgcgggacggccgggcctccgtgcactccatgatcacgcgcaaagtcaccattgcgggctttgacctcagcagctaccgtgactgcctcaccaagtggaacaaggccatcgaggtgatgtacgcccagtgcatggaggtaggcaaggagaagtgcctgcctgtgtactacgagcagctggtgctgcaccccaggcgctcactcaagctcatcctcgacttcctcggcatcgcctggagcgacgctgtcctccaccatgaagacctcattggcaagcccggtggtgtctccctgtccaagatcgagcggtccacggaccaggtcatcaagcctgttaacctggaagcgctctccaagtggactggccacatccctggggatgtggtgcgggacatggcccagatcgcccccatgctggctcagctcggctatgacccttatgcaaacccccccaactatggcaaccctgaccccttcgtcatcaacaacacacagcgggtgagtgtgcacctgtacttgtggaagtgtactcttggggatatggggcttctgcagatgtggaaactccagccacctgaggaaatgttcagtctctcaattcctggtcatctgatttgttcctgtctgatggacacagtgaactacatgattgcttgtatttccattttgcttgggctgcagggaagctcaaagccaactggtagcctgtctctcatactctaacatctaacagcaggccagcttgtacactaatttcatcttatttctctaattttatttacatttttacccctatttccctggctatttgtttatctgtttgtaaggcacctcaagtctttgttgagagggggtataaataaataaactattggtccctttcttgtcttataaggt

SEQ ID NO: 327430 - DNA, 1263 bp, Homo sapiens
cccccttccccggctggggcggctggagagccgggagtcgctgggtgcgtggggctgcctcgccgcgtctcgccacgggctctgccagcagacagccttggcacacaggcacaagggctggagcccagagatgagagtgcccaagggagatgtgagcctggcgggctgcccgctaacctgtcgctgaagccccagaagcgggccctcaggccaggcctaccctgcctccggcccagcatgcgcctgtcggtgcggagggtgctgctggcagccggctgcgccctggtcctggtgctggcggttcagctgggacagcaggtgctagagtgccgggcggtgctggcgggcctgcggagcccccggggggccatgcggcctgagcaggaggagctggtgatggtgggcaccaaccacgtggaataccgctatggcaaggccatgccgctcatcttcgtgggtggcgtgcctcgcagtggcaccacgttgatgcgcgccatgctggacgcccaccccgaggtgcgctgcggcgaggagacccgcatcatcccgcgcgtgctggccatgcgccaggcctggtccaagtctggccgtgagaagctgcggctggatgaggcgggggtgacggatgaggtgctggacgccgccatgcaggccttcatcctggaggtgattgccaagcacggagagccggcccgcgtgctctgcaacaaggacccatttacgctcaagtcctcggtctacctgtcgcgcctgttccccaactccaagttcctgctgatggtgcgggacggccgggcctccgtgcactccatgatcacgcgcaaagtcaccattgcgggctttgacctcagcagctaccgtgactgcctcaccaagtggaacaaggccatcgaggtgatgtacgcccagtgcatggaggtaggcaaggagaagtgcctgcctgtgtactacgagcagctggtgctgcaccccaggcgctcactcaagctcatcctcgacttcctcggcatcgcctggagcgacgctgtcctccaccatgaagacctcattggcaagcccggtggtgtctccctgtccaagtgagtggagcccctgatgcttccactcagactctggccctggagtcagaggcgccaggcaagaaaatcagcactgcctttcttgagctgtgtggccttgggcaagtcactatatctctctgagcctccgtttcattatcccaaaaaatgacaacaattactcctctcctttctgagagaatct

SEQ ID NO: 327431 - DNA, 2124 bp, Homo sapiens
catatagaggtgctttagctgaatcctgggtacagagttggccttgaacaaacatgagtccttctcttgcctccaagaattcatcagtatttatcacataatcactgtcatttgctctgtgtccataagaaaagtgtatatttgaggtcaagtggatgcaagatgagatgtggggaagaacccaggaaacgtttttaaatttaaactctctctggccatctgggatgcattcttaaaacattacatgcttatgcgaatggatgaagacagtatgttctgcaatcacatgtataaatataaatgatctatttcagaattgttactctgagcctaacacagtcttccccactttcagatctccgcaaatgacttcattgccaagaagagaagaaaatgcatttaagtggaaatcggacctctaatccaagcatattgcttgctattaatcgccaaaacaggactgctgatgaggaatgtatttgcatatgtttgcaaaagctgaatcattgaaaacgtaccttgaaactctctatctctggacactccagggtagagaatgaagggtatggaagtagtccggcttttgaaacttaggtattttatatttttcccctcaagaacttttttttaagagacagatttgccatcctccttaatttgcaggactgccttggtggctttgtttgctgggacaaggcccacaacctgtgcctctcctattgacccttactttgaattcaaagaatctatttaagagtttaatatatgaggctttctttgattcctcctcagttctacctagtttcacagaggaaaaaaatactctttgaataaagtgaacagaggctcatttgtttgtgcctcactttactgaatgaatagggttttttttttctttccatactggattttgtcaggtagatttgtgatgagcaaaaagctggagaatataggtgcatgtaaggcacagctgaattcctgtgtcagggtccccagggccacccccaggatcgatgattggctagaagaactcagaattcagaagagctattatccttatggttatggtttattacagcaaaaggataaacattaaaatcagcaaaagaggccgggtggagtggctcacgcctgtaatcccagcactttgggaggccaaggcaggcagatcgcctgaggtcaggagttcgagaccagcctggccaacatggtgaaaccccgtctctactaaaaatacaaaaattacctgggcgtggtggtgtgcacctgtaatcccagctactcaggaggcttgaacctgggaggcggaggttgcagtgagcggagatcgtgccattatactccagcctgggtgacagagcaagactccatctcaaaataaaatcaacaaaagaaaaaggtgcatagggcagagtccgggagagaccggcctcaagcttccagttgtcatctcctggtagagtcttacagacacacttaattttcccagcaatgatatgtgacaacacgtactaaatattaccagccagaaagctcaccctagccttggggtctaggtttttattgcatgtcagtcacatagggcaatcacatgaccgactttagttacttaatcaccagctgctccagaggtcaaaatgatacagcatggcccaaggtccccaccataaatcacattattagcacaaactatctggcctggtatggcccaaggcctgaggtatacaaagacacccctacttgggaggatattccaaggacttagaggttatctcccaggagcccattaaggccagttttttctttgagatgtgctgggtttggacacttcaagcctgctgagttaacccttatagcacagtccccaaatgctgagggaccaactgggcctacaataagtttgtatctttaagggttaaggtgttttacccatacctccttgccttatatctcatgataatatgaggcttttggaaggcagtgacttattgtggcttggggcatgggtttttggagtcaggctgacctactggctgtatggcttgagactttgtctcttcatctgtaaaatggggaagttaaaacttcatggtgtgtatgtgtgtatgtgtgtgtttagacaga

SEQ ID NO: 327432 - DNA, 3147 bp, Homo sapiens
cccccttccccggctggggcggctggagagccgggagtcgctgggtgcgtggggctgcctcgccgcgtctcgccacgggctctgccagcagacagccttggcacacaggcacaagggctggagcccagagatgagagtgcccaagggagatgtgagcctggcgggctgcccgctaacctgtcgctgaagccccagaagcgggccctcaggccaggcctaccctgcctccggcccagcatgcgcctgtcggtgcggagggtgctgctggcagccggctgcgccctggtcctggtgctggcggttcagctgggacagcaggtgctagagtgccgggcggtgctggcgggcctgcggagcccccggggggccatgcggcctgagcaggaggagctggtgatggtgggcaccaaccacgtggaataccgctatggcaaggccatgccgctcatcttcgtgggtggcgtgcctcgcagtggcaccacgttgatgcgcgccatgctggacgcccaccccgaggtgcgctgcggcgaggagacccgcatcatcccgcgcgtgctggccatgcgccaggcctggtccaagtctggccgtgagaagctgcggctggatgaggcgggggtgacggatgaggtgctggacgccgccatgcaggccttcatcctggaggtgattgccaagcacggagagccggcccgcgtgctctgcaacaaggacccatttacgctcaagtcctcggtctacctgtcgcgcctgttccccaactccaagttcctgctgatggtgcgggacggccgggcctccgtgcactccatgatcacgcgcaaagtcaccattgcgggctttgacctcagcagctaccgtgactgcctcaccaagtggaacaaggccatcgaggtgatgtacgcccagtgcatggaggtaggcaaggagaagtgcctgcctgtgtactacgagcagctggtgctgcaccccaggcgctcactcaagctcatcctcgacttcctcggcatcgcctggagcgacgctgtcctccaccatgaagacctcattggcaagcccggtggtgtctccctgtccaagatcgagcggtccacggaccaggtcatcaagcctgttaacctggaagcgctctccaagtggactggccacatccctggggatgtggtgcgggacatggcccagatcgcccccatgctggctcagctcggctatgacccttatgcaaacccccccaactatggcaaccctgaccccttcgtcatcaacaacacacagcgggtcttgaaaggggactataaaacaccagccaatctgaaaggatattttcaggtgaaccagaacagcacctcctcccacttaggaagctcgtgatttccagatctccgcaaatgacttcattgccaagaagagaagaaaatgcatttaagtggaaatcggacctctaatccaagcatattgcttgctattaatcgccaaaacaggactgctgatgaggaatgtatttgcatatgtttgcaaaagctgaatcattgaaaacgtaccttgaaactctctatctctggacactccagggtagagaatgaagggtatggaagtagtccggcttttgaaacttaggtattttatatttttcccctcaagaacttttttttaagagacagatttgccatcctccttaatttgcaggactgccttggtggctttgtttgctgggacaaggcccacaacctgtgcctctcctattgacccttactttgaattcaaagaatctatttaagagtttaatatatgaggctttctttgattcctcctcagttctacctagtttcacagaggaaaaaaatactctttgaataaagtgaacagaggctcatttgtttgtgcctcactttactgaatgaatagggttttttttttctttccatactggattttgtcaggtagatttgtgatgagcaaaaagctggagaatataggtgcatgtaaggcacagctgaattcctgtgtcagggtccccagggccacccccaggatcgatgattggctagaagaactcagaattcagaagagctattatccttatggttatggtttattacagcaaaaggataaacattaaaatcagcaaaagaggccgggtggagtggctcacgcctgtaatcccagcactttgggaggccaaggcaggcagatcgcctgaggtcaggagttcgagaccagcctggccaacatggtgaaaccccgtctctactaaaaatacaaaaattacctgggcgtggtggtgtgcacctgtaatcccagctactcaggaggcttgaacctgggaggcggaggttgcagtgagcggagatcgtgccattatactccagcctgggtgacagagcaagactccatctcaaaataaaatcaacaaaagaaaaaggtgcatagggcagagtccgggagagaccggcctcaagcttccagttgtcatctcctggtagagtcttacagacacacttaattttcccagcaatgatatgtgacaacacgtactaaatattaccagccagaaagctcaccctagccttggggtctaggtttttattgcatgtcagtcacatagggcaatcacatgaccgactttagttacttaatcaccagctgctccagaggtcaaaatgatacagcatggcccaaggtccccaccataaatcacattattagcacaaactatctggcctggtatggcccaaggcctgaggtatacaaagacacccctacttgggaggatattccaaggacttagaggttatctcccaggagcccattaaggccagttttttctttgagatgtgctgggtttggacacttcaagcctgctgagttaacccttatagcacagtccccaaatgctgagggaccaactgggcctacaataagtttgtatctttaagggttaaggtgttttacccatacctccttgccttatatctcatgataatatgaggcttttggaaggcagtgacttattgtggcttggggcatgggtttttggagtcaggctgacctactggctgtatggcttgagactttgtctcttcatctgtaaaatggggaagttaaaacttcatggtgtgtatgtgtgtatgtgtgtgtttagacaga

SEQ ID NO: 327433 - DNA, 3094 bp, Homo sapiens
cccccttccccggctggggcggctggagagccgggagtcgctgggtgcgtggggctgcctcgccgcgtctcgccacgggctctgccagcagacagccttggcacacaggcacaagggctggagcccagagatgagagtgcccaagggagatgtgagcctggcgggctgcccgctaacctgtcgctgaagccccagaagcgggccctcaggccaggcctaccctgcctccggcccagcatgcgcctgtcggtgcggagggtgctgctggcagccggctgcgccctggtcctggtgctggcggttcagctgggacagcaggtgctagagtgccgggcggtgctggcgggcctgcggagcccccggggggccatgcggcctgagcaggaggagctggtgatggtgggcaccaaccacgtggaataccgctatggcaaggccatgccgctcatcttcgtgggtggcgtgcctcgcagtggcaccacgttgatgcgcgccatgctggacgcccaccccgaggtgcgctgcggcgaggagacccgcatcatcccgcgcgtgctggccatgcgccaggcctggtccaagtctggccgtgagaagctgcggctggatgaggcgggggtgacggatgaggtgctggacgccgccatgcaggccttcatcctggaggtgattgccaagcacggagagccggcccgcgtgctctgcaacaaggacccatttacgctcaagtcctcggtctacctgtcgcgcctgttccccaactccaagttcctgctgatggtgcgggacggccgggcctccgtgcactccatgatcacgcgcaaagtcaccattgcgggctttgacctcagcagctaccgtgactgcctcaccaagtggaacaaggccatcgaggtgatgtacgcccagtgcatggaggtaggcaaggagaagtgcctgcctgtgtactacgagcagctggtgctgcaccccaggcgctcactcaagctcatcctcgacttcctcggcatcgcctggagcgacgctgtcctccaccatgaagacctcattggcaagcccggtggtgtctccctgtccaagatcgagcggtccacggaccaggtcatcaagcctgttaacctggaagcgctctccaagtggactggccacatccctggggatgtggtgcgggacatggcccagatcgcccccatgctggctcagctcggctatgacccttatgcaaacccccccaactatggcaaccctgaccccttcgtcatcaacaacacacagcgggtcttgaaaggggactataaaacaccagccaatctgaaaggatattttcaggtgaaccagaacagcacctcctcccacttaggaagctcgtgatttccagatctccgcaaatgacttcattgccaagaagagaagaaaatgcatttaagtggaaatcggacctctaatccaagcatattgcttgctattaatcgccaaaacaggactgctgatgaggaatgtatttgcatatgtttgcaaaagctgaatcattgaaaacgtaccttgaaactctctatctctggacactccagggtagagaatgaagggtatggaagtagtccggcttttgaaacttaggtattttatatttttcccctcaagaacttttttttaagagacagatttgccatcctccttaatttgcaggactgccttggtggctttgtttgctgggacaaggcccacaacctgtgcctctcctattgacccttactttgaattcaaagaatctatttaagagtttaatatatgaggctttctttgattcctcctcagttctacctagtttcacagaggaaaaaaatactctttgaataaagtgaacagaggctcatttgtttgtgcctcactttactgaatgaatagggttttttttttctttccatactggattttgtcaggtagatttgtgatgagcaaaaagctggagaatataggtgcatgtaaggcacagctgaattcctgtgtcagggtccccagggccacccccaggatcgatgattggctagaagaactcagaattcagaagagctattatccttatggttatggtttattacagcaaaaggataaacattaaaatcagccaaggcaggcagatcgcctgaggtcaggagttcgagaccagcctggccaacatggtgaaaccccgtctctactaaaaatacaaaaattacctgggcgtggtggtgtgcacctgtaatcccagctactcaggaggcttgaacctgggaggcggaggttgcagtgagcggagatcgtgccattatactccagcctgggtgacagagcaagactccatctcaaaataaaatcaacaaaagaaaaaggtgcatagggcagagtccgggagagaccggcctcaagcttccagttgtcatctcctggtagagtcttacagacacacttaattttcccagcaatgatatgtgacaacacgtactaaatattaccagccagaaagctcaccctagccttggggtctaggtttttattgcatgtcagtcacatagggcaatcacatgaccgactttagttacttaatcaccagctgctccagaggtcaaaatgatacagcatggcccaaggtccccaccataaatcacattattagcacaaactatctggcctggtatggcccaaggcctgaggtatacaaagacacccctacttgggaggatattccaaggacttagaggttatctcccaggagcccattaaggccagttttttctttgagatgtgctgggtttggacacttcaagcctgctgagttaacccttatagcacagtccccaaatgctgagggaccaactgggcctacaataagtttgtatctttaagggttaaggtgttttacccatacctccttgccttatatctcatgataatatgaggcttttggaaggcagtgacttattgtggcttggggcatgggtttttggagtcaggctgacctactggctgtatggcttgagactttgtctcttcatctgtaaaatggggaagttaaaacttcatggtgtgtatgtgtgtatgtgtgtgtttagacaga

SEQ ID NO: 327434 - DNA, 3070 bp, Homo sapiens
cccccttccccggctggggcggctggagagccgggagtcgctgggtgcgtggggctgcctcgccgcgtctcgccacgggctctgccagcagacagccttggcacacaggcacaagggctggagcccagagatgagagtgcccaagggagatgtgagcctggcgggctgcccgctaacctgtcgctgaagccccagaagcgggccctcaggccaggcctaccctgcctccggcccagcatgcgcctgtcggtgcggagggtgctgctggcagccggctgcgccctggtcctggtgctggcggttcagctgggacagcaggtgctagagtgccgggcggtgctggcgggcctgcggagcccccggggggccatgcggcctgagcaggaggagctggtgatggtgggcaccaaccacgtggaataccgctatggcaaggccatgccgctcatcttcgtgggtggcgtgcctcgcagtggcaccacgttgatgcgcgccatgctggacgcccaccccgaggtgcctgcggctggatgaggcgggggtgacggatgaggtgctggacgccgccatgcaggccttcatcctggaggtgattgccaagcacggagagccggcccgcgtgctctgcaacaaggacccatttacgctcaagtcctcggtctacctgtcgcgcctgttccccaactccaagttcctgctgatggtgcgggacggccgggcctccgtgcactccatgatcacgcgcaaagtcaccattgcgggctttgacctcagcagctaccgtgactgcctcaccaagtggaacaaggccatcgaggtgatgtacgcccagtgcatggaggtaggcaaggagaagtgcctgcctgtgtactacgagcagctggtgctgcaccccaggcgctcactcaagctcatcctcgacttcctcggcatcgcctggagcgacgctgtcctccaccatgaagacctcattggcaagcccggtggtgtctccctgtccaagatcgagcggtccacggaccaggtcatcaagcctgttaacctggaagcgctctccaagtggactggccacatccctggggatgtggtgcgggacatggcccagatcgcccccatgctggctcagctcggctatgacccttatgcaaacccccccaactatggcaaccctgaccccttcgtcatcaacaacacacagcgggtcttgaaaggggactataaaacaccagccaatctgaaaggatattttcaggtgaaccagaacagcacctcctcccacttaggaagctcgtgatttccagatctccgcaaatgacttcattgccaagaagagaagaaaatgcatttaagtggaaatcggacctctaatccaagcatattgcttgctattaatcgccaaaacaggactgctgatgaggaatgtatttgcatatgtttgcaaaagctgaatcattgaaaacgtaccttgaaactctctatctctggacactccagggtagagaatgaagggtatggaagtagtccggcttttgaaacttaggtattttatatttttcccctcaagaacttttttttaagagacagatttgccatcctccttaatttgcaggactgccttggtggctttgtttgctgggacaaggcccacaacctgtgcctctcctattgacccttactttgaattcaaagaatctatttaagagtttaatatatgaggctttctttgattcctcctcagttctacctagtttcacagaggaaaaaaatactctttgaataaagtgaacagaggctcatttgtttgtgcctcactttactgaatgaatagggttttttttttctttccatactggattttgtcaggtagatttgtgatgagcaaaaagctggagaatataggtgcatgtaaggcacagctgaattcctgtgtcagggtccccagggccacccccaggatcgatgattggctagaagaactcagaattcagaagagctattatccttatggttatggtttattacagcaaaaggataaacattaaaatcagcaaaagaggccgggtggagtggctcacgcctgtaatcccagcactttgggaggccaaggcaggcagatcgcctgaggtcaggagttcgagaccagcctggccaacatggtgaaaccccgtctctactaaaaatacaaaaattacctgggcgtggtggtgtgcacctgtaatcccagctactcaggaggcttgaacctgggaggcggaggttgcagtgagcggagatcgtgccattatactccagcctgggtgacagagcaagactccatctcaaaataaaatcaacaaaagaaaaaggtgcatagggcagagtccgggagagaccggcctcaagcttccagttgtcatctcctggtagagtcttacagacacacttaattttcccagcaatgatatgtgacaacacgtactaaatattaccagccagaaagctcaccctagccttggggtctaggtttttattgcatgtcagtcacatagggcaatcacatgaccgactttagttacttaatcaccagctgctccagaggtcaaaatgatacagcatggcccaaggtccccaccataaatcacattattagcacaaactatctggcctggtatggcccaaggcctgaggtatacaaagacacccctacttgggaggatattccaaggacttagaggttatctcccaggagcccattaaggccagttttttctttgagatgtgctgggtttggacacttcaagcctgctgagttaacccttatagcacagtccccaaatgctgagggaccaactgggcctacaataagtttgtatctttaagggttaaggtgttttacccatacctccttgccttatatctcatgataatatgaggcttttggaaggcagtgacttattgtggcttggggcatgggtttttggagtcaggctgacctactggctgtatggcttgagactttgtctcttcatctgtaaaatggggaagttaaaacttcatggtgtgtatgtgtgtatgtgtgtgtttagacaga

SEQ ID NO: 327435 - DNA, 762 bp, Homo sapiens
tcctcaccagttcagggagcttttgccaggggagagacccccagagggctgggaccttggggaacaccccttagatgggacaaagcctggaggaagggactgagatgtgattgggtggggaaacataaggccaacagaagacctggagtcaaagttggacttgaaaaagtgggtctagggacaagggaaacctgctggccaccatcttcctgacaatcccctctcccccagctggctggcccgcacagaccccaaggatgtggcacgagtagagagcaagacggtgattgtaactccttctcagcgggacacggtaccactcccgcctggtggggcccgtgggcagctgggcaactggatgtccccagctgatttccagcgagctgtggatgagaggtttccaggctgcatgcagggtaaccagggcaggggcacagtggcaagggcacggaagatgtgaacaggtttggaacccttcatccaggggatgccttcctccacaggccgcaccatgtatgtgcttccattcagcatgggtcctgtgggctccccgctgtcccgcatcggggtgcagctcactgactcagcctatgtggtggcaagcatgcgtattatgacccgactggggacacctgtgcttcaggccctgggagatggtgactttgtcaagtgtctgcactccgtgggccagcccctgacaggacaaggtaagcacctgctctgcccaaggggaacacagaggccttcttgtactcagaggaa

SEQ ID NO: 327436 - DNA, 995 bp, Homo sapiens
  misc_feature (771)..(771): n is a, c, g, or t
tcaaccaaaccgggctaaggtacgaggcggtttaatcggccgaggcctccccggctccgctcggttcctggccaccccgcagcccctgcccaggtgccatggccgcattgtaccgccctggcctgcggcttaactggcatgggctgagccccttgggctggccatcatgccgtagcatccagaccctgcgagtgcttagtggagatctgggccagcttcccactggcattcgagattttgtagagcacagtgcccgcctgtgccaaccagagggcatccacatctgtgatggaactgaggctgagaatactgccacactgaccctgctggagcagcagggcctcatccgaaagctccccaagtacaataactgctggctggcccgcacagaccccaaggatgtggcacgagtagagagcaagacggtgattgtaactccttctcagcgggacacggtaccactcccgcctggtggggcccgtgggcagctgggcaactggatgtccccagctgatttccagcgagctgtggatgagaggtttccaggctgcatgcagggccgcaccatgtatgtgcttccattcagcatgggtcctgtgggctccccgctgtcccgcatcggggtgcagctcactgactcagcctatgtggtggcaagcatgcgtattatgacccgactggggacacctgtgcttcaggccctgggagatggtgactttgtcaagtgtctgcactccgtgggccagcccctgacaggacaaggggagccantgagccagttggcgtgcaccaagagaaaaacttgatttgttccctttgcgccacagccgggggacaactccttcgcgcgcggcaattgtggggagccctcgctgggcgaagtgtttcgcttccgtaccctccgggggccgcgatgaggcagggggaggcatcttcttgtcagccagtcgggaggaagatttgggcggccctcgttggaggacccacatttccat

SEQ ID NO: 327437 - DNA, 529 bp, Homo sapiens
caaagggtctgaaaatgggatagccgaggtcttaggagagagagtaccagtcaagctcaccagaagggctggagttagggtccaaagaaaagggctgcctgtgactctgttcattggtgatctaggggtacccctggtatacgaggccttcaactggcgtcatggggtgtttgtgggcagcgccatgcgctctgagtccactgctgcagcagaacacaaaggtgagcaccctcaccattcctccctctcctgtgtgtgcacacagcacgtcctctctcccttcctgagccagaccttccttttgtccacccctggagtctgatatggccccacctcttcccacttctatcttttccccatccctgaagatattcagaaccataagcctttcacagcttcctctcccactcttttctcacatagctcagctggccgcaccttcatggctaaacaacctgagctcttggagatgccctggctcccctctctctgctccgtatcacacaaggttctaggcagctgatgaggc

SEQ ID NO: 327438 - DNA, 270 bp, Homo sapiens
catgtatgtgtgtgttgggggtcgacatgaccttggaaataatagtgtttgtatttcctctgccaggtgacaaggagccctgtgcacatcccaactctcgattttgtgccccggctcgccagtgccccatcatggacccagcctgggaggccccagagggtgtccccattgacgccatcatctttggtggccgcagacccaaaggtaaacaacatatgagctccatgttcttggcaaaagggctatctctgtattagggcctacctccct

SEQ ID NO: 327439 - DNA, 2202 bp, Homo sapiens
  misc_feature (36)..(36): n is a, c, g, or t
cgagtggcgccgaaaaggtaggctagtagaggctgngtgtgaatcggccgaggcctccccggctccgctcggttcctggccaccccgcagcccctgcccaggtgccatggccgcattgtaccgccctggcctgcggcttaactggcatgggctgagccccttgggctggccatcatgccgtagcatccagaccctgcgagtgcttagtggagatctgggccagcttcccactggcattcgagattttgtagagcacagtgcccgcctgtgccaaccagagggcatccacatctgtgatggaactgaggctgagaatactgccacactgaccctgctggagcagcagggcctcatccgaaagctccccaagtacaataactgctggctggcccgcacagaccccaaggatgtggcacgagtagagagcaagacggtgattgtaactccttctcagcgggacacggtaccactcccgcctggtggggcccgtgggcagctgggcaactggatgtccccagctgatttccagcgagctgtggatgagaggtttccaggctgcatgcagggccgcaccatgtatgtgcttccattcagcatgggtcctgtgggctccccgctgtcccgcatcggggtgcagctcactgactcagcctatgtggtggcaagcatgcgtattatgacccgactggggacacctgtgcttcaggccctgggagatggtgactttgtcaagtgtctgcactccgtgggccagcccctgacaggacaaggggagccagtgagccagtggccgtgcaacccagagaaaaccctgattggccacgtgcccgaccagcgggagatcatctccttcggcagcggctatggtggcaactccctgctgggcaagaagtgctttgccctacgcatcgcctctcggctggcccgggatgagggctggctggcagagcacatgctgatcctgggcatcaccagccctgcagggaagaagcgctatgtggcagccgccttccctagtgcctgtggcaagaccaacctggctatgatgcggcctgcactgccaggctggaaagtggagtgtgtgggggatgatattgcttggatgaggtttgacagtgaaggtcgactccgggccatcaaccctgagaacggcttctttggggttgcccctggtacctctgccaccaccaatcccaacgccatggctacaatccagagtaacactatttttaccaatgtggctgagaccagtgatggtggcgtgtactgggagggcattgaccagcctcttccacctggtgttactgtgacctcctggctgggcaaaccctggaaacctggtgacaaggagccctgtgcacatcccaactctcgattttgtgccccggctcgccagtgccccatcatggacccagcctgggaggccccagagggtgtccccattgacgccatcatctttggtggccgcagacccaaaggggtacccctggtatacgaggccttcaactggcgtcatggggtgtttgtgggcagcgccatgcgctctgagtccactgctgcagcagaacacaaagggaagatcatcatgcacgacccatttgccatgcggcccttttttggctacaacttcgggcactacctggaacactggctgagcatggaagggcgcaagggggcccagctgccccgtatcttccatgtcaactggttccggcgtgacgaggcagggcacttcctgtggccaggctttggggagaatgctcgggtgctagactggatctgccggcggttagagggggaggacagtgcccgagagacacccattgggctggtgccaaaggaaggagccttggatctcagcggcctcagagctatagacaccactcagctgttctccctccccaaggacttctgggaacaggaggttcgtgacattcggagctacctgacagagcaggtcaaccaggatctgcccaaagaggtgttggctgagcttgaggccctggagagacgtgtgcacaaaatgtgacctgaggccctagtctagcaagaggacatagcaccctcatctgggaatagggaaggcaccttgcagaaaatatgagcaatttgatattaactaacatcttcaatgtgccatagaccttcccacaaagactgtccaataataagagatgcttatctattttacaaaaaaattgt

SEQ ID NO: 327440 - DNA, 2194 bp, Homo sapiens
tcaaccaaaccgggctaaggtacgaggcggtttaatcggccgaggcctccccggctccgctcggttcctggccaccccgcagcccctgcccaggtgccatggccgcattgtaccgccctggcctgcggcttaactggcatgggctgagccccttgggctggccatcatgccgtagcatccagaccctgcgagtgcttagtggagatctgggccagcttcccactggcattcgagattttgtagagcacagtgcccgcctgtgccaaccagagggcatccacatctgtgatggaactgaggctgagaatactgccacactgaccctgctggagcagcagggcctcatccgaaagctccccaagtacaataactgctggctggcccgcacagaccccaaggatgtggcacgagtagagagcaagacggtgattgtaactccttctcagcgggacacggtaccactcccgcctggtggggcccgtgggcagctgggcaactggatgtccccagctgatttccagcgagctgtggatgagaggtttccaggctgcatgcagggccgcaccatgtatgtgcttccattcagcatgggtcctgtgggctccccgctgtcccgcatcggggtgcagctcactgactcagcctatgtggtggcaagcatgcgtattatgacccgactggggacacctgtgcttcaggccctgggagatggtgactttgtcaagtgtctgcactccgtgggccagcccctgacaggacaaggggagccagtgagccagtggccgtgcaacccagagaaaaccctgattggccacgtgcccgaccagcgggagatcatctccttcggcagcggctatggtggcaactccctgctgggcaagaagtgctttgccctacgcatcgcctctcggctggcccgggatgagggctggctggcagagcacatgctgatcctgggcatcaccagccctgcagggaagaagcgctatgtggcagccgccttccctagtgcctgtggcaagaccaacctggctatgatgcggcctgcactgccaggctggaaagtggagtgtgtgggggatgatattgcttggatgaggtttgacagtgaaggtcgactccgggccatcaaccctgagaacggcttctttggggttgcccctggtacctctgccaccaccaatcccaacgccatggctacaatccagagtaacactatttttaccaatgtggctgagaccagtgatggtggcgtgtactgggagggcattgaccagcctcttccacctggtgttactgtgacctcctggctgggcaaaccctggaaacctggtgacaaggagccctgtgcacatcccaactctcgattttgtgccccggctcgccagtgccccatcatggacccagcctgggaggccccagagggtgtccccattgacgccatcatctttggtggccgcagacccaaaggggtacccctggtatacgaggccttcaactggcgtcatggggtgtttgtgggcagcgccatgcgctctgagtccactgctgcagcagaacacaaagggaagatcatcatgcacgacccatttgccatgcggcccttttttggctacaacttcgggcactacctggaacactggctgagcatggaagggcgcaagggggcccagctgccccgtatcttccatgtcaactggttccggcgtgacgaggcagggcacttcctgtggccaggctttggggagaatgctcgggtgctagactggatctgccggcggttagagggggaggacagtgcccgagagacacccattgggctggtgccaaaggaaggagccttggatctcagcggcctcagagctatagacaccactcagctgttctccctccccaaggacttctgggaacaggaggttcgtgacattcggagctacctgacagagcaggtcaaccaggatctgcccaaagaggtgttggctgagcttgaggccctggagagacgtgtgcacaaaatgtgacctgaggccctagtctagcaagaggacatagcaccctcatctgggaatagggaaggcaccttgcagaaaatatgagcaatttgatattaactaacatcttcaatgtgccatagaccttcccacaaagactgtccaataataagagatgcttatctattttacaaaaaaattgt

SEQ ID NO: 327441 - DNA, 1899 bp, Homo sapiens
tgcccccctcctttttaagcgcctcccgccagcctctgctgtggctcgcttcgccgcgctccctccttccccgccttccatacctccccggctccgctcggttcctggccaccccgcagcccctgcccaggtgccatggccgcattgtaccgccctggcctgcggcttaactggcatgggctgagccccttgggctggccatcatgccgtagcatccagaccctgcgagtgcttagtggagatctgggccagcttcccactggcattcgagattttgtagagcacagtgcccgcctgtgccaaccagagggcatccacatctgtgatggaactgaggctgagaatactgccacactgaccctgctggagcagcagggcctcatccgaaagctccccaagtacaataactgctggctggcccgcacagaccccaaggatgtggcacgagtagagagcaagacggtgattgtaactccttctcagcgggacacggtaccactcccgcctggtggggcccgtgggcagctgggcaactggatgtccccagctgatttccagcgagctgtggatgagaggtttccaggctgcatgcagggccgcaccatgtatgtgcttccattcagcatgggtcctgtgggctccccgctgtcccgcatcggggtgcagctcactgactcagcctatgtggtggcaagcatgcgtattatgacccgactggggacacctgtgcttcaggccctgggagatggtgactttgtcaagtgtctgcactccgtgggccagcccctgacaggacaaggggagccagtgagccagtggccgtgcaacccagagaaaaccctgattggccacgtgcccgaccagcgggagatcatctccttcggcagcggctatggtggcaactccctgctgggcaagaagtgctttgccctacgcatcgcctctcggctggcccgggatgagggctggctggcagagcacatgctgatcctgggcatcaccagccctgcagggaagaagcgctatgtggcagccgccttccctagtgcctgtggcaagaccaacctggctatgatgcggcctgcactgccaggctggaaagtggagtgtgtgggggatgatattgcttggatgaggtttgacagtgaaggtcgactccgggccatcaaccctgagaacggcttctttggggttgcccctggtacctctgccaccaccaatcccaacgccatggctacaatccagagtaacactatttttaccaatgtggctgagaccagtgatggtggcgtgtactgggagggcattgaccagcctcttccacctggtgttactgtgacctcctggctgggcaaaccctggaaacctggtgacaaggagccctgtgcacatcccaactctcgattttgtgccccggctcgccagtgccccatcatggacccagcctgggaggccccagagggtgtccccattgacgccatcatctttggtggccgcagacccaaaggggtacccctggtatacgaggccttcaactggcgtcatggggtgtttgtgggcagcgccatgcgctctgagtccactgctgcagcagaacacaaaggacttctgggaacaggaggttcgtgacattcggagctacctgacagagcaggtcaaccaggatctgcccaaagaggtgttggctgagcttgaggccctggagagacgtgtgcacaaaatgtgacctgaggccctagtctagcaagaggacatagcaccctcatctgggaatagggaaggcaccttgcagaaaatatgagcaatttgatattaactaacatcttcaatgtgccatagaccttcccacaaagactgtccaataataagagatgcttatctattttacaaaaaaattgt

SEQ ID NO: 327442 - DNA, 1812 bp, Homo sapiens
tgcccccctcctttttaagcgcctcccgccagcctctgctgtggctcgcttcgccgcgctccctccttccccgccttccatacctccccggctccgctcggttcctggccaccccgcagcccctgcccaggtgccatggccgcattgtaccgccctggcctgcggcttaactggcatgggctgagccccttgggctggccatcatgccgtagcatccagaccctgcgagtgcttagtggagatctgggccagcttcccactggcattcgagattttgtagagcacagtgcccgcctgtgccaaccagagggcatccacatctgtgatggaactgaggctgagaatactgccacactgaccctgctggagcagcagggcctcatccgaaagctccccaagtacaataactgctggctggcccgcacagaccccaaggatgtggcacgagtagagagcaagacggtgattgtaactccttctcagcgggacacggtaccactcccgcctggtggggcccgtgggcagctgggcaactggatgtccccagctgatttccagcgagctgtggatgagaggtttccaggctgcatgcagggccgcaccatgtatgtgcttccattcagcatgggtcctgtgggctccccgctgtcccgcatcggggtgcagctcactgactcagcctatgtggtggcaagcatgcgtattatgacccgactggggacacctgtgcttcaggccctgggagatggtgactttgtcaagtgtctgcactccgtgggccagcccctgacaggacaaggggagccagtgagccagtggccgtgcaacccagagaaaaccctgattggccacgtgcccgaccagcgggagatcatctccttcggcagcggctatggtggcaactccctgctgggcaagaagtgctttgccctacgcatcgcctctcggctggcccgggatgagggctggctggcagagcacatgctgatcctgggcatcaccagccctgcagggaagaagcgctatgtggcagccgccttccctagtgcctgtggcaagaccaacctggctatgatgcggcctgcactgccaggctggaaagtggagtgtgtgggggatgatattgcttggatgaggtttgacagtgaaggtcgactccgggccatcaaccctgagaacggcttctttggggttgcccctggtacctctgccaccaccaatcccaacgccatggctacaatccagagtaacactatttttaccaatgtggctgagaccagtgatggtggcgtgtactgggagggcattgaccagcctcttccacctggtgttactgtgacctcctggctgggcaaaccctggaaacctggtgacaaggagccctgtgcacatcccaactctcgattttgtgccccggctcgccagtgccccatcatggacccagcctgggaggccccagagggtgtccccattgacgccatcatctttggtggccgcagacccaaagagatggggtttcgtcacattgcccaggctgatctcaaattcctgtggtcaagcgagctgcccgcctcagcctctcaaagtactgggattacaggtgtgagctaccacgcctattatactttctaatgaaaaaatgaaaccacatcgtttttgcatctattacatgtcaccagaagaaatgattatctttatttttttaacttgacaatgtagtttgcacaatttcctatggtataaaaatagaaggctacaacaaacctataccaggaataggtaccttaaaaaaaaattgaagactacaacacc

SEQ ID NO: 327443 - DNA, 2146 bp, Homo sapiens
tgcccccctcctttttaagcgcctcccgccagcctctgctgtggctcgcttcgccgcgctccctccttccccgccttccatacctccccggctccgctcggttcctggccaccccgcagcccctgcccaggtgccatggccgcattgtaccgccctggcctgcggcttaactggcatgggctgagccccttgggctggccatcatgccgtagcatccagaccctgcgagtgcttagtggagatctgggccagcttcccactggcattcgagattttgtagagcacagtgcccgcctgtgccaaccagagggcatccacatctgtgatggaactgaggctgagaatactgccacactgaccctgctggagcagcagggcctcatccgaaagctccccaagtacaataactgctggctggcccgcacagaccccaaggatgtggcacgagtagagagcaagacggtgattgtaactccttctcagcgggacacggtaccactcccgcctggtggggcccgtgggcagctgggcaactggatgtccccagctgatttccagcgagctgtggatgagaggtttccaggctgcatgcagggccgcaccatgtatgtgcttccattcagcatgggtcctgtgggctccccgctgtcccgcatcggggtgcagctcactgactcagcctatgtggtggcaagcatgcgtattatgacccgactggggacacctgtgcttcaggccctgggagatggtgactttgtcaagtgtctgcactccgtgggccagcccctgacaggacaaggggagccagtgagccagtggccgtgcaacccagagaaaaccctgattggccacgtgcccgaccagcgggagatcatctccttcggcagcggctatggtggcaactccctgctgggcaagaagtgctttgccctacgcatcgcctctcggctggcccgggatgagggctggctggcagagcacatgctgatcctgggcatcaccagccctgcagggaagaagcgctatgtggcagccgccttccctagtgcctgtggcaagaccaacctggctatgatgcggcctgcactgccaggctggaaagtggagtgtgtgggggatgatattgcttggatgaggtttgacagtgaaggtcgactccgggccatcaaccctgagaacggcttctttggggttgcccctggtacctctgccaccaccaatcccaacgccatggctacaatccagagtaacactatttttaccaatgtggctgagaccagtgatggtggcgtgtactgggagggcattgaccagcctcttccacctggtgttactgtgacctcctggctgggcaaaccctggaaacctggtatgtgcggtggggaaggtgtggcacagcctccaggcctcagcaccttaatggtggaaaagctttctccacaacctccaaccatcttctaggactgccaggaggcacagaagtcatgaacgtttgcagtttccagtcccaggcaaaatctcagttcatgtcccaactccaccagtcactggttttgtgatctggctaagttgctcaacttccctaagctttagtttccacatcagttgaatgagggtagttgtgatagtacctatctcatgagattgttggaggattaaatagtgcataaaaagggtttagcacactgacaaatacacagtaaattctcaataataaaaaaaaaaaaaaaaaaaaaaaaaaaaaaaaaaaaaaaagaaaaaaaaaaaaaaaaaaaaaaaaataaaaaaagaaaaatattatatgaaaaaaaaaaaaaaataaaatggaaaaaaatataaaaaaaccctgggcccaattcttattaaagttttttggacccccccaccctgggggggggcccgggccccaattggccctttagggggggggtttaaaattacctgggcgggggtttaaaagggtgggattgggaaaacccgggggttacccaatttaaatcccttgggaaaaattccctttttcgcaggttgggtaaatacaaaaaggcccgccccggtcgccttttccaaaagtttgccaaccttaatggggaaaggcaaatttgtaggcgtaattttttggtaaaaatccgggtaaatttttttt

SEQ ID NO: 327444 - DNA, 1751 bp, Homo sapiens
tgcccccctcctttttaagcgcctcccgccagcctctgctgtggctcgcttcgccgcgctccctccttccccgccttccatacctccccggctccgctcggttcctggccaccccgcagcccctgcccaggtgccatggccgcattgtaccgccctggcctgcggcttaactggcatgggctgagccccttgggctggccatcatgccgtagcatccagaccctgcgagtgcttagtggagatctgggccagcttcccactggcattcgagattttgtagagcacagtgcccgcctgtgccaaccagagggcatccacatctgtgatggaactgaggctgagaatactgccacactgaccctgctggagcagcagggcctcatccgaaagctccccaagtacaataactgctggctggcccgcacagaccccaaggatgtggcacgagtagagagcaagacggtgattgtaactccttctcagcgggacacggtaccactcccgcctggtggggcccgtgggcagctgggcaactggatgtccccagctgatttccagcgagctgtggatgagaggtttccaggctgcatgcagggccgcaccatgtatgtgcttccattcagcatgggtcctgtgggctccccgctgtcccgcatcggggtgcagctcactgactcagcctatgtggtggcaagcatgcgtattatgacccgactggggacacctgtgcttcaggccctgggagatggtgactttgtcaagtgtctgcactccgtgggccagcccctgacaggacaaggggagccagtgagccagtggccgtgcaacccagagaaaaccctgattggccacgtgcccgaccagcgggagatcatctccttcggcagcggctatggtggcaactccctgctgggcaagaagtgctttgccctacgcatcgcctctcggctggcccgggatgagggctggctggcagagcacatgctgatcctgggcatcaccagccctgcagggaagaagcgctatgtggcagccgccttccctagtgcctgtggcaagaccaacctggctatgatgcggcctgcactgccaggctggaaagtggagtgtgtgggggatgatattgcttggatgaggtttgacagtgaaggtcgactccgggccatcaaccctgagaacggcttctttggggttgcccctggtacctctgccaccaccaatcccaacgccatggctacaatccagagtaacactatttttaccaatgtggctgagaccagtgatggtggcgtgtactgggagggcattgaccagcctcttccacctggtgttactgtgacctcctggctgggcaaaccctggaaacctggtatgtgcggtggggaaggtgtggcacagcctccaggcctcagcaccttaatggtggaaaagctttctccacaacctccaaccatcttctaggactgccaggaggcacagaagtcatgaacgtttgcagtttccagtcccaggcaaaatctcagttcatgtcccaactccaccagtcactggttttgtgatctggctaagttgctcaacttccctaagctttagtttccacatcagttgaatgagggtagttgtgatagtacctatctcatgagattgttggaggattaaatagtgcataaaaagggtttagcacactgacaaatacacagtaaattctcaataataaatacaggctggatttttttttaatgaaaggaaaa

SEQ ID NO: 327445 - DNA, 2274 bp, Homo sapiens
  misc_feature (36)..(36): n is a, c, g, or t
cgagtggcgccgaaaaggtaggctagtagaggctgngtgtgaatcggccgaggcctccccggctccgctcggttcctggccaccccgcagcccctgcccaggtgccatggccgcattgtaccgccctggcctgcggctaacaccctctgagtctgagctgccagcaagctgctgttccaccctcccaccaacaccaaagctctctaggcttaactggcatgggctgagccccttgggctggccatcatgccgtagcatccagaccctgcgagtgcttagtggagatctgggccagcttcccactggcattcgagattttgtagagcacagtgcccgcctgtgccaaccagagggcatccacatctgtgatggaactgaggctgagaatactgccacactgaccctgctggagcagcagggcctcatccgaaagctccccaagtacaataactgctggctggcccgcacagaccccaaggatgtggcacgagtagagagcaagacggtgattgtaactccttctcagcgggacacggtaccactcccgcctggtggggcccgtgggcagctgggcaactggatgtccccagctgatttccagcgagctgtggatgagaggtttccaggctgcatgcagggccgcaccatgtatgtgcttccattcagcatgggtcctgtgggctccccgctgtcccgcatcggggtgcagctcactgactcagcctatgtggtggcaagcatgcgtattatgacccgactggggacacctgtgcttcaggccctgggagatggtgactttgtcaagtgtctgcactccgtgggccagcccctgacaggacaaggggagccagtgagccagtggccgtgcaacccagagaaaaccctgattggccacgtgcccgaccagcgggagatcatctccttcggcagcggctatggtggcaactccctgctgggcaagaagtgctttgccctacgcatcgcctctcggctggcccgggatgagggctggctggcagagcacatgctgatcctgggcatcaccagccctgcagggaagaagcgctatgtggcagccgccttccctagtgcctgtggcaagaccaacctggctatgatgcggcctgcactgccaggctggaaagtggagtgtgtgggggatgatattgcttggatgaggtttgacagtgaaggtcgactccgggccatcaaccctgagaacggcttctttggggttgcccctggtacctctgccaccaccaatcccaacgccatggctacaatccagagtaacactatttttaccaatgtggctgagaccagtgatggtggcgtgtactgggagggcattgaccagcctcttccacctggtgttactgtgacctcctggctgggcaaaccctggaaacctggtgacaaggagccctgtgcacatcccaactctcgattttgtgccccggctcgccagtgccccatcatggacccagcctgggaggccccagagggtgtccccattgacgccatcatctttggtggccgcagacccaaaggggtacccctggtatacgaggccttcaactggcgtcatggggtgtttgtgggcagcgccatgcgctctgagtccactgctgcagcagaacacaaagggaagatcatcatgcacgacccatttgccatgcggcccttttttggctacaacttcgggcactacctggaacactggctgagcatggaagggcgcaagggggcccagctgccccgtatcttccatgtcaactggttccggcgtgacgaggcagggcacttcctgtggccaggctttggggagaatgctcgggtgctagactggatctgccggcggttagagggggaggacagtgcccgagagacacccattgggctggtgccaaaggaaggagccttggatctcagcggcctcagagctatagacaccactcagctgttctccctccccaaggacttctgggaacaggaggttcgtgacattcggagctacctgacagagcaggtcaaccaggatctgcccaaagaggtgttggctgagcttgaggccctggagagacgtgtgcacaaaatgtgacctgaggccctagtctagcaagaggacatagcaccctcatctgggaatagggaaggcaccttgcagaaaatatgagcaatttgatattaactaacatcttcaatgtgccatagaccttcccacaaagactgtccaataataagagatgcttatctattttacaaaaaaattgt

SEQ ID NO: 327446 - DNA, 2642 bp, Homo sapiens
tgcccccctcctttttaagcgcctcccgccagcctctgctgtggctcgcttcgccgcgctccctccttccccgccttccatacctccccggctccgctcggttcctggccaccccgcagcccctgcccaggtgccatggccgcattgtaccgccctggcctgcggtgagtgacccccggcccggggcccacccgcaccttccgctgcgctcgccccctcggggctgccagtggcgctctcctgctctcagcctccgccaggtttcccatcctaggcggaggcgggcaggggcgactgctgtgggtccagcctcccgcgccgcgcgtctcttgggagggcagccggccggtgctcctcgtttccgcctgcacctccccttctctgcctcgctcgcctctgaccgcgcgatctctatctgccactctcagaacttcctctctctcctcgctcctctctgctgagccaggtctccgcatatcctcctttccttcccagatacctccctcggacctctaacgggctctcagccagcgccccagggtacttcgagaggcagcagggccctggggacaagggcttaactggcatgggctgagccccttgggctggccatcatgccgtagcatccagaccctgcgagtgcttagtggagatctgggccagcttcccactggcattcgagattttgtagagcacagtgcccgcctgtgccaaccagagggcatccacatctgtgatggaactgaggctgagaatactgccacactgaccctgctggagcagcagggcctcatccgaaagctccccaagtacaataactgctggctggcccgcacagaccccaaggatgtggcacgagtagagagcaagacggtgattgtaactccttctcagcgggacacggtaccactcccgcctggtggggcccgtgggcagctgggcaactggatgtccccagctgatttccagcgagctgtggatgagaggtttccaggctgcatgcagggccgcaccatgtatgtgcttccattcagcatgggtcctgtgggctccccgctgtcccgcatcggggtgcagctcactgactcagcctatgtggtggcaagcatgcgtattatgacccgactggggacacctgtgcttcaggccctgggagatggtgactttgtcaagtgtctgcactccgtgggccagcccctgacaggacaaggggagccagtgagccagtggccgtgcaacccagagaaaaccctgattggccacgtgcccgaccagcgggagatcatctccttcggcagcggctatggtggcaactccctgctgggcaagaagtgctttgccctacgcatcgcctctcggctggcccgggatgagggctggctggcagagcacatgctgatcctgggcatcaccagccctgcagggaagaagcgctatgtggcagccgccttccctagtgcctgtggcaagaccaacctggctatgatgcggcctgcactgccaggctggaaagtggagtgtgtgggggatgatattgcttggatgaggtttgacagtgaaggtcgactccgggccatcaaccctgagaacggcttctttggggttgcccctggtacctctgccaccaccaatcccaacgccatggctacaatccagagtaacactatttttaccaatgtggctgagaccagtgatggtggcgtgtactgggagggcattgaccagcctcttccacctggtgttactgtgacctcctggctgggcaaaccctggaaacctggtgacaaggagccctgtgcacatcccaactctcgattttgtgccccggctcgccagtgccccatcatggacccagcctgggaggccccagagggtgtccccattgacgccatcatctttggtggccgcagacccaaaggggtacccctggtatacgaggccttcaactggcgtcatggggtgtttgtgggcagcgccatgcgctctgagtccactgctgcagcagaacacaaagggaagatcatcatgcacgacccatttgccatgcggcccttttttggctacaacttcgggcactacctggaacactggctgagcatggaagggcgcaagggggcccagctgccccgtatcttccatgtcaactggttccggcgtgacgaggcagggcacttcctgtggccaggctttggggagaatgctcgggtgctagactggatctgccggcggttagagggggaggacagtgcccgagagacacccattgggctggtgccaaaggaaggagccttggatctcagcggcctcagagctatagacaccactcagctgttctccctccccaaggacttctgggaacaggaggttcgtgacattcggagctacctgacagagcaggtcaaccaggatctgcccaaagaggtgttggctgagcttgaggccctggagagacgtgtgcacaaaatgtgacctgaggccctagtctagcaagaggacatagcaccctcatctgggaatagggaaggcaccttgcagaaaatatgagcaatttgatattaactaacatcttcaatgtgccatagaccttcccacaaagactgtccaataataagagatgcttatctattttacaaaaaaattgt

SEQ ID NO: 327447 - DNA, 2150 bp, Homo sapiens
  misc_feature (60)..(60): n is a, c, g, or t
tttaagaactggggaaccaattggagtggcctagaaaaggcgcgccgattatgagggagnctagggggccaagttcgatttggcacggatgaagcgagttccgaatgaaacccttggacggacaaggtgggcgtatatgttcgtgtctgtattttcgtagcgtgtctctatcttcccactggcattcgagattttgtagagcacagtgcccgcctgtgccaaccagagggcatccacatctgtgatggaactgaggctgagaatactgccacactgaccctgctggagcagcagggcctcatccgaaagctccccaagtacaataactgctggctggcccgcacagaccccaaggatgtggcacgagtagagagcaagacggtgattgtaactccttctcagcgggacacggtaccactcccgcctggtggggcccgtgggcagctgggcaactggatgtccccagctgatttccagcgagctgtggatgagaggtttccaggctgcatgcagggccgcaccatgtatgtgcttccattcagcatgggtcctgtgggctccccgctgtcccgcatcggggtgcagctcactgactcagcctatgtggtggcaagcatgcgtattatgacccgactggggacacctgtgcttcaggccctgggagatggtgactttgtcaagtgtctgcactccgtgggccagcccctgacaggacaaggggagccagtgagccagtggccgtgcaacccagagaaaaccctgattggccacgtgcccgaccagcgggagatcatctccttcggcagcggctatggtggcaactccctgctgggcaagaagtgctttgccctacgcatcgcctctcggctggcccgggatgagggctggctggcagagcacatgctgatcctgggcatcaccagccctgcagggaagaagcgctatgtggcagccgccttccctagtgcctgtggcaagaccaacctggctatgatgcggcctgcactgccaggctggaaagtggagtgtgtgggggatgatattgcttggatgaggtttgacagtgaaggtcgactccgggccatcaaccctgagaacggcttctttggggttgcccctggtacctctgccaccaccaatcccaacgccatggctacaatccagagtaacactatttttaccaatgtggctgagaccagtgatggtggcgtgtactgggagggcattgaccagcctcttccacctggtgttactgtgacctcctggctgggcaaaccctggaaacctggtgacaaggagccctgtgcacatcccaactctcgattttgtgccccggctcgccagtgccccatcatggacccagcctgggaggccccagagggtgtccccattgacgccatcatctttggtggccgcagacccaaaggggtacccctggtatacgaggccttcaactggcgtcatggggtgtttgtgggcagcgccatgcgctctgagtccactgctgcagcagaacacaaagggaagatcatcatgcacgacccatttgccatgcggcccttttttggctacaacttcgggcactacctggaacactggctgagcatggaagggcgcaagggggcccagctgccccgtatcttccatgtcaactggttccggcgtgacgaggcagggcacttcctgtggccaggctttggggagaatgctcgggtgctagactggatctgccggcggttagagggggaggacagtgcccgagagacacccattgggctggtgccaaaggaaggagccttggatctcagcggcctcagagctatagacaccactcagctgttctccctccccaaggacttctgggaacaggaggttcgtgacattcggagctacctgacagagcaggtcaaccaggatctgcccaaagaggtgttggctgagcttgaggccctggagagacgtgtgcacaaaatgtgacctgaggccctagtctagcaagaggacatagcaccctcatctgggaatagggaaggcaccttgcagaaaatatgagcaatttgatattaactaacatcttcaatgtgccatagaccttcccacaaagactgtccaataataagagatgcttatctattttacaaaaaaattgt

SEQ ID NO: 327448 - DNA, 2077 bp, Homo sapiens
tttacgactcgtttcttgcccacgactcgtttacgactcgtttcttgcccacgactcgcatccagaccctgcgagtgcttagtggagatctgggccagcttcccactggcattcgagattttgtagagcacagtgcccgcctgtgccaaccagagggcatccacatctgtgatggaactgaggctgagaatactgccacactgaccctgctggagcagcagggcctcatccgaaagctccccaagtacaataactgctggctggcccgcacagaccccaaggatgtggcacgagtagagagcaagacggtgattgtaactccttctcagcgggacacggtaccactcccgcctggtggggcccgtgggcagctgggcaactggatgtccccagctgatttccagcgagctgtggatgagaggtttccaggctgcatgcagggccgcaccatgtatgtgcttccattcagcatgggtcctgtgggctccccgctgtcccgcatcggggtgcagctcactgactcagcctatgtggtggcaagcatgcgtattatgacccgactggggacacctgtgcttcaggccctgggagatggtgactttgtcaagtgtctgcactccgtgggccagcccctgacaggacaaggggagccagtgagccagtggccgtgcaacccagagaaaaccctgattggccacgtgcccgaccagcgggagatcatctccttcggcagcggctatggtggcaactccctgctgggcaagaagtgctttgccctacgcatcgcctctcggctggcccgggatgagggctggctggcagagcacatgctgatcctgggcatcaccagccctgcagggaagaagcgctatgtggcagccgccttccctagtgcctgtggcaagaccaacctggctatgatgcggcctgcactgccaggctggaaagtggagtgtgtgggggatgatattgcttggatgaggtttgacagtgaaggtcgactccgggccatcaaccctgagaacggcttctttggggttgcccctggtacctctgccaccaccaatcccaacgccatggctacaatccagagtaacactatttttaccaatgtggctgagaccagtgatggtggcgtgtactgggagggcattgaccagcctcttccacctggtgttactgtgacctcctggctgggcaaaccctggaaacctggtgacaaggagccctgtgcacatcccaactctcgattttgtgccccggctcgccagtgccccatcatggacccagcctgggaggccccagagggtgtccccattgacgccatcatctttggtggccgcagacccaaaggggtacccctggtatacgaggccttcaactggcgtcatggggtgtttgtgggcagcgccatgcgctctgagtccactgctgcagcagaacacaaagggaagatcatcatgcacgacccatttgccatgcggcccttttttggctacaacttcgggcactacctggaacactggctgagcatggaagggcgcaagggggcccagctgccccgtatcttccatgtcaactggttccggcgtgacgaggcagggcacttcctgtggccaggctttggggagaatgctcgggtgctagactggatctgccggcggttagagggggaggacagtgcccgagagacacccattgggctggtgccaaaggaaggagccttggatctcagcggcctcagagctatagacaccactcagctgttctccctccccaaggacttctgggaacaggaggttcgtgacattcggagctacctgacagagcaggtcaaccaggatctgcccaaagaggtgttggctgagcttgaggccctggagagacgtgtgcacaaaatgtgacctgaggccctagtctagcaagaggacatagcaccctcatctgggaatagggaaggcaccttgcagaaaatatgagcaatttgatattaactaacatcttcaatgtgccatagaccttcccacaaagactgtccaataataagagatgcttatctattttacaaaaaaattgt

SEQ ID NO: 327449 - DNA, 2211 bp, Homo sapiens
tgcccccctcctttttaagcgcctcccgccagcctctgctgtggctcgcttcgccgcgctccctccttccccgccttccatacctccccggctccgctcggttcctggccaccccgcagcccctgcccaggtgccatggccgcattgtaccgccctggcctgcggcttaactggcatgggctgagccccttgggctggccatcatgccgtagcatccagaccctgcgagtgcttagtggagatctgggccagcttcccactggcattcgagattttgtagagcacagtgcccgcctgtgccaaccagagggcatccacatctgtgatggaactgaggctgagaatactgccacactgaccctgctggagcagcagggcctcatccgaaagctccccaagtacaataactgctggctggcccgcacagaccccaaggatgtggcacgagtagagagcaagacggtgattgtaactccttctcagcgggacacggtaccactcccgcctggtggggcccgtgggcagctgggcaactggatgtccccagctgatttccagcgagctgtggatgagaggccgcaccatgtatgtgcttccattcagcatgggtcctgtgggctccccgctgtcccgcatcggggtgcagctcactgactcagcctatgtggtggcaagcatgcgtattatgacccgactggggacacctgtgcttcaggccctgggagatggtgactttgtcaagtgtctgcactccgtgggccagcccctgacaggacaaggggagccagtgagccagtggccgtgcaacccagagaaaaccctgattggccacgtgcccgaccagcgggagatcatctccttcggcagcggctatggtggcaactccctgctgggcaagaagtgctttgccctacgcatcgcctctcggctggcccgggatgagggctggctggcagagcacatgctgatcctgggcatcaccagccctgcagggaagaagcgctatgtggcagccgccttccctagtgcctgtggcaagaccaacctggctatgatgcggcctgcactgccaggctggaaagtggagtgtgtgggggatgatattgcttggatgaggtttgacagtgaaggtcgactccgggccatcaaccctgagaacggcttctttggggttgcccctggtacctctgccaccaccaatcccaacgccatggctacaatccagagtaacactatttttaccaatgtggctgagaccagtgatggtggcgtgtactgggagggcattgaccagcctcttccacctggtgttactgtgacctcctggctgggcaaaccctggaaacctggtgacaaggagccctgtgcacatcccaactctcgattttgtgccccggctcgccagtgccccatcatggacccagcctgggaggccccagagggtgtccccattgacgccatcatctttggtggccgcagacccaaaggggtacccctggtatacgaggccttcaactggcgtcatggggtgtttgtgggcagcgccatgcgctctgagtccactgctgcagcagaacacaaagggaagatcatcatgcacgacccatttgccatgcggcccttttttggctacaacttcgggcactacctggaacactggctgagcatggaagggcgcaagggggcccagctgccccgtatcttccatgtcaactggttccggcgtgacgaggcagggcacttcctgtggccaggctttggggagaatgctcgggtgctagactggatctgccggcggttagagggggaggacagtgcccgagagacacccattgggctggtgccaaaggaaggagccttggatctcagcggcctcagagctatagacaccactcagctgttctccctccccaaggacttctgggaacaggaggttcgtgacattcggagctacctgacagagcaggtcaaccaggatctgcccaaagaggtgttggctgagcttgaggccctggagagacgtgtgcacaaaatgtgacctgaggccctagtctagcaagaggacatagcaccctcatctgggaatagggaaggcaccttgcagaaaatatgagcaatttgatattaactaacatcttcaatgtgccatagaccttcccacaaagactgtccaataataagagatgcttatctattttacaaaaaaattgt

SEQ ID NO: 327450 - DNA, 1083 bp, Homo sapiens
tgcccccctcctttttaagcgcctcccgccagcctctgctgtggctcgcttcgccgcgctccctccttccccgccttccatacctccccggctccgctcggttcctggccaccccgcagcccctgcccaggtgccatggccgcattgtaccgccctggcctgcggcttaactggcatgggctgagccccttgggctggccatcatgccgtagcatccagaccctgcgagtgcttagtggagatctgggccagcttcccactggcattcgagattttgtagagcacagtgcccgcctgtgccaaccagagggcatccacatctgtgatggaactgaggctgagaatactgccacactgaccctgctggagcagcagggcctcatccgaaagctccccaagtacaataactgctggctggcccgcacagaccccaaggatgtggcacgagtagagagcaagacggtgattgtaactccttctcagcgggacacggtaccactcccgcctggtggggcccgtgggcagctgggcaactggatgtccccagctgatttccagcgagctgtggatgagaggtttccaggctgcatgcagggccgcaccatgtatgtgcttccattcagcatgggtcctgtgggctccccgctgtcccgcatcggggtgcagctcactgactcagcctatgtggtggcaagcatgcgtattatgacccgactggggacacctgtgcttcaggccctgggagatggtgactttgtcaagtgtctgcactccgtgggccagcccctgacaggacaaggggagccagtgagccagtggccgtgcaacccagagaaaaccctgattggccacgtgcccgaccagcgggagatcatctccttcggcagcggctatggtggcaactccttgtggaaaatgttgcctagaattcctggtggccgttaggtggtgcaaacacgtcacggtacaactagggagagtttgggctcagcgtggacaggtaagcactcggaagaggcgcgatctttaacacacactagttgtggcccacacgaaaaggaaaagcctacgtcgcccctcgcc

SEQ ID NO: 327451 - DNA, 1964 bp, Homo sapiens
tgcccccctcctttttaagcgcctcccgccagcctctgctgtggctcgcttcgccgcgctccctccttccccgccttccatacctccccggctccgctcggttcctggccaccccgcagcccctgcccaggtgccatggccgcattgtaccgccctggcctgcggcttaactggcatgggctgagccccttgggctggccatcatgccgtagcatccagaccctgcgagtgcttagtggagatctgggccagcttcccactggcattcgagattttgtagagcacagtgcccgcctgtgccaaccagagggcatccacatctgtgatggaactgaggctgagaatactgccacactgaccctgctggagcagcagggcctcatccgaaagctccccaagtacaataactgctggctggcccgcacagaccccaaggatgtggcacgagtagagagcaagacgcttcaggccctgggagatggtgactttgtcaagtgtctgcactccgtgggccagcccctgacaggacaaggggagccagtgagccagtggccgtgcaacccagagaaaaccctgattggccacgtgcccgaccagcgggagatcatctccttcggcagcggctatggtggcaactccctgctgggcaagaagtgctttgccctacgcatcgcctctcggctggcccgggatgagggctggctggcagagcacatgctgatcctgggcatcaccagccctgcagggaagaagcgctatgtggcagccgccttccctagtgcctgtggcaagaccaacctggctatgatgcggcctgcactgccaggctggaaagtggagtgtgtgggggatgatattgcttggatgaggtttgacagtgaaggtcgactccgggccatcaaccctgagaacggcttctttggggttgcccctggtacctctgccaccaccaatcccaacgccatggctacaatccagagtaacactatttttaccaatgtggctgagaccagtgatggtggcgtgtactgggagggcattgaccagcctcttccacctggtgttactgtgacctcctggctgggcaaaccctggaaacctggtgacaaggagccctgtgcacatcccaactctcgattttgtgccccggctcgccagtgccccatcatggacccagcctgggaggccccagagggtgtccccattgacgccatcatctttggtggccgcagacccaaaggggtacccctggtatacgaggccttcaactggcgtcatggggtgtttgtgggcagcgccatgcgctctgagtccactgctgcagcagaacacaaagggaagatcatcatgcacgacccatttgccatgcggcccttttttggctacaacttcgggcactacctggaacactggctgagcatggaagggcgcaagggggcccagctgccccgtatcttccatgtcaactggttccggcgtgacgaggcagggcacttcctgtggccaggctttggggagaatgctcgggtgctagactggatctgccggcggttagagggggaggacagtgcccgagagacacccattgggctggtgccaaaggaaggagccttggatctcagcggcctcagagctatagacaccactcagctgttctccctccccaaggacttctgggaacaggaggttcgtgacattcggagctacctgacagagcaggtcaaccaggatctgcccaaagaggtgttggctgagcttgaggccctggagagacgtgtgcacaaaatgtgacctgaggccctagtctagcaagaggacatagcaccctcatctgggaatagggaaggcaccttgcagaaaatatgagcaatttgatattaactaacatcttcaatgtgccatagaccttcccacaaagactgtccaataataagagatgcttatctattttacaaaaaaattgt

SEQ ID NO: 327452 - DNA, 1032 bp, Homo sapiens
  misc_feature (808)..(808): n is a, c, g, or t
tgcccccctcctttttaagcgcctcccgccagcctctgctgtggctcgcttcgccgcgctccctccttccccgccttccatacctccccggctccgctcggttcctggccaccccgcagcccctgcccaggtgccatggccgcattgtaccgccctggcctgcggcttaactggcatgggctgagccccttgggctggccatcatgccgtagcatccagaccctgcgagtgcttagtggagatctgggccagcttcccactggcattcgagattttgtagagcacagtgcccgcctgtgccaaccagagggcatccacatctgtgatggaactgaggctgagaatactgccacactgaccctgctggagcagcagggcctcatccgaaagctccccaagtacaataactgctggctggcccgcacagaccccaaggatgtggcacgagtagagagcaagacggtgattgtaactccttctcagcgggacacggtaccactcccgcctggtggggcccgtgggcagctgggcaactggatgtccccagctgatttccagcgagctgtggatgagaggtttccaggctgcatgcagggccgcaccatgtatgtgcttccattcagcatgggtcctgtgggctccccgctgtcccgcatcggggtgcagctcactgactcagcctatgtggtggcaagcatgcgtattatgacccgactggggacacctgtgcttcaggccctgggagatggtgactttgtcaagtgtctgcactccgtgggccagcccctgacaggacaaggggagccantgagccagttggcgtgcaccaagagaaaaacttgatttgttccctttgcgccacagccgggggacaactccttcgcgcgcggcaattgtggggagccctcgctgggcgaagtgtttcgcttccgtaccctccgggggccgcgatgaggcagggggaggcatcttcttgtcagccagtcgggaggaagatttgggcggccctcgttggaggacccacatttccat

SEQ ID NO: 327453 - DNA, 1030 bp, Homo sapiens
  misc_feature (24)..(24): n is a, c, g, or t
atgctagacgagcgggtaatcggncagggcctccccggctccgctcggttcctggccaccccgcagcccctgcccaggtgccatggccgcattgtaccgccctggcctgcggcttaactggcatgggctgagccccttgggctggccatcatgccgtagcatccagaccctgcgagtgcttagtggagatctgggccagcttcccactggcattcgagattttgtagagcacagtgcccgcctgtgccaaccagagggcatccacatctgtgatggaactgaggctgagaatactgccacactgaccctgctggagcagcagggcctcatccgaaagctccccaagtacaataactgctggctggcccgcacagaccccaaggatgtggcacgagtagagagcaagacggtgattgtaactccttctcagcgggacacggtaccactcccgcctggtggggcccgtgggcagctgggcaactggatgtccccagctgatttccagcgagctgtggatgagaggtttccaggctgcatgcagggccgcaccatgtatgtgcttccattcagcatgggtcctgtgggctccccgctgtcccgcatcggggtgcagctcactgactcagcctatgtggtggcaagcatgcgtattatgacccgactggggacacctgtgcttcaggccctgggagatggtgactttgtcaagtgtctgcactccgtgggccagcccctgacaggacaaggggagccagtgagccagtggccgtgcaacccagagaaaaccctgattggccacgtgcccgaccagcgggagatcatctccttcggcagcggctatggtggcaactccttgtggaaaatgttgcctagaattcctggtggccgttaggtggtgcaaacacgtcacggtacaactagggagagtttgggctcagcgtggacaggtaagcactcggaagaggcgcgatctttaacacacactagttgtggcccacacgaaaaggaaaagcctacgtcgcccctcgcc

SEQ ID NO: 327454 - DNA, 2231 bp, Homo sapiens
tgcccccctcctttttaagcgcctcccgccagcctctgctgtggctcgcttcgccgcgctccctccttccccgccttccatacctccccggctccgctcggttcctggccaccccgcagcccctgcccaggtgccatggccgcattgtaccgccctggcctgcggcttaactggcatgggctgagccccttgggctggccatcatgccgtagcatccagaccctgcgagtgcttagtggagatctgggccagcttcccactggcattcgagattttgtagagcacagtgcccgcctgtgccaaccagagggcatccacatctgtgatggaactgaggctgagaatactgccacactgaccctgctggagcagcagggcctcatccgaaagctccccaagtacaataactgctggctggcccgcacagaccccaaggatgtggcacgagtagagagcaagacggtgattgtaactccttctcagcgggacacggtaccactcccgcctggtggggcccgtgggcagctgggcaactggatgtccccagctgatttccagcgagctgtggatgagaggtttccaggctgcatgcagggccgcaccatgtatgtgcttccattcagcatgggtcctgtgggctccccgctgtcccgcatcggggtgcagctcactgactcagcctatgtggtggcaagcatgcgtattatgacccgactggggacacctgtgcttcaggccctgggagatggtgactttgtcaagtgtctgcactccgtgggccagcccctgacaggacaaggggagccagtgagccagtggccgtgcaacccagagaaaaccctgattggccacgtgcccgaccagcgggagatcatctccttcggcagcggctatggtggcaactccctgctgggcaagaagtgctttgccctacgcatcgcctctcggctggcccgggatgagggctggctggcagagcacatgctgatcctgggcatcaccagccctgcagggaagaagcgctatgtggcagccgccttccctagtgcctgtggcaagaccaacctggctatgatgcggcctgcactgccaggctggaaagtggagtgtgtgggggatgatattgcttggatgaggtttgacagtgaaggtcgactccgggccatcaaccctgagaacggcttctttggggttgcccctggtacctctgccaccaccaatcccaacgccatggctacaatccagagtaacactatttttaccaatgtggctgagaccagtgatggtggcgtgtactgggagggcattgaccagcctcttccacctggtgttactgtgacctcctggctgggcaaaccctggaaacctggtgacaaggagccctgtgcacatcccaactctcgattttgtgccccggctcgccagtgccccatcatggacccagcctgggaggccccagagggtgtccccattgacgccatcatctttggtggccgcagacccaaaggggtacccctggtatacgaggccttcaactggcgtcatggggtgtttgtgggcagcgccatgcgctctgagtccactgctgcagcagaacacaaagggaagatcatcatgcacgacccatttgccatgcggcccttttttggctacaacttcgggcactacctggaacactggctgagcatggaagggcgcaagggggcccagctgccccgtatcttccatgtcaactggttccggcgtgacgaggcagggcacttcctgtggccaggctttggggagaatgctcgggtgctagactggatctgccggcggttagagggggaggacagtgcccgagagacacccattgggctggtgccaaaggaaggagccttggatctcagcggcctcagagctatagacaccactcagctgttctccctccccaaggacttctgggaacaggaggttcgtgacattcggagctacctgacagagcaggtcaaccaggatctgcccaaagaggtgttggctgagcttgaggccctggagagacgtgtgcacaaaatgtgacctgaggccctagtctagcaagaggacatagcaccctcatctgggaatagggaaggcaccttgcagaaaatatgagcaatttgatattaactaacatcttcaatgtgccatagaccttcccacaaagactgtccaataataagagatgcttatctattttacaaaaaaattgt

SEQ ID NO: 327455 - DNA, 2178 bp, Homo sapiens
  misc_feature (24)..(24): n is a, c, g, or t
atgctagacgagcgggtaatcggncagggcctccccggctccgctcggttcctggccaccccgcagcccctgcccaggtgccatggccgcattgtaccgccctggcctgcggcttaactggcatgggctgagccccttgggctggccatcatgccgtagcatccagaccctgcgagtgcttagtggagatctgggccagcttcccactggcattcgagattttgtagagcacagtgcccgcctgtgccaaccagagggcatccacatctgtgatggaactgaggctgagaatactgccacactgaccctgctggagcagcagggcctcatccgaaagctccccaagtacaataactgctggctggcccgcacagaccccaaggatgtggcacgagtagagagcaagacggtgattgtaactccttctcagcgggacacggtaccactcccgcctggtggggcccgtgggcagctgggcaactggatgtccccagctgatttccagcgagctgtggatgagaggtttccaggctgcatgcagggccgcaccatgtatgtgcttccattcagcatgggtcctgtgggctccccgctgtcccgcatcggggtgcagctcactgactcagcctatgtggtggcaagcatgcgtattatgacccgactggggacacctgtgcttcaggccctgggagatggtgactttgtcaagtgtctgcactccgtgggccagcccctgacaggacaaggggagccagtgagccagtggccgtgcaacccagagaaaaccctgattggccacgtgcccgaccagcgggagatcatctccttcggcagcggctatggtggcaactccctgctgggcaagaagtgctttgccctacgcatcgcctctcggctggcccgggatgagggctggctggcagagcacatgctgatcctgggcatcaccagccctgcagggaagaagcgctatgtggcagccgccttccctagtgcctgtggcaagaccaacctggctatgatgcggcctgcactgccaggctggaaagtggagtgtgtgggggatgatattgcttggatgaggtttgacagtgaaggtcgactccgggccatcaaccctgagaacggcttctttggggttgcccctggtacctctgccaccaccaatcccaacgccatggctacaatccagagtaacactatttttaccaatgtggctgagaccagtgatggtggcgtgtactgggagggcattgaccagcctcttccacctggtgttactgtgacctcctggctgggcaaaccctggaaacctggtgacaaggagccctgtgcacatcccaactctcgattttgtgccccggctcgccagtgccccatcatggacccagcctgggaggccccagagggtgtccccattgacgccatcatctttggtggccgcagacccaaaggggtacccctggtatacgaggccttcaactggcgtcatggggtgtttgtgggcagcgccatgcgctctgagtccactgctgcagcagaacacaaagggaagatcatcatgcacgacccatttgccatgcggcccttttttggctacaacttcgggcactacctggaacactggctgagcatggaagggcgcaagggggcccagctgccccgtatcttccatgtcaactggttccggcgtgacgaggcagggcacttcctgtggccaggctttggggagaatgctcgggtgctagactggatctgccggcggttagagggggaggacagtgcccgagagacacccattgggctggtgccaaaggaaggagccttggatctcagcggcctcagagctatagacaccactcagctgttctccctccccaaggacttctgggaacaggaggttcgtgacattcggagctacctgacagagcaggtcaaccaggatctgcccaaagaggtgttggctgagcttgaggccctggagagacgtgtgcacaaaatgtgacctgaggccctagtctagcaagaggacatagcaccctcatctgggaatagggaaggcaccttgcagaaaatatgagcaatttgatattaactaacatcttcaatgtgccatagaccttcccacaaagactgtccaataataagagatgcttatctattttacaaaaaaattgt

SEQ ID NO: 327456 - DNA, 2150 bp, Homo sapiens
tgcccccctcctttttaagcgcctcccgccagcctctgctgtggctcgcttcgccgcgctccctccttccccgccttccatacctccccggctccgctcggttcctggccaccccgcagcccctgcccaggtgccatggccgcattgtaccgccctggcctgcggcttaactggcatgggctgagccccttgggctggccatcatgccgtagcatccagaccctgcgagtgcttagtggagatctgggccagcttcccactggcattcgagattttgtagagcacagtgcccgcctgtgccaaccagagggcatccacatctgtgatggaactgaggctgagaatactgccacactgaccctgctggagcagcagggcctcatccgaaagctccccaagtacaataactgctggctggcccgcacagaccccaaggatgtggcacgagtagagagcaagacggtgattgtaactccttctcagcgggacacggtaccactcccgcctggtggggcccgtgggcagctgggcaactggatgtccccagctgatttccagcgagctgtggatgagaggtttccaggctgcatgcagggccgcaccatgtatgtgcttccattcagcatgggtcctgtgggctccccgctgtcccgcatcggggtgcagctcactgactcagcctatgtggtggcaagcatgcgtattatgacccgactggggacacctgtgcttcaggccctgggagatggtgactttgtcaagtgtctgcactccgtgggccagcccctgacaggacaaggggagccagtgagccagtggccgtgcaacccagagaaaaccctgattggccacgtgcccgaccagcgggagatcatctccttcggcagcggctatggtggcaactccctgctgggcaagaagtgctttgccctacgcatcgcctctcggctggcccgggatgagggctggctggcagagcacatgctgatcctgggcatcaccagccctgcagggaagaagcgctatgtggcagccgccttccctagtgcctgtggcaagaccaacctggctatgatgcggcctgcactgccaggctggaaagtggagtgtgtgggggatgatattgcttggatgaggtttgacagtgaaggtcgactccgggccatcaaccctgagaacggcttctttggggttgcccctggtacctctgccaccaccaatcccaacgccatggctacaatccagagtaacactatttttaccaatgtggctgagaccagtgatggtggcgtgtactgggagggcattgaccagcctcttccacctggtgttactgtgacctcctggctgggcaaaccctggaaacctggtgacaaggagccctgtgcacatcccaactctcgattttgtgccccggctcgccagtgccccatcatggacccagcctgggaggccccagagggtgtccccattgacgccatcatctttggtggccgcagacccaaaggggtacccctggtatacgaggccttcaactggcgtcatggggtgtttgtgggcagcgccatgcgctctgagtccactgctgcagcagaacacaaagggaagatcatcatgcacgacccatttgccatgcggcccttttttggctacaacttcgggcactacctggaacactggttcctgtggccaggctttggggagaatgctcgggtgctagactggatctgccggcggttagagggggaggacagtgcccgagagacacccattgggctggtgccaaaggaaggagccttggatctcagcggcctcagagctatagacaccactcagctgttctccctccccaaggacttctgggaacaggaggttcgtgacattcggagctacctgacagagcaggtcaaccaggatctgcccaaagaggtgttggctgagcttgaggccctggagagacgtgtgcacaaaatgtgacctgaggccctagtctagcaagaggacatagcaccctcatctgggaatagggaaggcaccttgcagaaaatatgagcaatttgatattaactaacatcttcaatgtgccatagaccttcccacaaagactgtccaataataagagatgcttatctattttacaaaaaaattgt

SEQ ID NO: 327457 - DNA, 1911 bp, Homo sapiens
tgcccccctcctttttaagcgcctcccgccagcctctgctgtggctcgcttcgccgcgctccctccttccccgccttccatacctccccggctccgctcggttcctggccaccccgcagcccctgcccaggtgccatggccgcattgtaccgccctggcctgcggcttaactggcatgggctgagccccttgggctggccatcatgccgtagcatccagaccctgcgagtgcttagtggagatctgggccagcttcccactggcattcgagattttgtagagcacagtgcccgcctgtgccaaccagagggcatccacatctgtgatggaactgaggctgagaatactgccacactgaccctgctggagcagcagggcctcatccgaaagctccccaagtacaataactgctggctggcccgcacagaccccaaggatgtggcacgagtagagagcaagacggtgattgtaactccttctcagcgggacacggtaccactcccgcctggtggggcccgtgggcagctgggcaactggatgtccccagctgatttccagcgagctgtggatgagaggtttccaggctgcatgcagggccgcaccatgtatgtgcttccattcagcatgggtcctgtgggctccccgctgtcccgcatcggggtgcagctcactgactcagcctatgtggtggcaagcatgcgtattatgacccgactggggacacctgtgcttcaggccctgggagatggtgactttgtcaagtgtctgcactccgtgggccagcccctgacaggacaaggggagccagtgagccagtggccgtgcaacccagagaaaaccctgattggccacgtgcccgaccagcgggagatcatctccttcggcagcggctatggtggcaactccctgctgggcaagaagtgctttgccctacgcatcgcctctcggctggcccgggatgagggctggctggcagagcacatgctgatcctgggcatcaccagccctgcagggaagaagcgctatgtggcagccgccttccctagtgcctgtggcaagaccaacctggctatgatgcggcctgcactgccaggctggaaagtggagtgtgtgggggatgatattgcttggatgaggtttgacagtgaaggtcgactccgggccatcaaccctgagaacggcttctttggggttgcccctggtacctctgccaccaccaatcccaacgccatggctacaatccagagtaacactatttttaccaatgtggctgagaccagtgatggtggcgtgtactgggagggcattgaccagcctcttccacctggtgttactgtgacctcctggctgggcaaaccctggaaacctggtgacaaggagccctgtgcacatcccaactctcgattttgtgccccggctcgccagtgccccatcatggacccagcctgggaggccccagagggtgtccccattgacgccatcatctttggtggccgcagacccaaaggggtacccctggtatacgaggccttcaactggcgtcatggggtgtttgtgggcagcgccatgcgctctgagtccactgctgcagcagaacacaaaggtgagcaccctcaccattcctccctctcctgtgtgtgcacacagcacgtcctctctcccttcctgagccagaccttccttttgtccacccctggagtctgatatggccccacctcttcccacttctatcttttccccatccctgaagatattcagaaccataagcctttcacagcttcctctcccactcttttctcacatagctcagctggccgcaccttcatggctaaacaacctgagctcttggagatgccctggctcccctctctctgctccgtatcacacaaggttctaggcagctgatgaggc

SEQ ID NO: 327458 - DNA, 1718 bp, Homo sapiens
tgcccccctcctttttaagcgcctcccgccagcctctgctgtggctcgcttcgccgcgctccctccttccccgccttccatacctccccggctccgctcggttcctggccaccccgcagcccctgcccaggtgccatggccgcattgtaccgccctggcctgcggcttaactggcatgggctgagccccttgggctggccatcatgccgtagcatccagaccctgcgagtgcttagtggagatctgggccagcttcccactggcattcgagattttgtagagcacagtgcccgcctgtgccaaccagagggcatccacatctgtgatggaactgaggctgagaatactgccacactgaccctgctggagcagcagggcctcatccgaaagctccccaagtacaataactgctggctggcccgcacagaccccaaggatgtggcacgagtagagagcaagacggtgattgtaactccttctcagcgggacacggtaccactcccgcctggtggggcccgtgggcagctgggcaactggatgtccccagctgatttccagcgagctgtggatgagaggtttccaggctgcatgcagggccgcaccatgtatgtgcttccattcagcatgggtcctgtgggctccccgctgtcccgcatcggggtgcagctcactgactcagcctatgtggtggcaagcatgcgtattatgacccgactggggacacctgtgcttcaggccctgggagatggtgactttgtcaagtgtctgcactccgtgggccagcccctgacaggacaaggggagccagtgagccagtggccgtgcaacccagagaaaaccctgattggccacgtgcccgaccagcgggagatcatctccttcggcagcggctatggtggcaactccctgctgggcaagaagtgctttgccctacgcatcgcctctcggctggcccgggatgagggctggctggcagagcacatgctgatcctgggcatcaccagccctgcagggaagaagcgctatgtggcagccgccttccctagtgcctgtggcaagaccaacctggctatgatgcggcctgcactgccaggctggaaagtggagtgtgtgggggatgatattgcttggatgaggtttgacagtgaaggtcgactccgggccatcaaccctgagaacggcttctttggggttgcccctggtacctctgccaccaccaatcccaacgccatggctacaatccagagtaacactatttttaccaatgtggctgagaccagtgatggtggcgtgtactgggagggcattgaccagcctcttccacctggtgttactgtgacctcctggctgggcaaaccctggaaacctggtatgtgcggtggggaaggtgtggcacagcctccaggcctcagcaccttaatggtggaaaagctttctccacaacctccaaccatcttctaggactgccaggaggcacagaagtcatgaacgtttgcagtttccagtcccaggcaaaatctcagttcatgtcccaactccaccagtcactggttttgtgatctggctaagttgctcaacttccctaagctttagtttccacatcagttgaatgagggtagttgtgatagtacctatctcatgagattgttggaggattaaatagtgcataaaaagggtttagcacactgacaaatacacagtaaattctcaataataaa

SEQ ID NO: 327459 - DNA, 2208 bp, Homo sapiens
ccggggccgagggagctggcctgccagcggggcggaggaaagctagtgccagccctaccagatacctccctcggacctctaacgggctctcagccagcgccccagggtacttcgagaggcagcagggccctggggacaagggcttaactggcatgggctgagccccttgggctggccatcatgccgtagcatccagaccctgcgagtgcttagtggagatctgggccagcttcccactggcattcgagattttgtagagcacagtgcccgcctgtgccaaccagagggcatccacatctgtgatggaactgaggctgagaatactgccacactgaccctgctggagcagcagggcctcatccgaaagctccccaagtacaataactgctggctggcccgcacagaccccaaggatgtggcacgagtagagagcaagacggtgattgtaactccttctcagcgggacacggtaccactcccgcctggtggggcccgtgggcagctgggcaactggatgtccccagctgatttccagcgagctgtggatgagaggtttccaggctgcatgcagggccgcaccatgtatgtgcttccattcagcatgggtcctgtgggctccccgctgtcccgcatcggggtgcagctcactgactcagcctatgtggtggcaagcatgcgtattatgacccgactggggacacctgtgcttcaggccctgggagatggtgactttgtcaagtgtctgcactccgtgggccagcccctgacaggacaaggggagccagtgagccagtggccgtgcaacccagagaaaaccctgattggccacgtgcccgaccagcgggagatcatctccttcggcagcggctatggtggcaactccctgctgggcaagaagtgctttgccctacgcatcgcctctcggctggcccgggatgagggctggctggcagagcacatgctgatcctgggcatcaccagccctgcagggaagaagcgctatgtggcagccgccttccctagtgcctgtggcaagaccaacctggctatgatgcggcctgcactgccaggctggaaagtggagtgtgtgggggatgatattgcttggatgaggtttgacagtgaaggtcgactccgggccatcaaccctgagaacggcttctttggggttgcccctggtacctctgccaccaccaatcccaacgccatggctacaatccagagtaacactatttttaccaatgtggctgagaccagtgatggtggcgtgtactgggagggcattgaccagcctcttccacctggtgttactgtgacctcctggctgggcaaaccctggaaacctggtgacaaggagccctgtgcacatcccaactctcgattttgtgccccggctcgccagtgccccatcatggacccagcctgggaggccccagagggtgtccccattgacgccatcatctttggtggccgcagacccaaaggggtacccctggtatacgaggccttcaactggcgtcatggggtgtttgtgggcagcgccatgcgctctgagtccactgctgcagcagaacacaaagggaagatcatcatgcacgacccatttgccatgcggcccttttttggctacaacttcgggcactacctggaacactggctgagcatggaagggcgcaagggggcccagctgccccgtatcttccatgtcaactggttccggcgtgacgaggcagggcacttcctgtggccaggctttggggagaatgctcgggtgctagactggatctgccggcggttagagggggaggacagtgcccgagagacacccattgggctggtgccaaaggaaggagccttggatctcagcggcctcagagctatagacaccactcagctgttctccctccccaaggacttctgggaacaggaggttcgtgacattcggagctacctgacagagcaggtcaaccaggatctgcccaaagaggtgttggctgagcttgaggccctggagagacgtgtgcacaaaatgtgacctgaggccctagtctagcaagaggacatagcaccctcatctgggaatagggaaggcaccttgcagaaaatatgagcaatttgatattaactaacatcttcaatgtgccatagaccttcccacaaagactgtccaataataagagatgcttatctattttacaaaaaaattgt

SEQ ID NO: 327460 - DNA, 2128 bp, Homo sapiens
ccggggccgagggagctggcctgccagcggggcggaggaaagctagtgccagccctaccaggcttaactggcatgggctgagccccttgggctggccatcatgccgtagcatccagaccctgcgagtgcttagtggagatctgggccagcttcccactggcattcgagattttgtagagcacagtgcccgcctgtgccaaccagagggcatccacatctgtgatggaactgaggctgagaatactgccacactgaccctgctggagcagcagggcctcatccgaaagctccccaagtacaataactgctggctggcccgcacagaccccaaggatgtggcacgagtagagagcaagacggtgattgtaactccttctcagcgggacacggtaccactcccgcctggtggggcccgtgggcagctgggcaactggatgtccccagctgatttccagcgagctgtggatgagaggtttccaggctgcatgcagggccgcaccatgtatgtgcttccattcagcatgggtcctgtgggctccccgctgtcccgcatcggggtgcagctcactgactcagcctatgtggtggcaagcatgcgtattatgacccgactggggacacctgtgcttcaggccctgggagatggtgactttgtcaagtgtctgcactccgtgggccagcccctgacaggacaaggggagccagtgagccagtggccgtgcaacccagagaaaaccctgattggccacgtgcccgaccagcgggagatcatctccttcggcagcggctatggtggcaactccctgctgggcaagaagtgctttgccctacgcatcgcctctcggctggcccgggatgagggctggctggcagagcacatgctgatcctgggcatcaccagccctgcagggaagaagcgctatgtggcagccgccttccctagtgcctgtggcaagaccaacctggctatgatgcggcctgcactgccaggctggaaagtggagtgtgtgggggatgatattgcttggatgaggtttgacagtgaaggtcgactccgggccatcaaccctgagaacggcttctttggggttgcccctggtacctctgccaccaccaatcccaacgccatggctacaatccagagtaacactatttttaccaatgtggctgagaccagtgatggtggcgtgtactgggagggcattgaccagcctcttccacctggtgttactgtgacctcctggctgggcaaaccctggaaacctggtgacaaggagccctgtgcacatcccaactctcgattttgtgccccggctcgccagtgccccatcatggacccagcctgggaggccccagagggtgtccccattgacgccatcatctttggtggccgcagacccaaaggggtacccctggtatacgaggccttcaactggcgtcatggggtgtttgtgggcagcgccatgcgctctgagtccactgctgcagcagaacacaaagggaagatcatcatgcacgacccatttgccatgcggcccttttttggctacaacttcgggcactacctggaacactggctgagcatggaagggcgcaagggggcccagctgccccgtatcttccatgtcaactggttccggcgtgacgaggcagggcacttcctgtggccaggctttggggagaatgctcgggtgctagactggatctgccggcggttagagggggaggacagtgcccgagagacacccattgggctggtgccaaaggaaggagccttggatctcagcggcctcagagctatagacaccactcagctgttctccctccccaaggacttctgggaacaggaggttcgtgacattcggagctacctgacagagcaggtcaaccaggatctgcccaaagaggtgttggctgagcttgaggccctggagagacgtgtgcacaaaatgtgacctgaggccctagtctagcaagaggacatagcaccctcatctgggaatagggaaggcaccttgcagaaaatatgagcaatttgatattaactaacatcttcaatgtgccatagaccttcccacaaagactgtccaataataagagatgcttatctattttacaaaaaaattgt

SEQ ID NO: 327461 - DNA, 2282 bp, Homo sapiens
  misc_feature (36)..(36): n is a, c, g, or t
cgagtggcgccgaaaaggtaggctagtagaggctgngtgtgaatcggccgaggcctccccggctccgctcggttcctggccaccccgcagcccctgcccaggtgccatggccgcattgtaccgccctggcctgcgatacctccctcggacctctaacgggctctcagccagcgccccagggtacttcgagaggcagcagggccctggggacaagggcttaactggcatgggctgagccccttgggctggccatcatgccgtagcatccagaccctgcgagtgcttagtggagatctgggccagcttcccactggcattcgagattttgtagagcacagtgcccgcctgtgccaaccagagggcatccacatctgtgatggaactgaggctgagaatactgccacactgaccctgctggagcagcagggcctcatccgaaagctccccaagtacaataactgctggctggcccgcacagaccccaaggatgtggcacgagtagagagcaagacggtgattgtaactccttctcagcgggacacggtaccactcccgcctggtggggcccgtgggcagctgggcaactggatgtccccagctgatttccagcgagctgtggatgagaggtttccaggctgcatgcagggccgcaccatgtatgtgcttccattcagcatgggtcctgtgggctccccgctgtcccgcatcggggtgcagctcactgactcagcctatgtggtggcaagcatgcgtattatgacccgactggggacacctgtgcttcaggccctgggagatggtgactttgtcaagtgtctgcactccgtgggccagcccctgacaggacaaggggagccagtgagccagtggccgtgcaacccagagaaaaccctgattggccacgtgcccgaccagcgggagatcatctccttcggcagcggctatggtggcaactccctgctgggcaagaagtgctttgccctacgcatcgcctctcggctggcccgggatgagggctggctggcagagcacatgctgatcctgggcatcaccagccctgcagggaagaagcgctatgtggcagccgccttccctagtgcctgtggcaagaccaacctggctatgatgcggcctgcactgccaggctggaaagtggagtgtgtgggggatgatattgcttggatgaggtttgacagtgaaggtcgactccgggccatcaaccctgagaacggcttctttggggttgcccctggtacctctgccaccaccaatcccaacgccatggctacaatccagagtaacactatttttaccaatgtggctgagaccagtgatggtggcgtgtactgggagggcattgaccagcctcttccacctggtgttactgtgacctcctggctgggcaaaccctggaaacctggtgacaaggagccctgtgcacatcccaactctcgattttgtgccccggctcgccagtgccccatcatggacccagcctgggaggccccagagggtgtccccattgacgccatcatctttggtggccgcagacccaaaggggtacccctggtatacgaggccttcaactggcgtcatggggtgtttgtgggcagcgccatgcgctctgagtccactgctgcagcagaacacaaagggaagatcatcatgcacgacccatttgccatgcggcccttttttggctacaacttcgggcactacctggaacactggctgagcatggaagggcgcaagggggcccagctgccccgtatcttccatgtcaactggttccggcgtgacgaggcagggcacttcctgtggccaggctttggggagaatgctcgggtgctagactggatctgccggcggttagagggggaggacagtgcccgagagacacccattgggctggtgccaaaggaaggagccttggatctcagcggcctcagagctatagacaccactcagctgttctccctccccaaggacttctgggaacaggaggttcgtgacattcggagctacctgacagagcaggtcaaccaggatctgcccaaagaggtgttggctgagcttgaggccctggagagacgtgtgcacaaaatgtgacctgaggccctagtctagcaagaggacatagcaccctcatctgggaatagggaaggcaccttgcagaaaatatgagcaatttgatattaactaacatcttcaatgtgccatagaccttcccacaaagactgtccaataataagagatgcttatctattttacaaaaaaattgt

SEQ ID NO: 327462 - DNA, 2052 bp, Homo sapiens
tcctcaccagttcagggagcttttgccaggggagagacccccagagggctgggaccttggggaacaccccttagatgggacaaagcctggaggaagggactgagatgtgattgggtggggaaacataaggccaacagaagacctggagtcaaagttggacttgaaaaagtgggtctagggacaagggaaacctgctggccaccatcttcctgacaatcccctctcccccagctggctggcccgcacagaccccaaggatgtggcacgagtagagagcaagacggtgattgtaactccttctcagcgggacacggtaccactcccgcctggtggggcccgtgggcagctgggcaactggatgtccccagctgatttccagcgagctgtggatgagaggtttccaggctgcatgcagggccgcaccatgtatgtgcttccattcagcatgggtcctgtgggctccccgctgtcccgcatcggggtgcagctcactgactcagcctatgtggtggcaagcatgcgtattatgacccgactggggacacctgtgcttcaggccctgggagatggtgactttgtcaagtgtctgcactccgtgggccagcccctgacaggacaaggggagccagtgagccagtggccgtgcaacccagagaaaaccctgattggccacgtgcccgaccagcgggagatcatctccttcggcagcggctatggtggcaactccctgctgggcaagaagtgctttgccctacgcatcgcctctcggctggcccgggatgagggctggctggcagagcacatgctgatcctgggcatcaccagccctgcagggaagaagcgctatgtggcagccgccttccctagtgcctgtggcaagaccaacctggctatgatgcggcctgcactgccaggctggaaagtggagtgtgtgggggatgatattgcttggatgaggtttgacagtgaaggtcgactccgggccatcaaccctgagaacggcttctttggggttgcccctggtacctctgccaccaccaatcccaacgccatggctacaatccagagtaacactatttttaccaatgtggctgagaccagtgatggtggcgtgtactgggagggcattgaccagcctcttccacctggtgttactgtgacctcctggctgggcaaaccctggaaacctggtgacaaggagccctgtgcacatcccaactctcgattttgtgccccggctcgccagtgccccatcatggacccagcctgggaggccccagagggtgtccccattgacgccatcatctttggtggccgcagacccaaaggggtacccctggtatacgaggccttcaactggcgtcatggggtgtttgtgggcagcgccatgcgctctgagtccactgctgcagcagaacacaaagggaagatcatcatgcacgacccatttgccatgcggcccttttttggctacaacttcgggcactacctggaacactggctgagcatggaagggcgcaagggggcccagctgccccgtatcttccatgtcaactggttccggcgtgacgaggcagggcacttcctgtggccaggctttggggagaatgctcgggtgctagactggatctgccggcggttagagggggaggacagtgcccgagagacacccattgggctggtgccaaaggaaggagccttggatctcagcggcctcagagctatagacaccactcagctgttctccctccccaaggacttctgggaacaggaggttcgtgacattcggagctacctgacagagcaggtcaaccaggatctgcccaaagaggtgttggctgagcttgaggccctggagagacgtgtgcacaaaatgtgacctgaggccctagtctagcaagaggacatagcaccctcatctgggaatagggaaggcaccttgcagaaaatatgagcaatttgatattaactaacatcttcaatgtgccatagaccttcccacaaagactgtccaataataagagatgcttatctattttacaaaaaaattgt

SEQ ID NO: 327463 - DNA, 2139 bp, Homo sapiens
tcctcaccagttcagggagcttttgccaggggagagacccccagagggctgggaccttggggaacaccccttagatgggacaaagcctggaggaagggactgagatgtgattgggtggggaaacataaggccaacagaagacctggagtcaaagttggacttgaaaaagtgggtctagggacaagggaaacctgctggccaccatcttcctgacaatcccctctcccccagctggctggcccgcacagaccccaaggatgtggcacgagtagagagcaagacggtgattgtaactccttctcagcgggacacggtaccactcccgcctggtggggcccgtgggcagctgggcaactggatgtccccagctgatttccagcgagctgtggatgagaggtttccaggctgcatgcagggtaaccagggcaggggcacagtggcaagggcacggaagatgtgaacaggtttggaacccttcatccaggggatgccttcctccacaggccgcaccatgtatgtgcttccattcagcatgggtcctgtgggctccccgctgtcccgcatcggggtgcagctcactgactcagcctatgtggtggcaagcatgcgtattatgacccgactggggacacctgtgcttcaggccctgggagatggtgactttgtcaagtgtctgcactccgtgggccagcccctgacaggacaaggggagccagtgagccagtggccgtgcaacccagagaaaaccctgattggccacgtgcccgaccagcgggagatcatctccttcggcagcggctatggtggcaactccctgctgggcaagaagtgctttgccctacgcatcgcctctcggctggcccgggatgagggctggctggcagagcacatgctgatcctgggcatcaccagccctgcagggaagaagcgctatgtggcagccgccttccctagtgcctgtggcaagaccaacctggctatgatgcggcctgcactgccaggctggaaagtggagtgtgtgggggatgatattgcttggatgaggtttgacagtgaaggtcgactccgggccatcaaccctgagaacggcttctttggggttgcccctggtacctctgccaccaccaatcccaacgccatggctacaatccagagtaacactatttttaccaatgtggctgagaccagtgatggtggcgtgtactgggagggcattgaccagcctcttccacctggtgttactgtgacctcctggctgggcaaaccctggaaacctggtgacaaggagccctgtgcacatcccaactctcgattttgtgccccggctcgccagtgccccatcatggacccagcctgggaggccccagagggtgtccccattgacgccatcatctttggtggccgcagacccaaaggggtacccctggtatacgaggccttcaactggcgtcatggggtgtttgtgggcagcgccatgcgctctgagtccactgctgcagcagaacacaaagggaagatcatcatgcacgacccatttgccatgcggcccttttttggctacaacttcgggcactacctggaacactggctgagcatggaagggcgcaagggggcccagctgccccgtatcttccatgtcaactggttccggcgtgacgaggcagggcacttcctgtggccaggctttggggagaatgctcgggtgctagactggatctgccggcggttagagggggaggacagtgcccgagagacacccattgggctggtgccaaaggaaggagccttggatctcagcggcctcagagctatagacaccactcagctgttctccctccccaaggacttctgggaacaggaggttcgtgacattcggagctacctgacagagcaggtcaaccaggatctgcccaaagaggtgttggctgagcttgaggccctggagagacgtgtgcacaaaatgtgacctgaggccctagtctagcaagaggacatagcaccctcatctgggaatagggaaggcaccttgcagaaaatatgagcaatttgatattaactaacatcttcaatgtgccatagaccttcccacaaagactgtccaataataagagatgcttatctattttacaaaaaaattgt

SEQ ID NO: 327464 - DNA, 2097 bp, Homo sapiens
tgcccccctcctttttaagcgcctcccgccagcctctgctgtggctcgcttcgccgcgctccctccttccccgccttccatacctccccggctccgctcggttcctggccaccccgcagcccctgcccaggtgccatggccgcattgtaccgccctggcctgcggcttaactggcatgggctgagccccttgggctggccatcatgccgtagcatccagaccctgcgagtgcttagtggagatctgggccagcttcccactggcattcgagattttgtagagcacagtgcccgcctgtgccaaccagagggcatccacatctgtgatggaactgaggctgagaatactgccacactgaccctgctggagcagcagggcctcatccgaaagctccccaagtacaataactgctggctggcccgcacagaccccaaggatgtggcacgagtagagagcaagacggtgattgtaactccttctcagcgggacacggtaccactcccgcctggtggggcccgtgggcagctgggcaactggatgtccccagctgatttccagcgagctgtggatgagaggtttccaggctgcatgcaggcttcaggccctgggagatggtgactttgtcaagtgtctgcactccgtgggccagcccctgacaggacaaggggagccagtgagccagtggccgtgcaacccagagaaaaccctgattggccacgtgcccgaccagcgggagatcatctccttcggcagcggctatggtggcaactccctgctgggcaagaagtgctttgccctacgcatcgcctctcggctggcccgggatgagggctggctggcagagcacatgctgatcctgggcatcaccagccctgcagggaagaagcgctatgtggcagccgccttccctagtgcctgtggcaagaccaacctggctatgatgcggcctgcactgccaggctggaaagtggagtgtgtgggggatgatattgcttggatgaggtttgacagtgaaggtcgactccgggccatcaaccctgagaacggcttctttggggttgcccctggtacctctgccaccaccaatcccaacgccatggctacaatccagagtaacactatttttaccaatgtggctgagaccagtgatggtggcgtgtactgggagggcattgaccagcctcttccacctggtgttactgtgacctcctggctgggcaaaccctggaaacctggtgacaaggagccctgtgcacatcccaactctcgattttgtgccccggctcgccagtgccccatcatggacccagcctgggaggccccagagggtgtccccattgacgccatcatctttggtggccgcagacccaaaggggtacccctggtatacgaggccttcaactggcgtcatggggtgtttgtgggcagcgccatgcgctctgagtccactgctgcagcagaacacaaagggaagatcatcatgcacgacccatttgccatgcggcccttttttggctacaacttcgggcactacctggaacactggctgagcatggaagggcgcaagggggcccagctgccccgtatcttccatgtcaactggttccggcgtgacgaggcagggcacttcctgtggccaggctttggggagaatgctcgggtgctagactggatctgccggcggttagagggggaggacagtgcccgagagacacccattgggctggtgccaaaggaaggagccttggatctcagcggcctcagagctatagacaccactcagctgttctccctccccaaggacttctgggaacaggaggttcgtgacattcggagctacctgacagagcaggtcaaccaggatctgcccaaagaggtgttggctgagcttgaggccctggagagacgtgtgcacaaaatgtgacctgaggccctagtctagcaagaggacatagcaccctcatctgggaatagggaaggcaccttgcagaaaatatgagcaatttgatattaactaacatcttcaatgtgccatagaccttcccacaaagactgtccaataataagagatgcttatctattttacaaaaaaattgt

SEQ ID NO: 327465 - DNA, 941 bp, Homo sapiens
tgcccccctcctttttaagcgcctcccgccagcctctgctgtggctcgcttcgccgcgctccctccttccccgccttccatacctccccggctccgctcggttcctggccaccccgcagcccctgcccaggtgccatggccgcattgtaccgccctggcctgcggcttaactggcatgggctgagccccttgggctggccatcatgccgtagcatccagaccctgcgagtgcttagtggagatctgggccagcttcccactggcattcgagattttgtagagcacagtgcccgcctgtgccaaccagagggcatccacatctgtgatggaactgaggctgagaatactgccacactgaccctgctggagcagcagggcctcatccgaaagctccccaagtacaataactgctggctggcccgcacagaccccaaggatgtggcacgagtagagagcaagacggtgattgtaactccttctcagcgggacacggtaccactcccgcctggtggggcccgtgggcagctgggcaactggatgtccccagctgatttccagcgagctgtggatgagaggtttccaggctgcatgcagggtaaccagggcaggggcacagtggcaagggcacggaagatgtgaacaggtttggaacccttcatccaggggatgccttcctccacaggccgcaccatgtatgtgcttccattcagcatgggtcctgtgggctccccgctgtcccgcatcggggtgcagctcactgactcagcctatgtggtggcaagcatgcgtattatgacccgactggggacacctgtgcttcaggccctgggagatggtgactttgtcaagtgtctgcactccgtgggccagcccctgacaggacaaggtaagcacctgctctgcccaaggggaacacagaggccttcttgtactcagaggaa

SEQ ID NO: 327466 - DNA, 1714 bp, Homo sapiens
gacaagtgtcttttcctgaaattgctaagtgtatttggcagtactttactacttgtggatagaactgagagtgaggtcagtatcaccaagcctcttggatttcttcagtagtctcatggataagtgaatgtttaaagtaactactactttgttggctcttggttgggtggatggattctcagtcctggtgtttttaaaaatctcattccagccgggcgcggtggctcacgcctgtaatcctagcactttgggaggctgaggcgggcagatcacctgaggtcaggaattcgaaaccagccttaccaacatggcaaaacccatctctattaaaaatacaaaaattagccgggtgtggtggcacgtgcctgtaatcccagctactcgggaggctgaggcaggagaatcacttgaaccctggaggtggtggttgcaatgagccgagattgcgccattgcactctagcctgggtgacagagcgagactccgtctcaaaaaaaaaaaaaaatcgcattccgtctaaagcaagctacaaaatgtgattatttatgtcacgatatgacccagccataaatgtacttcaggtaagaaggacactgacatgatatcttactgatcaaatgcagtcagtaggtatatatgaacttttttctctgtgaagaaaagctattaataagtttgacttaataggcctatagtatgcacatactggccaagattctaaatggattattcagcggttctgtttttgtggaggtgcttattctcatttctccaaagccttaagattcctgggaatagaggaaatgttgctgccaccagctttgctggtgaatttcaaagagaataggtgtttgctgtttgatttctagtgaccttttggcgagctctgatttataggtagaacatttgtgtttcttttcattttgaggccaggtggtagagtggaaagactgggagctgtcaggaaaccaaggcttggatctccactctgttatgtaccagctggggcaaatcagggcccattcccaactcctttaaaatgaaaggactagacttggtctttaagctcccttccgattctaacatttggtggtagcaggattgtgcacaaagctcctaatttagagaaagatctgggttttagtcttttctcctctatcgccgccttaccggttgtacaacattggaccagccattctccccaaggcctcggcattttcattgttaaatgggaacactcctaattcacactgttgctgtgaggattacatttggtaatgaatgatagaatgctttgtacatggaaaaggactatacctttcttttttaactacaaaggcgaacatgtaaccctctacctgtgggcgcacatttgctgtggtgttacgttccactggtagcgcccaacctcccttcattcaagcacattttacgggcctacagggaaggttttcttcctgtcctctcctaagacttgtttatgttcatcatctcttctatactagagctgcagtcttacatttgcttacttcctgacatccacccccaccccagtgatttctccccatctccacctctatattatttgaactaaatgaattcatgaatgaacaaatgagtggatgaatgaatggtaatggataatgggctatgaagtcatatttaaaggcactatctcatttaaaaacaatctaaataaataactacaatgata

SEQ ID NO: 327467 - DNA, 2320 bp, Homo sapiens
gacaagtgtcttttcctgaaattgctaagtgtatttggcagtactttactacttgtggatagaactgagagtgaggtcagtatcaccaagcctcttggatttcttcagtagtctcatggataagtgaatgtttaaagtaactactactttgttggctcttggttgggtggatggattctcagtcctggtgtttttaaaaatctcattccagccgggcgcggtggctcacgcctgtaatcctagcactttgggaggctgaggcgggcagatcacctgaggtcaggaattcgaaaccagccttaccaacatggcaaaacccatctctattaaaaatacaaaaattagccgggtgtggtggcacgtgcctgtaatcccagctactcgggaggctgaggcaggagaatcacttgaaccctggaggtggtggttgcaatgagccgagattgcgccattgcactctagcctgggtgacagagcgagactccgtctcaaaaaaaaaaaaaaatcgcattccgtctaaagcaagctacaaaatgtgattatttatgtcacgatatgacccagccataaatgtacttcaggtaagaaggacactgacatgatatcttactgatcaaatgcagtcagtaggtatatatgaacttttttctctgtgaagaaaagctattaataagtttgacttaataggcctatagtatgcacatactggccaagattctaaatggattattcagcggttctgtttttgtggaggtgcttattctcatttctccaaagccttaagattcctgggaatagaggaaatgttgctgccaccagctttgctggtgaatttcaaagagaataggtgtttgctgtttgatttctagtgaccttttggcgagctctgatttataggtagaacatttgtgtttcttttcattttgaggccaggtggtagagtggaaagactgggagctgtcaggaaaccaaggcttggatctccactctgttatgtaccagctggggcaaatcagggcccattcccaactcctttaaaatgaaaggactagacttggtctttaagctcccttccgattctaacatttggtggtagcaggattgtgcacaaagctcctaatttagagaaagatctgggttttagtcttttctcctctatcgccgccttaccggttgtacaacattggaccagccattctccccaaggcctcggcattttcattgttaaatgggaacactcctaattcacactgttgctgtgaggattacatttggtaatgaatgatagaatgctttgtacatggaaaaggactatacctttcttttttaactacaaaggcgaacatgtaaccctctacctgtgggcgcacatttgctgtggtgttacgttccactggtagcgcccaacctcccttcattcaagcacattttacgggcctacagggaaggttttcttcctgtcctctcctaagacttgtttatgttcatcatctcttctatactagagctgcagtcttacatttgcttacttcctgacatccacccccaccccagtgatttctccccatctccacctctatattatttgaactaaatgaattcatgaatgaacaaatgagtggatgaatgaatggtaatggataatgggctatgaagtcatatttaaaggcactatctcatttaaaaacaatctaaataaataactacaatgataaaaaaaaacaaaccaccacacaccccccaacacccgcacacccaaacccaaacacaacagaaggggcgcccccccccaaagaactacacaccgccggggggacaccccccaaattaccgcccaccccccccatctcttctcgacgaccccagacgggcccccccacaaagcgcgcgcgcccctcacacaacacccccgcacgacagggccagcacttcataacacacgcctcccgaccgcgacacacgccactcacccgagccaacccctgccacaagaacaccccaacccactgcgcgggaacaaaaccgagagcaaccaacccacctcaataattgaagccacccggaggcaaaaccaacacacgcccaggggcaccacggggacaacacagccgccacactcgacgccgcagacacaaccccccccgacgcactccccacaacacacaccgccgccagccaaccacccgacacacgcgacgccgccacgacacacgagcgcacgccccgacccccacgcacgcccccaacagccacacgccaacacgactggccacaccacacaccgacaccgaccccagtacccaagacacacgacgaaaca

SEQ ID NO: 327468 - DNA, 2266 bp, Homo sapiens
gacaagtgtcttttcctgaaattgctaagtgtatttggcagtactttactacttgtggatagaactgagagtgaggtcagtatcaccaagcctcttggatttcttcagtagtctcatggataagtgaatgtttaaagtaactactactttgttggctcttggttgggtggatggattctcagtcctggtgtttttaaaaatctcattccagccgggcgcggtggctcacgcctgtaatcctagcactttgggaggctgaggcgggcagatcacctgaggtcaggaattcgaaaccagccttaccaacatggcaaaacccatctctattaaaaatacaaaaattagccgggtgtggtggcacgtgcctgtaatcccagctactcgggaggctgaggcaggagaatcacttgaaccctggaggtggtggttgcaatgagccgagattgcgccattgcactctagcctgggtgacagagcgagactccgtctcaaaaaaaaaaaaaaatcgcattccgtctaaagcaagctacaaaatgtgattatttatgtcacgatatgacccagccataaatgtacttcaggtaagaaggacactgacatgatatcttactgatcaaatgcagtcagtaggtatatatgaacttttttctctgtgaagaaaagctattaataagtttgacttaataggcctatagtatgcacatactggccaagattctaaatggattattcagcggttctgtttttgtggaggtgcttattctcatttctccaaagccttaagattcctgggaatagaggaaatgttgctgccaccagctttgctggtgaatttcaaagagaataggtgtttgctgtttgatttctagtgaccttttggcgagctctgatttataggtagaacatttgtgtttcttttcattttgaggccaggtggtagagtggaaagactgggagctgtcaggaaaccaaggcttggatctccactctgttatgtaccagctggggcaaatcagggcccattcccaactcctttaaaatgaaaggactagacttggtctttaagctcccttccgattctaacatttggtggtagcaggattgtgcacaaagctcctaatttagagaaagatctgggttttagtcttttctcctctatcgccgccttaccggttgtacaacattggaccagccattctccccaaggcctcggcattttcattgttaaatgggaacactcctaattcacactgttgctgtgaggattacatttggtaatgaatgatagaatgctttgtacatggctgtgggcgcacatttgctgtggtgttacgttccactggtagcgcccaacctcccttcattcaagcacattttacgggcctacagggaaggttttcttcctgtcctctcctaagacttgtttatgttcatcatctcttctatactagagctgcagtcttacatttgcttacttcctgacatccacccccaccccagtgatttctccccatctccacctctatattatttgaactaaatgaattcatgaatgaacaaatgagtggatgaatgaatggtaatggataatgggctatgaagtcatatttaaaggcactatctcatttaaaaacaatctaaataaataactacaatgataaaaaaaaacaaaccaccacacaccccccaacacccgcacacccaaacccaaacacaacagaaggggcgcccccccccaaagaactacacaccgccggggggacaccccccaaattaccgcccaccccccccatctcttctcgacgaccccagacgggcccccccacaaagcgcgcgcgcccctcacacaacacccccgcacgacagggccagcacttcataacacacgcctcccgaccgcgacacacgccactcacccgagccaacccctgccacaagaacaccccaacccactgcgcgggaacaaaaccgagagcaaccaacccacctcaataattgaagccacccggaggcaaaaccaacacacgcccaggggcaccacggggacaacacagccgccacactcgacgccgcagacacaaccccccccgacgcactccccacaacacacaccgccgccagccaaccacccgacacacgcgacgccgccacgacacacgagcgcacgccccgacccccacgcacgcccccaacagccacacgccaacacgactggccacaccacacaccgacaccgaccccagtacccaagacacacgacgaaaca

SEQ ID NO: 327469 - DNA, 585 bp, Homo sapiens
cgtattcccaccttagttactccattcattagctcattgcaaaagtgctggggtggccaaattcagagtcacttagccagttattctgtccacttggttagttaatgactcttgcctagtagatgctttctgttttatactaactagcctgtgataccaacaaattcacacttcatgcctactcccatgtgtccatccacatgtcactacatgaaaactccttgtctcctaccttacaatcttgcttattccaagccccaaccaatcagctaagccatttgccactgctcatgaatccatatatattcttacctttggctgcttctccttttacacaattgataatcatttgcactgcccttcatggactctcacatccacagtcatttatactcacacgcactcacacgcacacgtgcactccccaccaccttcattcacggaggagggggctgggcccaagcggctgccagctgtcctgagctcaccctgctggctgcagcacaggggctgcagtggagtcagatccaatgttcacactcttccttcactccactctccccaaaacacttttactgggataca

SEQ ID NO: 327470 - DNA, 340 bp, Homo sapiens
ttccaggccctactttccagatgacattttgagacacacactggtgcaaaagaacctgctgcctcgaagggaaggacctagtcctggcaggattaatcacctgctgactaaggagcccttgggccctgaatagccagcagtgatacccagggaccacactgtgggcattgggctctgagatgtgctgacttcaggggtgactcagcacattcccagctgtggtggctatggtgaaagactcctgtttgataaaagcttttattaaagactgtatgtctttataggtggacaccatttctggacctgccctgggtcagaggagagcctactgccctgaaag

SEQ ID NO: 327471 - DNA, 197 bp, Homo sapiens
atttacaaagtgtttatgaccacaaaacagaaaatccaccccagggccactggaactaagataaccatttaaactacttatccaaaatagtacgctgtgatctttttatatttgactggtgttagtgattccctaggccaaatagggatgattgcattaactgcatttttgccttagcagaaagctgtaatgcaaag

SEQ ID NO: 327472 - DNA, 309 bp, Homo sapiens
tgtgagcttaatccataaagctgtttccctccaaaggtgtcagctgcatggcgtgggaggtcaggcaagtgggtctgtgttccccagggtgggagaagcattagtagaaacaggtgatgaattccttaattaggatagggaaacactgcagaagagctgtggtctagggattttatgaaatgcaaagcttggaaaattaaagaagcccaatgtgaagaagttaggaggcaggatcaaggtggctgtgaaaacagagaagaaaaacttagagctccttttggagaaaatgggatattagggctaaatttg

SEQ ID NO: 327473 - DNA, 1774 bp, Homo sapiens
gcggcctgggggaaccgaggtgcgggcggcgagcgaggcagccgggtgcttcgcagcggagctcgaggctctgtagcacccagttggacccagtcgcccaggcaccgcccgcgccccgcggccgtctcctgcgcctcccagaggagggagttcgagcatcccccgcggcggccactcctcggggccaggagcggggaagcgaagtgcgagagaccccggaccccagcgctgtctcttcccgccgcccgaaccaccatgacccacttcaacaagggcccttcctatgggctctcggccgaagtcaagaacaagattgcttccaagtatgatcatcaggcagaagaagatcttcgcaattggatagaagaggtgacaggcatgagcattggccccaacttccagctgggcttaaaggatggcatcatcctctgcgaacttataaacaagctacagccaggctcagtgaagaaggtcaacgagtcctcactgaactggcctcagttggagaatattggcaactttattaaagctattcaggcttatggtatgaagccacatgacatattcgaagcaaatgatctttttgagaatggaaacatgacccaggttcagactactctggtggctctagcaggtctggctaaaacaaaaggattccatacaaccattgacattggagttaagtatgcagaaaaacaaacaagacgttttgatgaaggaaaattaaaagctggccaaagtgtaattggtctgcagatgggaaccaacaaatgtgccagccaggcaggtatgacagcttacgggactaggaggcatctttatgatcccaaaatgcaaactgacaaaccttttgaccagaccacaattagtctgcagatgggcactaataaaggagccagccaggcagggatgttagcaccaggtaccagaagagacatctatgatcagaagctaacattacagccggtggacaactcgacaatttccctacagatgggtaccaacaaagttgcttcccagaaaggaatgagtgtgtatgggcttgggcggcaagtatatgatcccaaatactgtgctgctcctacagaacctgtcattcacaacggaagccaaggaacaggaacaaatggttcggaaatcagtgatagtgattatcaggcagaataccctgatgagtatcatggcgagtaccaggatgactaccccagagattaccaatatagcgaccaaggcattgattattagatccacacagaaggagctcagtatttagtcctttgtttttattcagtgagaaccaagctagccttgagtaatttttatcttgtcttcctaaaacactattaagcttattgtacttttaagaaaaattgccttacgtacattcctttttcctttttctgcctcttccctcaatagttgccttttagtgctgtaatagttaaatcctacagcataatcaataactcgcatatgaagtaaaaaggaatactgtgaaaggggagtactcttgtacagccagttcttttatgcaaaaatctatgcatttttacaatcttatattaaactggtattttcaaacaataggaaacttttttttttttttttttacagtttagtgtatctggtttctacatggaagactaaactcatgcttattgctaaatgtggtctttgccaactaaatttaagatgcagcattttagaaatttacatatcaatgtttctacagtattgtttgctaatttttaaataaagtcatgatcagtgtgca

SEQ ID NO: 327474 - DNA, 704 bp, Homo sapiens
gcggcctgggggaaccgaggtgcgggcggcgagcgaggcagccgggtgcttcgcagcggagctcgaggctctgtagcacccagttggacccagtcgcccaggcaccgcccgcgccccgcggccgtctcctgcgcctcccagaggagggagttcgagcatcccccgcggcggccactcctcggggccaggagcggggaagcgaagtgcgagagaccccggaccccagcgctgtctcttcccgccgcccgaaccaccatgacccacttcaacaagggcccttcctatgggctctcggccgaagtcaagaacaagattgcttccaagtatgatcatcaggcagaagaagatcttcgcaattggatagaagaggtgacaggcatgagcattggccccaacttccagctgggcttaaaggatggcatcatcctctgcgaacttataaacaagctacagccaggctcagtgaagaaggtcaacgagtcctcactgaactggcctcagttggagaatattggcaactttattaaagctattcaggcttatggtatgaagccacatgacatattcgaagcaaatgatctttttgagaatggaaacatgacctcgtttctgaaatactgatggtggctttatacagttctgctgagtctaaaggattccactactataattgtcttctggttagtagatcgatcgcacagtga

SEQ ID NO: 327475 - DNA, 803 bp, Homo sapiens
cccacgcgtccgctcttacctagcgaatgagtacacatataatcacaaatgcacactgatcatgactttatttaaaaattagcaaacaatactgtagaaatattgtttgctaatttttaaataaagtcatgatcagtgtgcatttgtgattatatgtgtactcattctcttacctagcgaacaagatcttttcagagtggtgtttctaaaagagcatgtacaaaagtggcctgtggacatttaggcctgggtgatgcatttgctcttcctgtttgtgccaatgtatcaatgtagagttgctctgttttcttcaactgtatttattgctgcatttctcagcataaacttatcccattgtattttttataaataaatattttttttgaactttcaaaaaaaaaaaaaaaagaaaaacgaatacacaactaacagattgaacgaagacgaaacaaacaacaaaaagcgggggggcggcgccaaacaaaaaatatctgctcacaggagcggccaacaattacatcaggcacccaacgtattttgtagacacaagggggcccaacaaaagagagagcgataataacaacacaactgcaagagggacggagataacaacaccggagaacggagaaacaagcggcatccgggcatacttgagaaaaagacacaccaataccggggggggacatctagtaggaacacccccacaaaaataaaagcgccaaggaaacaaaagttggcggctctagcagtaacaccacgaaaatcgcgagtaaaaaatctgccggcagtcgttcaaaattccg

SEQ ID NO: 327476 - DNA, 2597 bp, Homo sapiens
gcggcctgggggaaccgaggtgcgggcggcgagcgaggcagccgggtgcttcgcagcggagctcgaggctctgtagcacccagttggacccagtcgcccaggcaccgcccgcgccccgcggccgtctcctgcgcctcccagaggagggagttcgagcatcccccgcggcggccactcctcggggccaggagcggggaagcgaagtgcgagagaccccggaccccagcgctgtctcttcccgccgcccgaaccaccatgacccacttcaacaagggcccttcctatgggctctcggccgaagtcaagaacaagattgcttccaagtatgatcatcaggcagaagaagatcttcgcaattggatagaagaggtgacaggcatgagcattggccccaacttccagctgggcttaaaggatggcatcatcctctgcgaacttataaacaagctacagccaggctcagtgaagaaggtcaacgagtcctcactgaactggcctcagttggagaatattggcaactttattaaagctattcaggcttatggtatgaagccacatgacatattcgaagcaaatgatctttttgagaatggaaacatgacccaggttcagactactctggtggctctagcaggtctggctaaaacaaaaggattccatacaaccattgacattggagttaagtatgcagaaaaacaaacaagacgttttgatgaaggaaaattaaaagctggccaaagtgtaattggtctgcagatgggaaccaacaaatgtgccagccaggcaggtatgacagcttacgggactaggaggcatctttatgatcccaaaatgcaaactgacaaaccttttgaccagaccacaattagtctgcagatgggcactaataaaggagccagccaggcagggatgttagcaccaggtaccagaagagacatctatgatcagaagctaacattacagccggtggacaactcgacaatttccctacagatgggtaccaacaaagttgcttcccagaaaggaatgagtgtgtatgggcttgggcggcaagtatatgatcccaaatactgtgctgctcctacagaacctgtcattcacaacggaagccaaggaacaggaacaaatggttcggaaatcagtgatagtgattatcaggcagaataccctgatgagtatcatggcgagtaccaggatgactaccccagagattaccaatatagcgaccaaggcattgattattagatccacacagaaggagctcagtatttagtcctttgtttttattcagtgagaaccaagctagccttgagtaatttttatcttgtcttcctaaaacactattaagcttattgtacttttaagaaaaattgccttacgtacattcctttttcctttttctgcctcttccctcaatagttgccttttagtgctgtaatagttaaatcctacagcataatcaataactcgcatatgaagtaaaaaggaatactgtgaaaggggagtactcttgtacagccagttcttttatgctttttttttttttttttacagtttagtgtatctggtttctacatggaagactaaactcatgcttattgctaaatgtggtctttgccaactaaatttaagatgcagcattttagaaatttacatatcaatgtttctacagtattgtttgctaatttttaaataaagtcatgatcagtgtgcatttgtgattatatgtgtactcattctcttacctagcgaacaagatcttttcagagtggtgtttctaaaagagcatgtacaaaagtggcctgtggacatttaggcctgggtgatgcatttgctcttcctgtttgtgccaatgtatcaatgtagagttgctctgttttcttcaactgtatttattgctgcatttctcagcataaacttatcccattgtattttttataaataaatattttttttgaactttcaaaaaaaaacaaaacaaaacaaaaccaaaaccaacgaaaaaacaccacaaaaaaaacaaaccaaacaaacccacaaaaaaaaaaaaaacaacaagacaacccaacattaatacaccaactcaccccacgcaaccacacatgcatctacaccacatccaatcccaacaaaccgacaaatacaccaaccaaccaatctaaatcacaaaaccacacttcactcacgaaacacactcaaacacaacaaaaacaccaacagcacaacacagacaatactcccccaccaaaaacacacacacaccaccccaacacacaccacaatccaacaacaactcacacccaacgaaacactcaccataacaacacacacacacaaccatatacacacacgggacaccccagccacacacaaaaccaaggaccaaacacccagaggatgcccaatcaagaagaacactaaccacaccacgcacaacacagcccaatcaccgcaaactacagaggaacaaaacaagaaccaccatgagacacacccacaccacgcacaaccaaaaagctatccccacaatacctccccccacaccagaacaaccagctctgcgaaacaaaaggaaccaaaagcaccgcaccccgccg

SEQ ID NO: 327477 - DNA, 2609 bp, Homo sapiens
gcggcctgggggaaccgaggtgcgggcggcgagcgaggcagccgggtgcttcgcagcggagctcgaggctctgtagcacccagttggacccagtcgcccaggcaccgcccgcgccccgcggccgtctcctgcgcctcccagaggagggagttcgagcatcccccgcggcggccactcctcggggccaggagcggggaagcgaagtgcgagagaccccggaccccagcgctgtctcttcccgccgcccgaaccaccatgacccacttcaacaagggcccttcctatgggctctcggccgaagtcaagaacaagattgcttccaagtatgatcatcaggcagaagaagatttccagctgggcttaaaggatggcatcatcctctgcgaacttataaacaagctacagccaggctcagtgaagaaggtcaacgagtcctcactgaactggcctcagttggagaatattggcaactttattaaagctattcaggcttatggtatgaagccacatgacatattcgaagcaaatgatctttttgagaatggaaacatgacccaggttcagactactctggtggctctagcaggtctggctaaaacaaaaggattccatacaaccattgacattggagttaagtatgcagaaaaacaaacaagacgttttgatgaaggaaaattaaaagctggccaaagtgtaattggtctgcagatgggaaccaacaaatgtgccagccaggcaggtatgacagcttacgggactaggaggcatctttatgatcccaaaatgcaaactgacaaaccttttgaccagaccacaattagtctgcagatgggcactaataaaggagccagccaggcagggatgttagcaccaggtaccagaagagacatctatgatcagaagctaacattacagccggtggacaactcgacaatttccctacagatgggtaccaacaaagttgcttcccagaaaggaatgagtgtgtatgggcttgggcggcaagtatatgatcccaaatactgtgctgctcctacagaacctgtcattcacaacggaagccaaggaacaggaacaaatggttcggaaatcagtgatagtgattatcaggcagaataccctgatgagtatcatggcgagtaccaggatgactaccccagagattaccaatatagcgaccaaggcattgattattagatccacacagaaggagctcagtatttagtcctttgtttttattcagtgagaaccaagctagccttgagtaatttttatcttgtcttcctaaaacactattaagcttattgtacttttaagaaaaattgccttacgtacattcctttttcctttttctgcctcttccctcaatagttgccttttagtgctgtaatagttaaatcctacagcataatcaataactcgcatatgaagtaaaaaggaatactgtgaaaggggagtactcttgtacagccagttcttttatgcaaaaatctatgcatttttacaatcttatattaaactggtattttcaaacaataggaaacttttttttttttttttttacagtttagtgtatctggtttctacatggaagactaaactcatgcttattgctaaatgtggtctttgccaactaaatttaagatgcagcattttagaaatttacatatcaatgtttctacagtattgtttgctaatttttaaataaagtcatgatcagtgtgcatttgtgattatatgtgtactcattctcttacctagcgaacaagatcttttcagagtggtgtttctaaaagagcatgtacaaaagtggcctgtggacatttaggcctgggtgatgcatttgctcttcctgtttgtgccaatgtatcaatgtagagttgctctgttttcttcaactgtatttattgctgcatttctcagcataaacttatcccattgtattttttataaataaatattttttttgaactttcaaaaaaaaacaaaacaaaacaaaaccaaaaccaacgaaaaaacaccacaaaaaaaacaaaccaaacaaacccacaaaaaaaaaaaaaacaacaagacaacccaacattaatacaccaactcaccccacgcaaccacacatgcatctacaccacatccaatcccaacaaaccgacaaatacaccaaccaaccaatctaaatcacaaaaccacacttcactcacgaaacacactcaaacacaacaaaaacaccaacagcacaacacagacaatactcccccaccaaaaacacacacacaccaccccaacacacaccacaatccaacaacaactcacacccaacgaaacactcaccataacaacacacacacacaaccatatacacacacgggacaccccagccacacacaaaaccaaggaccaaacacccagaggatgcccaatcaagaagaacactaaccacaccacgcacaacacagcccaatcaccgcaaactacagaggaacaaaacaagaaccaccatgagacacacccacaccacgcacaaccaaaaagctatccccacaatacctccccccacaccagaacaaccagctctgcgaaacaaaaggaaccaaaagcaccgcaccccgccg

SEQ ID NO: 327478 - DNA, 1957 bp, Homo sapiens
gcggcctgggggaaccgaggtgcgggcggcgagcgaggcagccgggtgcttcgcagcggagctcgaggctctgtagcacccagttggacccagtcgcccaggcaccgcccgcgccccgcggccgtctcctgcgcctcccagaggagggagttcgagcatcccccgcggcggccactcctcggggccaggagcggggaagcgaagtgcgagagaccccggaccccagcgctgtctcttcccgccgcccgaaccaccatgacccacttcaacaagggcccttcctatgggctctcggccgaagtcaagaacaagattgcttccaagtatgatcatcaggcagaagaagatcttcgcaattggatagaagaggtgacaggcatgagcattggccccaacttccagctgggcttaaaggatggcatcatcctctgcgaacttataaacaagctacagccaggctcagtgaagaaggtcaacgagtcctcactgaactggcctcagttggagaatattggcaactttattaaagctattcaggcttatggtatgaagccacatgacatattcgaagcaaatgatctttttgagaatggaaacatgacccaggttcagactactctggtggctctagcaggtctggctaaaacaaaaggattccatacaaccattgacattggagttaagtatgcagaaaaacaaacaagacgttttgatgaaggaaaattaaaagctggccaaagtgtaattggtctgcagatgggaaccaacaaatgtgccagccaggcaggtatgacagcttacgggactaggaggcatctttatgatcccaaaatgcaaactgacaaaccttttgaccagaccacaattagtctgcagatgggcactaataaaggagccagccaggcagggatgttagcaccaggtaccagaagagacatctatgatcagaagctaacattacagccggtggacaactcgacaatttccctacagatgggtaccaacaaagttgcttcccagaaaggaatgagtgtgtatgggcttgggcggcaagtatatgatcccaaatactgtgctgctcctacagaacctgtcattcacaacggaagccaaggaacaggaacaaatggttcggaaatcagtgatagtgattatcaggcagaataccctgatgagtatcatggcgagtaccaggatgactaccccagagattaccaatatagcgaccaaggcattgattattagatccacacagaaggagctcagtatttagtcctttgtttttattcagtgagaaccaagctagccttgagtaatttttatcttgtcttcctaaaacactattaagcttattgtacttttaagaaaaattgccttacgtacattcctttttcctttttctgcctcttccctcaatagttgccttttagtgctgtaatagttaaatcctacagcataatcaataactcgcatatgaagtaaaaaggaatactgtgaaaggggagtactcttgtacagccagttcttttatgcaaaaatctatgcatttttacaatcttatattaaactggtattttcaaacaataggaaacttttttttttttttttttacagtttagtgtatcggggtcacggggaagacatctaacctccagtggcttatggcgtcaaagtggtggtccttggcgccacactcaatttaagaagtccggacttttcgaaacttccccttatcccgggtctctaccagtatgggtcggccacattcttcacaataaaggtctgtgaaccacgcgtgcactcgggcgaccgcattgtgtaccccattcttcttacctagcgaaccaggatctttcccaagtgggcgcttctaaaaaaacgcttggttcccacaagtggccggtgggacaatttaaggcccgggggaaaggacatgggcccttccggttggggccat

SEQ ID NO: 327479 - DNA, 2519 bp, Homo sapiens
gcggcctgggggaaccgaggtgcgggcggcgagcgaggcagccgggtgcttcgcagcggagctcgaggctctgtagcacccagttggacccagtcgcccaggcaccgcccgcgccccgcggccgtctcctgcgcctcccagaggagggagttcgagcatcccccgcggcggccactcctcggggccaggagcggggaagcgaagtgcgagagaccccggaccccagcgctgtctcttcccgccgcccgaaccaccatgacccacttcaacaagggcccttcctatgggctctcggccgaagtcaagaacaagattgcttccaagtatgatcatcaggcagaagaagatcttcgcaattggatagaagaggtgacaggcatgagcattggccccaacttccagctgggcttaaaggatggcatcatcctctgcgaacttataaacaagctacagccaggctcagtgaagaaggtcaacgagtcctcactgaactggcctcaggctaaaacaaaaggattccatacaaccattgacattggagttaagtatgcagaaaaacaaacaagacgttttgatgaaggaaaattaaaagctggccaaagtgtaattggtctgcagatgggaaccaacaaatgtgccagccaggcaggtatgacagcttacgggactaggaggcatctttatgatcccaaaatgcaaactgacaaaccttttgaccagaccacaattagtctgcagatgggcactaataaaggagccagccaggcagggatgttagcaccaggtaccagaagagacatctatgatcagaagctaacattacagccggtggacaactcgacaatttccctacagatgggtaccaacaaagttgcttcccagaaaggaatgagtgtgtatgggcttgggcggcaagtatatgatcccaaatactgtgctgctcctacagaacctgtcattcacaacggaagccaaggaacaggaacaaatggttcggaaatcagtgatagtgattatcaggcagaataccctgatgagtatcatggcgagtaccaggatgactaccccagagattaccaatatagcgaccaaggcattgattattagatccacacagaaggagctcagtatttagtcctttgtttttattcagtgagaaccaagctagccttgagtaatttttatcttgtcttcctaaaacactattaagcttattgtacttttaagaaaaattgccttacgtacattcctttttcctttttctgcctcttccctcaatagttgccttttagtgctgtaatagttaaatcctacagcataatcaataactcgcatatgaagtaaaaaggaatactgtgaaaggggagtactcttgtacagccagttcttttatgcaaaaatctatgcatttttacaatcttatattaaactggtattttcaaacaataggaaacttttttttttttttttttacagtttagtgtatctggtttctacatggaagactaaactcatgcttattgctaaatgtggtctttgccaactaaatttaagatgcagcattttagaaatttacatatcaatgtttctacagtattgtttgctaatttttaaataaagtcatgatcagtgtgcatttgtgattatatgtgtactcattctcttacctagcgaacaagatcttttcagagtggtgtttctaaaagagcatgtacaaaagtggcctgtggacatttaggcctgggtgatgcatttgctcttcctgtttgtgccaatgtatcaatgtagagttgctctgttttcttcaactgtatttattgctgcatttctcagcataaacttatcccattgtattttttataaataaatattttttttgaactttcaaaaaaaaacaaaacaaaacaaaaccaaaaccaacgaaaaaacaccacaaaaaaaacaaaccaaacaaacccacaaaaaaaaaaaaaacaacaagacaacccaacattaatacaccaactcaccccacgcaaccacacatgcatctacaccacatccaatcccaacaaaccgacaaatacaccaaccaaccaatctaaatcacaaaaccacacttcactcacgaaacacactcaaacacaacaaaaacaccaacagcacaacacagacaatactcccccaccaaaaacacacacacaccaccccaacacacaccacaatccaacaacaactcacacccaacgaaacactcaccataacaacacacacacacaaccatatacacacacgggacaccccagccacacacaaaaccaaggaccaaacacccagaggatgcccaatcaagaagaacactaaccacaccacgcacaacacagcccaatcaccgcaaactacagaggaacaaaacaagaaccaccatgagacacacccacaccacgcacaaccaaaaagctatccccacaatacctccccccacaccagaacaaccagctctgcgaaacaaaaggaaccaaaagcaccgcaccccgccg

SEQ ID NO: 327480 - DNA, 1791 bp, Homo sapiens
gaattcccgggtgggcactaataaaggagccagccaggcagggatgttagcaccaggtaccagaagagacatctatgatcagaagctaacattacagccggtggacaactcgacaatttccctacagatgggtaccaacaaagttgcttcccagaaaggaatgagtgtgtatgggcttgggcggcaagtatatgatcccaaatactgtgctgctcctacagaacctgtcattcacaacggaagccaaggaacaggaacaaatggttcggaaatcagtgatagtgattatcaggcagaataccctgatgagtatcatggcgagtaccaggatgactaccccagagattaccaatatagcgaccaaggcattgattattagatccacacagaaggagctcagtatttagtcctttgtttttattcagtgagaaccaagctagccttgagtaatttttatcttgtcttcctaaaacactattaagcttattgtacttttaagaaaaattgccttacgtacattcctttttcctttttctgcctcttccctcaatagttgccttttagtgctgtaatagttaaatcctacagcataatcaataactcgcatatgaagtaaaaaggaatactgtgaaaggggagtactcttgtacagccagttcttttatgcaaaaatctatgcatttttacaatcttatattaaactggtattttcaaacaataggaaacttttttttttttttttttacagtttagtgtatctggtttctacatggaagactaaactcatgcttattgctaaatgtggtctttgccaactaaatttaagatgcagcattttagaaatttacatatcaatgtttctacagtattgtttgctaatttttaaataaagtcatgatcagtgtgcatttgtgattatatgtgtactcattctcttacctagcgaacaagatcttttcagagtggtgtttctaaaagagcatgtacaaaagtggcctgtggacatttaggcctgggtgatgcatttgctcttcctgtttgtgccaatgtatcaatgtagagttgctctgttttcttcaactgtatttattgctgcatttctcagcataaacttatcccattgtattttttataaataaatattttttttgaactttcaaaaaaaaacaaaacaaaacaaaaccaaaaccaacgaaaaaacaccacaaaaaaaacaaaccaaacaaacccacaaaaaaaaaaaaaacaacaagacaacccaacattaatacaccaactcaccccacgcaaccacacatgcatctacaccacatccaatcccaacaaaccgacaaatacaccaaccaaccaatctaaatcacaaaaccacacttcactcacgaaacacactcaaacacaacaaaaacaccaacagcacaacacagacaatactcccccaccaaaaacacacacacaccaccccaacacacaccacaatccaacaacaactcacacccaacgaaacactcaccataacaacacacacacacaaccatatacacacacgggacaccccagccacacacaaaaccaaggaccaaacacccagaggatgcccaatcaagaagaacactaaccacaccacgcacaacacagcccaatcaccgcaaactacagaggaacaaaacaagaaccaccatgagacacacccacaccacgcacaaccaaaaagctatccccacaatacctccccccacaccagaacaaccagctctgcgaaacaaaaggaaccaaaagcaccgcaccccgccg

SEQ ID NO: 327481 - DNA, 1320 bp, Homo sapiens
gcggcctgggggaaccgaggtgcgggcggcgagcgaggcagccgggtgcttcgcagcggagctcgaggctctgtagcacccagttggacccagtcgcccaggcaccgcccgcgccccgcggccgtctcctgcgcctcccagaggagggagttcgagcatcccccgcggcggccactcctcggggccaggagcggggaagcgaagtgcgagagaccccggaccccagcgctgtctcttcccgccgcccgaaccaccatgacccacttcaacaagggcccttcctatgggctctcggccgaagtcaagaacaagattgcttccaagtatgatcatcaggcagaagaagatcttcgcaattggatagaagaggtgacaggcatgagcattggccccaacttccagctgggcttaaaggatggcatcatcctctgcgaacttataaacaagctacagccaggctcagtgaagaaggtcaacgagtcctcactgaactggcctcagttggagaatattggcaactttattaaagctattcaggcttatggtatgaagccacatgacatattcgaagcaaatgatctttttgagaatggaaacatgacccaggttcagactactctggtggctctagcaggtctggctaaaacaaaaggattccatacaaccattgacattggagttaagtatgcagaaaaacaaacaagacgttttgatgaaggaaaattaaaagctggccaaagtgtaattggtctgcagatgggaaccaacaaatgtgccagccaggcaggtatgacagcttacgggactaggaggcatctttatgatcccaaaatgcaaactgacaaaccttttgaccagaccacaattagtctgcagatgggcactaataaaggagccagccaggcagggatgttagcaccaggtaccagaagagacatctatgatcagaagctaacattacagccggtggacaactcgacaatttccctacagatgggtaccaacaaagttgcttcccagaaaggaatgagtgtgtatgggcttgggcggcaagtatatgatcccaaatactgtgctgctcctacagaacctgtcattcacaacggaagccaaggaacaggaacaaatggttcggaaatcagtgatagtgattatcaggcagaataccctgatgagtatcatggcgagtaccaggatgactaccccagagattaccaaagctcgtcataccaggcgtattatacatagccgcctagttttaagagtactgcggcaagtactattgacccagcgatgggggttcgacatgggctttagggt

SEQ ID NO: 327482 - DNA, 430 bp, Homo sapiens
ggctgcgggggtaggcggtgtgaagcgaattatgtaaagaggtaatgaagcgcaccgttgtcaaaccccaagggagagttgtggctcttgtctcccgctgttagtctgcacatcatactgtctttgaagcaaggagttgattttagtctatgtatctaaagttgaaatgtttaggtcctttaccttttcaaacgtgttgcccgtattagacaacagtttgctaacaatttttttagagagcagaaaggtgaatggtttgtgtatgattgagtgcaaacctcaccaactgaaaagtttgtaacaagttactgtttccttccttccaggatttacaaaccgaactttaggaaacttcagaggaatgggcatgtccaaaatgttggatgtgatgtgatactttggcctggttgtgcacattcattgtaattcc

SEQ ID NO: 327483 - DNA, 917 bp, Homo sapiens
gcggcctgggggaaccgaggtgcgggcggcgagcgaggcagccgggtgcttcgcagcggagctcgaggctctgtagcacccagttggacccagtcgcccaggcaccgcccgcgccccgcggccgtctcctgcgcctcccagaggagggagttcgagcatcccccgcggcggccactcctcggggccaggagcggggaagcgaagtgcgagagaccccggaccccagcgctgtctcttcccgccgcccgaaccaccatgacccacttcaacaagggcccttcctatgggctctcggccgaagtcaagaacaagattgcttccaagtatgatcatcaggcagaagaagatcttcgcaattggatagaagaggtgacaggcatgagcattggccccaacttccagctgggcttaaaggatggcatcatcctctgcgaacttataaacaagctacagccaggctcagtgaagaaggtcaacgagtcctcactgaactggcctcagttggagaatattggcaactttattaaagctattcaggcttatggtatgaagccacatgacatattcgaagcaaatgatctttttgagaatggaaacatgacccaggttcagactactctggtggctctagcaggtctggctaaaacaaaaggattccatacaaccattgacattggagttaagtatgcagaaaaacaaacaagacgttttgatgaaggaaaattaaaagctggccaaagtgtaattggtctgcagatgggaaccaacaaatgtgccagccaggcaggtatgacagcttacgggactaggaggcatctttatgatcccaaaatgcaaactgacaaaccttttgaccagaccacaattagtctgcagatgggcactaataaaggagccagccaggtaagcaatacctt

SEQ ID NO: 327484 - DNA, 2657 bp, Homo sapiens
gcggcctgggggaaccgaggtgcgggcggcgagcgaggcagccgggtgcttcgcagcggagctcgaggctctgtagcacccagttggacccagtcgcccaggcaccgcccgcgccccgcggccgtctcctgcgcctcccagaggagggagttcgagcatcccccgcggcggccactcctcggggccaggagcggggaagcgaagtgcgagagaccccggaccccagcgctgtctcttcccgccgcccgaaccaccatgacccacttcaacaagggcccttcctatgggctctcggccgaagtcaagaacaagattgcttccaagtatgatcatcaggcagaagaagatcttcgcaattggatagaagaggtgacaggcatgagcattggccccaacttccagctgggcttaaaggatggcatcatcctctgcgaacttataaacaagctacagccaggctcagtgaagaaggtcaacgagtcctcactgaactggcctcagttggagaatattggcaactttattaaagctattcaggcttatggtatgaagccacatgacatattcgaagcaaatgatctttttgagaatggaaacatgacccaggttcagactactctggtggctctagcaggtctggctaaaacaaaaggattccatacaaccattgacattggagttaagtatgcagaaaaacaaacaagacgttttgatgaaggaaaattaaaagctggccaaagtgtaattggtctgcagatgggaaccaacaaatgtgccagccaggcaggtatgacagcttacgggactaggaggcatctttatgatcccaaaatgcaaactgacaaaccttttgaccagaccacaattagtctgcagatgggcactaataaaggagccagccaggcagggatgttagcaccaggtaccagaagagacatctatgatcagaagctaacattacagccggtggacaactcgacaatttccctacagatgggtaccaacaaagttgcttcccagaaaggaatgagtgtgtatgggcttgggcggcaagtatatgatcccaaatactgtgctgctcctacagaacctgtcattcacaacggaagccaaggaacaggaacaaatggttcggaaatcagtgatagtgattatcaggcagaataccctgatgagtatcatggcgagtaccaggatgactaccccagagattaccaatatagcgaccaaggcattgattattagatccacacagaaggagctcagtatttagtcctttgtttttattcagtgagaaccaagctagccttgagtaatttttatcttgtcttcctaaaacactattaagcttattgtacttttaagaaaaattgccttacgtacattcctttttcctttttctgcctcttccctcaatagttgccttttagtgctgtaatagttaaatcctacagcataatcaataactcgcatatgaagtaaaaaggaatactgtgaaaggggagtactcttgtacagccagttcttttatgcaaaaatctatgcatttttacaatcttatattaaactggtattttcaaacaataggaaacttttttttttttttttttacagtttagtgtatctggtttctacatggaagactaaactcatgcttattgctaaatgtggtctttgccaactaaatttaagatgcagcattttagaaatttacatatcaatgtttctacagtattgtttgctaatttttaaataaagtcatgatcagtgtgcatttgtgattatatgtgtactcattctcttacctagcgaacaagatcttttcagagtggtgtttctaaaagagcatgtacaaaagtggcctgtggacatttaggcctgggtgatgcatttgctcttcctgtttgtgccaatgtatcaatgtagagttgctctgttttcttcaactgtatttattgctgcatttctcagcataaacttatcccattgtattttttataaataaatattttttttgaactttcaaaaaaaaacaaaacaaaacaaaaccaaaaccaacgaaaaaacaccacaaaaaaaacaaaccaaacaaacccacaaaaaaaaaaaaaacaacaagacaacccaacattaatacaccaactcaccccacgcaaccacacatgcatctacaccacatccaatcccaacaaaccgacaaatacaccaaccaaccaatctaaatcacaaaaccacacttcactcacgaaacacactcaaacacaacaaaaacaccaacagcacaacacagacaatactcccccaccaaaaacacacacacaccaccccaacacacaccacaatccaacaacaactcacacccaacgaaacactcaccataacaacacacacacacaaccatatacacacacgggacaccccagccacacacaaaaccaaggaccaaacacccagaggatgcccaatcaagaagaacactaaccacaccacgcacaacacagcccaatcaccgcaaactacagaggaacaaaacaagaaccaccatgagacacacccacaccacgcacaaccaaaaagctatccccacaatacctccccccacaccagaacaaccagctctgcgaaacaaaaggaaccaaaagcaccgcaccccgccg

SEQ ID NO: 327485 - DNA, 2514 bp, Homo sapiens
cacaaaggagggctgcctgtggtttaattcccattaacctcccgggagcccaagcatgtcaggattgccaccgcaccgtccgaccgctggtggaaggcactggcattgtcagagctggaacatcccggggctgcgggggtaggcggtgtgaagcgaattatgtaaagagattgcttccaagtatgatcatcaggcagaagaagatcttcgcaattggatagaagaggtgacaggcatgagcattggccccaacttccagctgggcttaaaggatggcatcatcctctgcgaacttataaacaagctacagccaggctcagtgaagaaggtcaacgagtcctcactgaactggcctcagttggagaatattggcaactttattaaagctattcaggcttatggtatgaagccacatgacatattcgaagcaaatgatctttttgagaatggaaacatgacccaggttcagactactctggtggctctagcaggtctggctaaaacaaaaggattccatacaaccattgacattggagttaagtatgcagaaaaacaaacaagacgttttgatgaaggaaaattaaaagctggccaaagtgtaattggtctgcagatgggaaccaacaaatgtgccagccaggcaggtatgacagcttacgggactaggaggcatctttatgatcccaaaatgcaaactgacaaaccttttgaccagaccacaattagtctgcagatgggcactaataaaggagccagccaggcagggatgttagcaccaggtaccagaagagacatctatgatcagaagctaacattacagccggtggacaactcgacaatttccctacagatgggtaccaacaaagttgcttcccagaaaggaatgagtgtgtatgggcttgggcggcaagtatatgatcccaaatactgtgctgctcctacagaacctgtcattcacaacggaagccaaggaacaggaacaaatggttcggaaatcagtgatagtgattatcaggcagaataccctgatgagtatcatggcgagtaccaggatgactaccccagagattaccaatatagcgaccaaggcattgattattagatccacacagaaggagctcagtatttagtcctttgtttttattcagtgagaaccaagctagccttgagtaatttttatcttgtcttcctaaaacactattaagcttattgtacttttaagaaaaattgccttacgtacattcctttttcctttttctgcctcttccctcaatagttgccttttagtgctgtaatagttaaatcctacagcataatcaataactcgcatatgaagtaaaaaggaatactgtgaaaggggagtactcttgtacagccagttcttttatgcaaaaatctatgcatttttacaatcttatattaaactggtattttcaaacaataggaaacttttttttttttttttttacagtttagtgtatctggtttctacatggaagactaaactcatgcttattgctaaatgtggtctttgccaactaaatttaagatgcagcattttagaaatttacatatcaatgtttctacagtattgtttgctaatttttaaataaagtcatgatcagtgtgcatttgtgattatatgtgtactcattctcttacctagcgaacaagatcttttcagagtggtgtttctaaaagagcatgtacaaaagtggcctgtggacatttaggcctgggtgatgcatttgctcttcctgtttgtgccaatgtatcaatgtagagttgctctgttttcttcaactgtatttattgctgcatttctcagcataaacttatcccattgtattttttataaataaatattttttttgaactttcaaaaaaaaacaaaacaaaacaaaaccaaaaccaacgaaaaaacaccacaaaaaaaacaaaccaaacaaacccacaaaaaaaaaaaaaacaacaagacaacccaacattaatacaccaactcaccccacgcaaccacacatgcatctacaccacatccaatcccaacaaaccgacaaatacaccaaccaaccaatctaaatcacaaaaccacacttcactcacgaaacacactcaaacacaacaaaaacaccaacagcacaacacagacaatactcccccaccaaaaacacacacacaccaccccaacacacaccacaatccaacaacaactcacacccaacgaaacactcaccataacaacacacacacacaaccatatacacacacgggacaccccagccacacacaaaaccaaggaccaaacacccagaggatgcccaatcaagaagaacactaaccacaccacgcacaacacagcccaatcaccgcaaactacagaggaacaaaacaagaaccaccatgagacacacccacaccacgcacaaccaaaaagctatccccacaatacctccccccacaccagaacaaccagctctgcgaaacaaaaggaaccaaaagcaccgcaccccgccg

SEQ ID NO: 327486 - DNA, 1975 bp, Homo sapiens
gcggcctgggggaaccgaggtgcgggcggcgagcgaggcagccgggtgcttcgcagcggagctcgaggctctgtagcacccagttggacccagtcgcccaggcaccgcccgcgccccgcggccgtctcctgcgcctcccagaggagggagttcgagcatcccccgcggcggccactcctcggggccaggagcggggaagcgaagtgcgagagaccccggaccccagcgctgtctcttcccgccgcccgaaccaccatgacccacttcaacaagggcccttcctatgggctctcggccgaagtcaagaacaagattgcttccaagtatgatcatcaggcagaagaagatcttcgcaattggatagaagaggtgacaggcatgagcattggccccaacttccagctgggcttaaaggatggcatcatcctctgcgaacttataaacaagctacagccaggctcagtgaagaaggtcaacgagtcctcactgaactggcctcagttggagaatattggcaactttattaaagctattcaggcttatggtatgaagccacatgacatattcgaagcaaatgatctttttgagaatggaaacatgacccaggttcagactactctggtggctctagcaggtctggctaaaacaaaaggattccatacaaccattgacattggagttaagtatgcagaaaaacaaacaagacgttttgatgaaggaaaattaaaagctggccaaagtgtaattggtctgcagatgggaaccaacaaatgtgccagccaggcaggtatgacagcttacgggactaggaggcatctttatgatcccaaaatgcaaactgacaaaccttttgaccagaccacaattagtctgcagatgggcactaataaaggagccagccaggcagggatgttagcaccaggtaccagaagagacatctatgatcagaagctaacattacagccggtggacaactcgacaatttccctacagatgggtaccaacaaagttgcttcccagaaaggaatgagtgtgtatgggcttgggcggcaagtatatgatcccaaatactgtgctgctcctacagaacctgtcattcacaacggaagccaaggaacaggaacaaatggttcggaaatcagtgatagtgattatcaggcagaataccctgatgagtatcatggcgagtaccaggatgactaccccagagattaccaatatagcgaccaaggcattgattattagatccacacagaaggagctcagtatttagtcctttgtttttattcagtgagaaccaagctagccttgagtaatttttatcttgtcttcctaaaacactattaagcttattgtacttttaagaaaaattgccttacgtacattcctttttcctttttctgcctcttccctcaatagttgccttttagtgctgtaatagttaaatcctacagcataatcaataactcgcatatgaagtaaaaaggaatactgtgaaaggggagtactcttgtacagccagttcttttatgcaaaaatctatgcatttttacaatcttatattaaactggtattttcaaacaataggaaacttttttttttaacagtaggggatcgggttccccctggaagataactcaggcttatggtaagtggtcttgccaccccaaatttaagaagccgccttctcgaaaattcacatactcagggtcctaccgcatgggggtaattctaacaaagcctgaccaggggcatgggatattggtgtcacccctgaccagcgacagatctccgaggggtcccacagcagggcacacggcgggcgctcgcggggagcttgccccggtggcacgtacgacgagccgcccagatttggatcacgaaaccccgtgtctaacttgcggcaaaacagcacaaaaacaaggcccacacggcggatgtatgtcgccgcgcctacttccaccgagcgagacag

SEQ ID NO: 327487 - DNA, 2118 bp, Homo sapiens
tctagtttgggcccctttgtctatggacatatcatttctttgttgttccttctgtgaaactctgttggccttttcagttagtgtgcatgtttctgtctaggctaaaacaaaaggattccatacaaccattgacattggagttaagtatgcagaaaaacaaacaagacgttttgatgaaggaaaattaaaagctggccaaagtgtaattggtctgcagatgggaaccaacaaatgtgccagccaggcaggtatgacagcttacgggactaggaggcatctttatgatcccaaaatgcaaactgacaaaccttttgaccagaccacaattagtctgcagatgggcactaataaaggagccagccaggcagggatgttagcaccaggtaccagaagagacatctatgatcagaagctaacattacagccggtggacaactcgacaatttccctacagatgggtaccaacaaagttgcttcccagaaaggaatgagtgtgtatgggcttgggcggcaagtatatgatcccaaatactgtgctgctcctacagaacctgtcattcacaacggaagccaaggaacaggaacaaatggttcggaaatcagtgatagtgattatcaggcagaataccctgatgagtatcatggcgagtaccaggatgactaccccagagattaccaatatagcgaccaaggcattgattattagatccacacagaaggagctcagtatttagtcctttgtttttattcagtgagaaccaagctagccttgagtaatttttatcttgtcttcctaaaacactattaagcttattgtacttttaagaaaaattgccttacgtacattcctttttcctttttctgcctcttccctcaatagttgccttttagtgctgtaatagttaaatcctacagcataatcaataactcgcatatgaagtaaaaaggaatactgtgaaaggggagtactcttgtacagccagttcttttatgcaaaaatctatgcatttttacaatcttatattaaactggtattttcaaacaataggaaacttttttttttttttttttacagtttagtgtatctggtttctacatggaagactaaactcatgcttattgctaaatgtggtctttgccaactaaatttaagatgcagcattttagaaatttacatatcaatgtttctacagtattgtttgctaatttttaaataaagtcatgatcagtgtgcatttgtgattatatgtgtactcattctcttacctagcgaacaagatcttttcagagtggtgtttctaaaagagcatgtacaaaagtggcctgtggacatttaggcctgggtgatgcatttgctcttcctgtttgtgccaatgtatcaatgtagagttgctctgttttcttcaactgtatttattgctgcatttctcagcataaacttatcccattgtattttttataaataaatattttttttgaactttcaaaaaaaaacaaaacaaaacaaaaccaaaaccaacgaaaaaacaccacaaaaaaaacaaaccaaacaaacccacaaaaaaaaaaaaaacaacaagacaacccaacattaatacaccaactcaccccacgcaaccacacatgcatctacaccacatccaatcccaacaaaccgacaaatacaccaaccaaccaatctaaatcacaaaaccacacttcactcacgaaacacactcaaacacaacaaaaacaccaacagcacaacacagacaatactcccccaccaaaaacacacacacaccaccccaacacacaccacaatccaacaacaactcacacccaacgaaacactcaccataacaacacacacacacaaccatatacacacacgggacaccccagccacacacaaaaccaaggaccaaacacccagaggatgcccaatcaagaagaacactaaccacaccacgcacaacacagcccaatcaccgcaaactacagaggaacaaaacaagaaccaccatgagacacacccacaccacgcacaaccaaaaagctatccccacaatacctccccccacaccagaacaaccagctctgcgaaacaaaaggaaccaaaagcaccgcaccccgccg

SEQ ID NO: 327488 - DNA, 2595 bp, Homo sapiens
gcggcctgggggaaccgaggtgcgggcggcgagcgaggcagccgggtgcttcgcagcggagctcgaggctctgtagcacccagttggacccagtcgcccaggcaccgcccgcgccccgcggccgtctcctgcgcctcccagaggagggagttcgagcatcccccgcggcggccactcctcggggccaggagcggggaagcgaagtgcgagagaccccggaccccagcgctgtctcttcccgccgcccgaaccaccatgacccacttcaacaagggcccttcctatgggctctcggccgaagtcaagaacaagattgcttccaagtatgatcatcaggcagaagaagatcttcgcaattggatagaagaggtgacaggcatgagcattggccccaacttccagctgggcttaaaggatggcatcatcctctgcgaacttataaacaagctacagccaggctcagtgaagaaggtcaacgagtcctcactgaactggcctcagttggagaatattggcaactttattaaagctattcaggcttatggtatgaagccacatgacatattcgaagcaaatgatctttttgagaatggaaacatgacccaggttcagactactctggtggctctagcaggtctggctaaaacaaaaggattccatacaaccattgacattggagttaagtatgcagaaaatgggaaccaacaaatgtgccagccaggcaggtatgacagcttacgggactaggaggcatctttatgatcccaaaatgcaaactgacaaaccttttgaccagaccacaattagtctgcagatgggcactaataaaggagccagccaggcagggatgttagcaccaggtaccagaagagacatctatgatcagaagctaacattacagccggtggacaactcgacaatttccctacagatgggtaccaacaaagttgcttcccagaaaggaatgagtgtgtatgggcttgggcggcaagtatatgatcccaaatactgtgctgctcctacagaacctgtcattcacaacggaagccaaggaacaggaacaaatggttcggaaatcagtgatagtgattatcaggcagaataccctgatgagtatcatggcgagtaccaggatgactaccccagagattaccaatatagcgaccaaggcattgattattagatccacacagaaggagctcagtatttagtcctttgtttttattcagtgagaaccaagctagccttgagtaatttttatcttgtcttcctaaaacactattaagcttattgtacttttaagaaaaattgccttacgtacattcctttttcctttttctgcctcttccctcaatagttgccttttagtgctgtaatagttaaatcctacagcataatcaataactcgcatatgaagtaaaaaggaatactgtgaaaggggagtactcttgtacagccagttcttttatgcaaaaatctatgcatttttacaatcttatattaaactggtattttcaaacaataggaaacttttttttttttttttttacagtttagtgtatctggtttctacatggaagactaaactcatgcttattgctaaatgtggtctttgccaactaaatttaagatgcagcattttagaaatttacatatcaatgtttctacagtattgtttgctaatttttaaataaagtcatgatcagtgtgcatttgtgattatatgtgtactcattctcttacctagcgaacaagatcttttcagagtggtgtttctaaaagagcatgtacaaaagtggcctgtggacatttaggcctgggtgatgcatttgctcttcctgtttgtgccaatgtatcaatgtagagttgctctgttttcttcaactgtatttattgctgcatttctcagcataaacttatcccattgtattttttataaataaatattttttttgaactttcaaaaaaaaacaaaacaaaacaaaaccaaaaccaacgaaaaaacaccacaaaaaaaacaaaccaaacaaacccacaaaaaaaaaaaaaacaacaagacaacccaacattaatacaccaactcaccccacgcaaccacacatgcatctacaccacatccaatcccaacaaaccgacaaatacaccaaccaaccaatctaaatcacaaaaccacacttcactcacgaaacacactcaaacacaacaaaaacaccaacagcacaacacagacaatactcccccaccaaaaacacacacacaccaccccaacacacaccacaatccaacaacaactcacacccaacgaaacactcaccataacaacacacacacacaaccatatacacacacgggacaccccagccacacacaaaaccaaggaccaaacacccagaggatgcccaatcaagaagaacactaaccacaccacgcacaacacagcccaatcaccgcaaactacagaggaacaaaacaagaaccaccatgagacacacccacaccacgcacaaccaaaaagctatccccacaatacctccccccacaccagaacaaccagctctgcgaaacaaaaggaaccaaaagcaccgcaccccgccg

SEQ ID NO: 327489 - DNA, 1686 bp, Homo sapiens
  misc_feature (1662)..(1662): n is a, c, g, or t
gcggcctgggggaaccgaggtgcgggcggcgagcgaggcagccgggtgcttcgcagcggagctcgaggctctgtagcacccagttggacccagtcgcccaggcaccgcccgcgccccgcggccgtctcctgcgcctcccagaggagggagttcgagcatcccccgcggcggccactcctcggggccaggagcggggaagcgaagtgcgagagaccccggaccccagcgctgtctcttcccgccgcccgaaccaccatgacccacttcaacaagggcccttcctatgggctctcggccgaagtcaagaacaagattgcttccaagtatgatcatcaggcagaagaagatcttcgcaattggatagaagaggtgacaggcatgagcattggccccaacttccagctgggcttaaaggatggcatcatcctctgcgaacttataaacaagctacagccaggctcagtgaagaaggtcaacgagtcctcactgaactggcctcagttggagaatattggcaactttattaaagctattcaggcttatggtatgaagccacatgacatattcgaagcaaatgatctttttgagaatggaaacatgacccaggttcagactactctggtggctctagcaggtctggctaaaacaaaaggattccatacaaccattgacattggagttaagtatgcagaaaaacaaacaagacgttttgatgaaggaaaattaaaagctggccaaagtgtaattggtctgcagatgggaaccaacaaatgtgccagccaggcaggtatgacagcttacgggactaggaggcatctttatgatcccaaaatgcaaactgacaaaccttttgaccagaccacaattagtctgcagatgggcactaataaaggagccagccaggcagggatgttagcaccaggtaccagaagagacatctatgatcagaagctaacattacagccggtggacaactcgacaatttccctacagatgggtaccaacaaagttgcttcccagaaaggaatgagtgtgtatgggcttgggcggcaagtatatgatcccaaatactgtgctgctcctacagaacctgtcattcacaacggaagccaaggaacaggaacaaatggttcggaaatcagtgatagtgattatcaggcagaataccctgatgagtatcatggcgagtaccaggatgactaccccagagattaccaatatagcgaccaaggcattgattattagatccacacagaaggagctcagtatttagtcctttgtttttattcagtgagaaccaagctagccttgagtaatttttatcttgtcttcctaaaacactattaagcttattgtactttagaaaattgggttaggagcaatcatttacctttgaggacttcacgcaaaatggcctagagcggcaagtatgcccacgcgaatacaccacgcccaataagatacacagcactgtgcagggggaccctcagcgacacttgacgaaactacctgtatacaccatataggggctgcaacacacgagcaacagttctgatagacagatgcgctccaacacaacccaccttgcacggacgcagacacagaataaacgataagagatgtctcatcaaacctgctgcctgtgtactcctttctgctctntactcgtcgctctactcgcgaagc

SEQ ID NO: 327490 - DNA, 905 bp, Homo sapiens
gcggcctgggggaaccgaggtgcgggcggcgagcgaggcagccgggtgcttcgcagcggagctcgaggctctgtagcacccagttggacccagtcgcccaggcaccgcccgcgccccgcggccgtctcctgcgcctcccagaggagggagttcgagcatcccccgcggcggccactcctcggggccaggagcggggaagcgaagtgcgagagaccccggaccccagcgctgtctcttcccgccgcccgaaccaccatgacccacttcaacaagggcccttcctatgggctctcggccgaagtcaagaacaagattgcttccaagtatgatcatcaggcagaagaagatcttcgcaattggatagaagaggtgacaggcatgagcattggccccaacttccagctgggcttaaaggatggcatcatcctctgcgaacttataaacaagctacagccaggctcagtgaagaaggtcaacgagtcctcactgaactggcctcagttggagaatattggcaactttattaaagctattcaggcttatggtatgaagccacatgacatattcgaagcaaatgatctttttgagaatggaaacatgacccaggttcagactactctggtggctctagcaggtctggctaaaacaaaaggattccatacaaccattgacattggagttaagtatgcagaaaaacaaacaagacgttttgatgaaggaaaattaaaagctggccaaagtgtaattggtctgcagatgggaaccaacaaatgtgccagccaggcaggtatgacagcttacgggactaggaggcatctttattagtgcccatctgcagactaattgtggtctggtcaaaaggtttgtcagtttgcattttgggatcataaagatgccgtcgacgc

SEQ ID NO: 327491 - DNA, 591 bp, Homo sapiens
ctttgatgacacagtgtctcagattactctgttgaatggaagtaccagtggatttggggcaggaagcctgggttttggccctaatgcagctgttctcagtgactttgagggagttgctaggaagctgggtcatacaatctctgaggctccttcctggctagatttggtgatctttgtaccgcaactttgtgaataatatttcttcagagatatcattgattaaattacttcagttgttacttagcttgttagttaaacgttttgaatggtatctaatgcttagagacttagttgttccactgtcatataatagtgatttaataagatgcacctccttctggaaaaacattcatgtatttcactgagagcaagtttacttgtgtcaccagtcacttttgtggccttggaaggtttacttattttctcagtgcctgcaaaaccaggtgtgtgtggattaacatgttttaggtcacagagaaccttttcgaaaactgtgcactctctgtccatggaaatccttattactctcaagattttgcatgtaacctcaggaagttaaatggaagcaatctacccaaggctccccagtta

SEQ ID NO: 327492 - DNA, 311 bp, Homo sapiens
attaaaatgaagacagacataaaataatatttgatctaaattcattttcctatttctaggtctatgtaagttctgactttgcttatataaccgttcattactttttagacaacattcttttactaaatttctagtataatggcttttgttttccttctagttcataacatttatttaggttttctttaatgcctgtcaataaaatttacaatttttttccactaaaattttttgtagattaaaacttaatgtactttatattcttactacgactgggaaaatcatctttctgaaacattattttctaattg

SEQ ID NO: 327493 - DNA, 633 bp, Homo sapiens
agcggaagaggcggtgagaggctggcgactgggttgggcgcggcagagatgcattaggggtcccgatcccgggccccgcggttagaggaagaggagggcggctagaggaggggaagagcttcccttactccagccgaaaggatgcagttttgctgcatttaaattaagtgctgctcttcagctttgtgtacagctataagtgcacattggaatttatatgtatatatatatagagagagagagagagagagaaaatgactgctggttcagtgtgtgtccctcagatcataccactacgagtgcctcagcctggaaaagctaaccatgaaattgataacaatacgcttttggaaatgaaatcagacactccagatgtcaacatatattatactctggatggcagcaaacctgaatttctaaagagaattggttatggggaaaataacacatttaagtatataaaacctattactctgcctgatggaaaaatacaagttaaagctattgctgtctctaaagactgcagacagagtggcattgtgacaaaggtgtttcacgtagactatgaaccaccaaatatagtctctcctgaagacaatgttgaaaatgttctcaaagattcttcaaggcagg

SEQ ID NO: 327494 - DNA, 300 bp, Homo sapiens
gattaggaggtggggcctttgggaggtgatgaggtcacgaaggtggagtctcatgaatgggatgagtgcccttacaaaaggggccccagagagccccctcgccccttccaccatgtgaggacacagcgagaaggcgccgtctacgaaccaggaagctggttccctccaggtacagaatctgtcgcacctcgatctcggacttccagcctccagagctgtgagccatgaatgtctgctgttgaggctgcccagtctatgagtgtgtgttagtgcagcccgcactggctgagacgacatgta

SEQ ID NO: 327495 - DNA, 402 bp, Homo sapiens
ccacagcttggaagagatagagttgaaatgcaaaaccgagttgaaatttaaaaccaacttatctgattccaaaaccagtacagagcaccgaggccttgatttgataggctatggagtttgaatttaattcagaagacagtggacagccactgatagtatttgaacagggcaatgataggatcagtgctgtgtctaggaagattgttcttgaaatgacagagagctttagaatggtgaaagactaaagactagttagaagtctgctgtaatggttccaactccagagacatagaaaagataggtctccaaagacaagtgatggcatagtctttgctcagccagagtctctaggaaaatggtggtgccgttaactgaaataggttaagttaagagaggttattg

SEQ ID NO: 327496 - DNA, 2203 bp, Homo sapiens
gagcatttaggctttgttctccaagaactgggatatccattcttaccctacagtggcttgatgcctttctgaaggcgagagggaagcctgggtgactcagcggtggtctccattcagcaaaatctcatgtacatttccagtaggaaccgcagaggtgtgcttttcaagactcaccaaatactgtgttttctctcttaggatttcttttcccctaaagtatcacggaagatactatggttcgtgactttcttgctaactgaagaagccaaggatttggggtgtggggtcgtatgcgagacacagtggggtaagggtgcataccccaccccttacctgctctcatactgcagttacatttacaccaaaaccccatgcagggttctttgtggtgagtgttccatacgtgctaaggaccttagttgcagattgttactttctggtgacctatgttgaattgaaacccccaaaacttgaaattgtgaacatttgacatgcagtaaaggccacctcatcacccagagaaatctttggctgctgcagctagccgcttcttggctgtgatgtagtatagcttcgatctcattttgtgtttgagagaatgttctgggcaagttctgtgtgtggtgggttggggcgggtagagtcatgagttttccacatccctgtgtggtggttttgctgactgtcgctccgtgggactggctcccgtttctccttggtgagcccggggagccggcgcatcttgtgagtcgcgtctgtgcatggcgatccgctcctccggctctcatggcattgtgccacaggcagaggccaggaggagcagtatgtgcacagccgaaacattttacattttttacattgtttttcttttttaaccaactcattgtttaaaaaacaaaaacaaaaaaaacctaatctgtgaaatcagcgtagcatgcctggagcatcaggaatggcagacacatataatttattagctgggagctgaactggctgtgaaatctatgatttgctttgaacatttgggttttgttgcctttttcttaattgataacacagaaaagaaagtaccatcaaagactgtggagtcattgagggtctgtgtgtcctcaccgagagggacctggtgtgcccgccgggtcgatcttcccacgtgttagggtttatttttatacaacacatcttttgacactttaaggtgggtgggtgtgtgtgtgtgtgtgtgcgcgcgtgcgcgcgcgcatgtgtaaggttttatgttgctgttatttatttacgaacttcagatacgtttttatgtatttttcattcttctggagcttcctaaaaattgataagcatctgcactgaaatataatttaacagcaaaagtaaaaaaggattgaaagttgtaaattcctcatatcactacagtgacgattattctagaaatcgttgcttgtgtagcaaagaccaaataaatagatttcagacacaaccttgagcacagttgattttggacagctgctgtttattaggaaagggctccaggtggcaaaggtgcacacttcctcagacacaggtgagaagatgcagcaccttccacaggtgaatgggacggattcgaagtgagcaaagggattcacaaattatgtatttatttgttttcatagttaagtagctgaagctcagaggctttcagcaacagagatgaaagtgtggctttttagttttgtgaatggatgatcacaaagaaaaagcatttttaaaaagttggcaaacgctgaaacgcactgtggtatgaagcgcattgcatttccatagcactgaagtaccagtttccattcctgggctgagattgtttttcccgtggttgtattgttctgatttcacgtacaccagagtaactgatttttttttgtttgttttcttgtggagttaacaccaaataaaaattgtaaaaaacaaaaaaaaaaaagaagaagaagccgaaacacacaaacaacaagaagcaagaaacaacaaactctggttgggcgcgggcgaggcccccctagaaaagaagtcttgaagaaaaaccacatagagtgaggggcgcggcccccaatgtagggtacagaaaacacggggcaacaaacgtggtccacgagagaaccctggggaaacacgaggcggggaggacacccaaaaaaaaagacccggggaaacacggggtagaaacaca

SEQ ID NO: 327497 - DNA, 893 bp, Homo sapiens
tttgggcccaaaggaccaaaaattcggcaacgaggcttgaaatataatttaacagcaaaagtaaaaaaggattgaaagttgtaaattcctcatatcactacagtgacgattattctagaaatcgttgcttgtgtagcaaagaccaaataaatagatttcagacacaaccttgagcacagttgattttggacagctgctgtttattaggaaagggctccaggtggcaaaggtgcacacttcctcagacacaggtgagaagatgcagcaccttccacaggtgaatgggacggattcgaagtgagcaaagggattcacaaattatgtatttatttgttttcatagttaagtagctgaagctcagaggctttcagcaacagagatgaaagtgtggctttttagttttgtgaatggatgatcacaaagaaaaagcatttttaaaaagttggcaaacgctgaaacgcactgtggtatgaagcgcattgcatttccatagcactgaagtaccagtttccattcctgggctgagattgtttttcccgtggttgtattgttctgatttcacgtacaccagagtaactgatttttttttgtttgttttcttgtggagttaacaccaaataaaaattgtaaaaaacaaaaaaaaaaaagaagaagaagccgaaacacacaaacaacaagaagcaagaaacaacaaactctggttgggcgcgggcgaggcccccctagaaaagaagtcttgaagaaaaaccacatagagtgaggggcgcggcccccaatgtagggtacagaaaacacggggcaacaaacgtggtccacgagagaaccctggggaaacacgaggcggggaggacacccaaaaaaaaagacccggggaaacacggggtagaaacaca

SEQ ID NO: 327498 - DNA, 385 bp, Homo sapiens
ctcattgtttaaaaaacaaaaacaaaaaaaacctaatctgtgaaatcagcgtagcatgcctggagcatcaggaatggcagaaaagtctgatgcgctctagacagcttcaccactcgtttgggcaggcagtaaacacacatataatttattagctgggagctgaactggctgtgaaatctatgatttgctttgaacatttgggttttgttgcctttttcttaattgataacacagaaaagaaagtaccatcaaagactgtggagtcattgagggtctgtgtgtcctcaccgagagggacctggtgtgcccgccgggtcgatcttcccacgtgttagggtttatttttatacaacacatcttttgacactttaaggtgggtgggtgt

SEQ ID NO: 327499 - DNA, 578 bp, Homo sapiens
aaagtaaaaaaggattgaaagttgtaaattcctcatatcactacagtgacgattattctagaaatcgttgcttgtgtagcaaagaccaaataaatagatttcagacacaaccttgagcacagttgattttggacagctgctgtttattaggaaagggctccaggtggcaaaggtgcacacttcctcagacacaggtgagaagatgcagcaccttccacaggtgaatgggacggattcgaagtgagcaaagggattcacaaattatgtatttatttgttttcatagttaagtagctgaagctcagaggctttcagcaacagagatgaaagtgtggctttttagttttgtgaatggatgatcacaaagaaaaagcatttttaaaaagttggcaaacgctgaaacgcactgtggtatgaagcgcattgcatttccatagcactgaagtaccagtttccattcctgggctgagattgtttttcccgtggttgtattgttctgatttcacgtacaccagagtaactgatttttttttgtttgttttcttgtggagttaacaccaaataaaaattgtaaaaaac

SEQ ID NO: 327500 - DNA, 2750 bp, Homo sapiens
gagcatttaggctttgttctccaagaactgggatatccattcttaccctacagtggcttgatgcctttctgaaggcgagagggaagcctgggtgactcagcggtggtctccattcagcaaaatctcatgtacatttccagtaggaaccgcagaggtgtgcttttcaagactcaccaaatactgtgttttctctcttaggatttcttttcccctaaagtatcacggaagatactatggttcgtgactttcttgctaactgaagaagccaaggatttggggtgtggggtcgtatgcgagacacagtggggtaagggtgcataccccaccccttacctgctctcatactgcagttacatttacaccaaaaccccatgcagggttctttgtggtgagtgttccatacgtgctaaggaccttagttgcagattgttactttctggtgacctatgttgaattgaaacccccaaaacttgaaattgtgaacatttgacatgcagtaaaggccacctcatcacccagagaaatctttggctgctgcagctagccgcttcttggctgtgatgtagtatagcttcgatctcattttgtgtttgagagaatgttctgggcaagttctgtgtgtggtgggttggggcgggtagagtcatgagttttccacatccctgtgtggtggttttgctgactgtcgctccgtgggactggctcccgtttctccttggtgagcccggggagccggcgcatcttgtgagtcgcgtctgtgcatggcgatccgctcctccggctctcatggcattgtgccacaggcagaggccaggaggagcagtatgtgcacagccgaaacattttacattttttacattgtttttcttttttaaccaactcattgtttaaaaaacaaaaacaaaaaaaacctaatctgtgaaatcagcgtagcatgcctggagcatcaggaatggcagacacatataatttattagctgggagctgaactggctgtgaaatctatgatttgctttgaacatttgggttttgttgcctttttcttaattgataacacagaaaagaaagtaccatcaaagactgtggagtcattgagggtctgtgtgtcctcaccgagagggacctggtgtgcccgccgggtcgatcttcccacgtgttagggtttatttttatacaacacatcttttgacactttaaggtgggtgggtgtgtgtgtgtgtgtgtgcgcgcgtgcgcgcgcgcatgtgtaaggttttatgttgctgttatttatttacgaacttcagatacgtttttatgtatttttcattcttctggagcttcctaaaaattgataagcatctgcactgaaatataatttaacagcaaaagtaaaaaaggattgaaagttgtaaattcctcatatcactacagtgacgattattctagaaatcgttgcttgtgtagcaaagaccaaataaatagatttcagacacaaccttgagcacagttgattttggacagctgctgtttattaggaaagggctccaggtggcaaaggtgcacacttcctcagacacaggtgagaagatgcagcaccttccacaggtgaatgggacggattcgaagtgagcaaagggattcacaaattatgtatttatttgttttcatagttaagtagctgaagctcagaggctttcagcaacagagatgaaagtgtggctttttagttttgtgaatggatgatcacaaagaaaaagcatttttaaaaagttggcaaacgctgaaacgcactgtggtatgaagcgcattgcatttccatagcactgaagtaccagtttccattcctgggctgagattgtttttcccgtggttgtattgttctgatttcacgtacaccagagtaactgatttttttttgtttgttttcttgtggagttaacaccaaataaaaattgtaaaaaacaaacagtttgttgtttttatttctcatagcaaagcttcttttgtaaagaactccagcttccttttactcatgagcatccgtggaagagcaagtgcccaggttacatttgttctagatggaggtcatttagctctcattgcagacactgctgaaaacattgtgcagctttgctagggaagaaagtggtgtggcctgctgagaaatgagcggctcctccccatctcacccccagcacacgcagggactactacctgagtctgcaaaacacatagcatttttgtccgtggatggtacacaaagctcaatctttttgttttcttctggggaaaaaattaaatctttatatgttaatatgattgatattcattgtgcaaaaaaaatcagtgtgtttttaaagaagtataagggaaaaggaaaactcatatgtccttctgtcactctgagacatacactggtaacatctgtgcaagcccctttccaggattctgaatgtacagtatatatgaatgcatacacagagaaatttacattccaagagtgtactatacttgttcttctataacatcagaaataggtttttactcagatgtcttcatgtcggtaattatagaactacataattatttttatagctgtattatgtagatttaacaggttcctcattgataaaacaatgtttttttggttgtttattcagtatctgaataacgtttctatggacatccgtaaacatgtatgaggggacttttaaaagttcatggaaaatggaattaaaagaaaaataaaaaaatataaactttaattc

SEQ ID NO: 327501 - DNA, 114 bp, Homo sapiens
ggcctcctcagggacctctgggtcccctagctctgcgctttcacacacacatacccctcctgggtaccatcagtctaactgcaaggcccagcatttccaaagcaaacactgctc

SEQ ID NO: 327502 - DNA, 1454 bp, Homo sapiens
tgcagtggcacaatcttggctcgctgcaacctctgcctcctgggtttaagcggttctcctgcctcagcctcccgagtagctgggattacaggtgtgcaccatcatgccgagccaatttttgtatttttagtagagacaggatttccccatgttggccagactggtttcaaacttctgacctcaggtgatctacctgccttggcctcccaaagtgctgggattacaggtatgagccactgtgcccagcctcaagtcacccttgttagtttggcttaccaactttaaagttttggattgcttttgtcaagccactgggttgcaagttcagatggtctttcttgtttttcttagctaattgtaagtaaaattcactttggtaatttattgtgtcacatagaattgaagtttttctcttgctaatattattcctattttcaaattttggggttcctgttagcctgattttcggatagctgccacaggagttgtccttgatctggataaatccataaaaattgtgaagaaattaaagctaactggttttccatataaaatttttaagaacacttcatttattaaggtctgtatatctatatattctcatatttataaatctccatattgtttgagaaaaggaatgaaatacctctaaaatatgggcctcatatttttagaaaagtgtttgaaatcttttataaacttcatattttgtttgctcctttatattctgtattacttaaatatgctcagaaaagcagtggtaaacagctatttaggaattgaggctgttactcctgacttccatgtgagactgccacagaactcatattgaaaatatgtcattttatccactaggttttgtttcctactttttaaatttgtgttaagaaagggaaaaaaatcacaagtttgtctaactcagtagaaaaatcgacaaagcatttgcagacaacttggcaagggtacagagaaacggatgtactgtttttcagtatttggggagggtggtttgagcagcatttattgacaatttcattagtggggatgtttctattgaaaacagagttaggaagtcataaaatgttcctgcaatataaggtaataataccaccagcgtttatcttactgttttcatgttctaagtgcatgcatctgagtaaaaggatctgggctgcagtccagtctgagagatgccagcaaaggcttcctaggccagttcagtccagtaaatccctcttcgatcttctcttccacacagacagcagtgatgagcatgcccatgaactcacatgattattttggggaaaatgaaagagttgtattctttttgaggtagtaattccactttcaggggcaaatacattttgattattttatcacccttcagtgagttgtttttgttctttaatcaaggatgtatgtttgaagtaagaagtaaagcataaagtatatga

SEQ ID NO: 327503 - DNA, 1545 bp, Homo sapiens
ggcggcgcaggcgcggagaggcgcacagcgcggcacagcgaggcgccggcccagactccactccccagctgtgaaaggaggagctctacggtgactttgaagacttggaaacaggggacgtgcacaagggaaaatcgggccccgatactcagaatgaagatgtagagaaacaaggaagaaattgaccctgacgaagaagaaagtgccaagaaaaagcatttggataagaagagaaaattgaaggagatgtttgatgtggaatatgatgaaggagaaagcacatattttgatgatcttaaaggagaaatgcagaaacaagcacagctgaatcatgcagaatttgaagatcaagatgatgaagccagagttcagtatgagggttttcgacctgggatgtacgtctgcgttgagattgaaaatgttccctgtgaatttgtgtagaactttgacccccgttaccccattatcctgggtggcttgggcaacagcgagggaaatgttggatacgtgcagatgcgtctgaagaaacatcgctggtataagaaaatcctcaagtcccgagatccaatcatattttctgtagggtggaggaggtttcagaccatcccgctctgttatatcgaagaccacaatggaagacaaaggcttctaaagtataccccacagcatgtgcatcgcggagcagccttttgggataaaatatgattacaataacttgcctattgctgagattaaaccttacaggctgcgttattttagctttgtgcttttcctttcataaaattccactcctaagatttttctcttttctgggagcagggaggtggtttggagtatatacgtaaatctatatccaaatctaaatgtccatatccagtatgttaaactagaatctaaaatttgtggtttgctatatttctttttttccttttcctttaagaccctatcactccacagggaactggtttcttggcaatacagtctgtcagtggcataatggtaactatcttggatgatttcttttacagattggttttgagaaatatatcctgaatgtggattactatgtacatgagactttaagttgaaaattactcatttttattaatataaagtaaatttccctttgcttttaatcttcgtacatccttttcagtagggtgtgggattagaggaggggaggtggaagaattataatggtacatttcctatttttgtgcatcttttgcatttatttatctaagcaagtacttaagcagtgctcaccatgtgctaagcactgtatgaggttgtgaggagccatcagagaccacccagacacaagactccctgcagctgtgctggggtagcagtctgttcactccattttcatttgaccagtcaggcagggcagggtttactggtcccatttaacagagaagaaagcagaataatgagcagatggaatcttccctggaggtccaaattttaatttcctaaacattgcaactgtatttttcttttccatttcgttccaaataaatcattatagtaaaattacattcc

SEQ ID NO: 327504 - DNA, 897 bp, Homo sapiens
ggcggcgcaggcgcggagaggcgcacagcgcggcacagcgaggcgccggcccagactccactccccagctgtgaaaggaggagctctacggtgactttgaagacttggaaacaggggacgtgcacaagggaaaatcgggccccgatactcagaatgaagatgtagagaaacaaggaagaaattgaccctgacgaagaagaaagtgccaagaaaaagcatttggataagaagagaaaattgaaggagatgtttgatgtggaatatgatgaaggagaaagcacatattttgatgatcttaaaggagaaatgcagaaacaagcacagataacagcatacaggtttcccccccccaccccgtcatgtacagctgaatcatgcagaatttgaagatcaagatgatgaagccagagttcagtatgagggttttcgacctgggatgtacgtctgcgttgagattgaaaatgttccctgtgaatttgtgtagaactttgacccccgttaccccattatcctgggtggcttgggcaacagcgagggaaatgttggatacgtgcagatgcgtctgaagaaacatcgctggtataagaaaatcctcaagtcccgagatccaatcatattttctgtagggtggaggaggtttcagaccatcccgctctgttatatcgaagaccacaatggaagacaaaggcttctaaagtataccccacagcatgtgcatcgcggagcagcctttggatcaattggtccatactgcctattgtgaaataacctaagctggttaaaaacaaaaaccacaaaaccaaaaaacaacaaaaaaaaacaaaacacaaaaaacaacgcgcgccgaaaaacgccgaaaggcccaaacccaacacgcaccgtctcaaacacccccgc

SEQ ID NO: 327505 - DNA, 1214 bp, Homo sapiens
ggcggcgcaggcgcggagaggcgcacagcgcggcacagcgaggcgccggcccagactccactccccagctgtgaaaggaggagctctacggtgactttgaagacttggaaacaggggacgtgcacaagggaaaatcgggccccgatactcagaatgaagatgtagagaaacaaggaagaaattgaccctgacgaagaagaaagtgccaagaaaaagcatttggataagaagagaaaattgaaggagatgtcttgatctggataaatccataaaaattgtgaagaaattaaagctaactggttttccatataaaatttttaagaacacttcatttattaaggtctgtatatctatatattctcatatttataaatctccatattgtttgagaaaaggaatgaaatacctctaaaatatgggcctcatatttttagaaaagtgtttgaaatcttttataaacttcatattttgtttgctcctttatattctgtattacttaaatatgctcagaaaagcagtggtaaacagctatttaggaattgaggctgttactcctgacttccatgtgagactgccacagaactcatattgaaaatatgtcattttatccactaggttttgtttcctactttttaaatttgtgttaagaaagggaaaaaaatcacaagtttgtctaactcagtagaaaaatcgacaaagcatttgcagacaacttggcaagggtacagagaaacggatgtactgtttttcagtatttggggagggtggtttgagcagcatttattgacaatttcattagtggggatgtttctattgaaaacagagttaggaagtcataaaatgttcctgcaatataaggtaataataccaccagcgtttatcttactgttttcatgttctaagtgcatgcatctgagtaaaaggatctgggctgcagtccagtctgagagatgccagcaaaggcttcctaggccagttcagtccagtaaatccctcttcgatcttctcttccacacagacagcagtgatgagcatgcccatgaactcacatgattattttggggaaaatgaaagagttgtattctttttgaggtagtaattccactttcaggggcaaatacattttgattattttatcacccttcagtgagttgtttttgttctttaatcaaggatgtatgtttgaagtaagaagtaaagcataaagtatatga

SEQ ID NO: 327506 - DNA, 1717 bp, Homo sapiens
tgcagtggcacaatcttggctcgctgcaacctctgcctcctgggtttaagcggttctcctgcctcagcctcccgagtagctgggattacaggtgtgcaccatcatgccgagccaatttttgtatttttagtagagacaggatttccccatgttggccagactggtttcaaacttctgacctcaggtgatctacctgccttggcctcccaaagtgctgggattacaggtatgagccactgtgcccagcctcaagtcacccttgttagtttggcttaccaactttaaagttttggattgcttttgtcaagccactgggttgcaagttcagatggtctttcttgtttttcttagctaattgtaagtaaaattcactttggtaatttattgtgtcacatagaattgaagtttttctcttgctaatattattcctattttcaaattttggggttcctgttagcctgattttcggatagctgccacaggagttgtccttgatctggataaatccataaaaattgtgaagaaattaaagctaactggttttccatataaaatttttaagaacacttcatttattaaggtctgtatatctatatattctcatatttataaatctccatattgtttgagaaaaggaatgaaatacctctaaaatatgggcctcatatttttagaaaagtgtttgaaatcttttataaacttcatattttgtttgctcctttatattctgtattacttaaatatgctcagaaaagcagtggtaaacagctatttaggaattgaggctgttactcctgacttccatgtgagactgccacagaactcatattgaaaatatgtcattttatccactaggttttgtttcctactttttaaatttgtgttaagaaagggaaaaaaatcacaagtttgtctaactcagtagaaaaatcgacaaagcatttgcagacaacttggcaagggtacagagaaacggatgtactgtttttcagtatttggggagggtggtttgagcagcatttattgacaatttcattagtggggatgtttctattgaaaacagagttaggaagtcataaaatgttcctgcaatataaggtaataataccaccagcgtttatcttactgttttcatgttctaagtgcatgcatctgagtaaaaggatctgggctgcagtccagtctgagagatgccagcaaaggcttcctaggccagttcagtccagtaaatccctcttcgatcttctcttccacacagacagcagtgatgagcatgcccatgaactcacatgattattttggggaaaatgaaagagttgtattctttttgaggtagtaattccactttcaggggcaaatacattttgattattttatcacccttcagtgagttgtttttgttctttaatcaaggatgtatgtttgaagtaagaagtaaagcataaagtatatgattttgtgtgtgtgtgtgtttttatcttgctgtacctgtagggaatgtttaattcagccttggaagtggccaaatttgaaggtgctgtgattcgaactgtcagtgggataagggggcagatcaagaaagcactctgagctccagaaggagctttccgggccagctttgaggataagctgctgatgagcggtgagtgtcttaagtagtgttcagggcagggtgttaccattcatgcttgacttctagccagtgtgacgagaggct

SEQ ID NO: 327507 - DNA, 1588 bp, Homo sapiens
ggcggcgcaggcgcggagaggcgcacagcgcggcacagcgaggcgccggcccagactccactccccagctgtgaaaggaggagctctacggtgactttgaagacttggaaacaggggacgtgcacaagggaaaatcgggccccgatactcagaatgaagatgtagagaaacaaggaagaaattgaccctgacgaagaagaaagtgccaagaaaaagcatttggataagaagagaaaattgaaggagatgtttgatgtggaatatgatgaaggagaaagcacatattttgatgatcttaaaggagaaatgcagaaacaagcacagataacagcatacaggtttcccccccccaccccgtcatgtacagctgaatcatgcagaatttgaagatcaagatgatgaagccagagttcagtatgagggttttcgacctgggatgtacgtctgcgttgagattgaaaatgttccctgtgaatttgtgtagaactttgacccccgttaccccattatcctgggtggcttgggcaacagcgagggaaatgttggatacgtgcagatgcgtctgaagaaacatcgctggtataagaaaatcctcaagtcccgagatccaatcatattttctgtagggtggaggaggtttcagaccatcccgctctgttatatcgaagaccacaatggaagacaaaggcttctaaagtataccccacagcatgtgcatcgcggagcagccttttgggataaaatatgattacaataacttgcctattgctgagattaaaccttacaggctgcgttattttagctttgtgcttttcctttcataaaattccactcctaagatttttctcttttctgggagcagggaggtggtttggagtatatacgtaaatctatatccaaatctaaatgtccatatccagtatgttaaactagaatctaaaatttgtggtttgctatatttctttttttccttttcctttaagaccctatcactccacagggaactggtttcttggcaatacagtctgtcagtggcataatggtaactatcttggatgatttcttttacagattggttttgagaaatatatcctgaatgtggattactatgtacatgagactttaagttgaaaattactcatttttattaatataaagtaaatttccctttgcttttaatcttcgtacatccttttcagtagggtgtgggattagaggaggggaggtggaagaattataatggtacatttcctatttttgtgcatcttttgcatttatttatctaagcaagtacttaagcagtgctcaccatgtgctaagcactgtatgaggttgtgaggagccatcagagaccacccagacacaagactccctgcagctgtgctggggtagcagtctgttcactccattttcatttgaccagtcaggcagggcagggtttactggtcccatttaacagagaagaaagcagaataatgagcagatggaatcttccctggaggtccaaattttaatttcctaaacattgcaactgtatttttcttttccatttcgttccaaataaatcattatagtaaaattacattcc

SEQ ID NO: 327508 - DNA, 1672 bp, Homo sapiens
ggcggcgcaggcgcggagaggcgcacagcgcggcacagcgaggcgccggcccagactccactccccagctgtgaaaggaggagctctacggtgactttgaagacttggaaacaggggacgtgcacaagggaaaatcgggccccgatactcagaatgaagatgtagagaaacaaggaagaaattgaccctgacgaagaagaaagtgccaagaaaaagcatttggataagaagagaaaattgaaggagatgtttgatgtggaatatgatgaaggagaaagcacatattttgatgatcttaaaggagaaatgcagaaacaagcacagataacagcatacaggtttcccccccccaccccgtcatgtacagctgaatcatgcagaatttgaagatcaagatgatgaagccagagttcagtatgagggttttcgacctgggatgtacgtctgcgttgagattgaaaatgttccctgtgaatttgtgtagaactttgacccccgttaccccattatcctgggtggcttgggcaacagcgagggaaatgttggatacgtgcaggtgggtccctttgctgcatatttggtgcctgaggctctgtggatttcccctccatcaatcatcttaccctctcatccccctcagatgcgtctgaagaaacatcgctggtataagaaaatcctcaagtcccgagatccaatcatattttctgtagggtggaggaggtttcagaccatcccgctctgttatatcgaagaccacaatggaagacaaaggcttctaaagtataccccacagcatgtgcatcgcggagcagccttttgggataaaatatgattacaataacttgcctattgctgagattaaaccttacaggctgcgttattttagctttgtgcttttcctttcataaaattccactcctaagatttttctcttttctgggagcagggaggtggtttggagtatatacgtaaatctatatccaaatctaaatgtccatatccagtatgttaaactagaatctaaaatttgtggtttgctatatttctttttttccttttcctttaagaccctatcactccacagggaactggtttcttggcaatacagtctgtcagtggcataatggtaactatcttggatgatttcttttacagattggttttgagaaatatatcctgaatgtggattactatgtacatgagactttaagttgaaaattactcatttttattaatataaagtaaatttccctttgcttttaatcttcgtacatccttttcagtagggtgtgggattagaggaggggaggtggaagaattataatggtacatttcctatttttgtgcatcttttgcatttatttatctaagcaagtacttaagcagtgctcaccatgtgctaagcactgtatgaggttgtgaggagccatcagagaccacccagacacaagactccctgcagctgtgctggggtagcagtctgttcactccattttcatttgaccagtcaggcagggcagggtttactggtcccatttaacagagaagaaagcagaataatgagcagatggaatcttccctggaggtccaaattttaatttcctaaacattgcaactgtatttttcttttccatttcgttccaaataaatcattatagtaaaattacattcc

SEQ ID NO: 327509 - DNA, 1535 bp, Homo sapiens
ggcggcgcaggcgcggagaggcgcacagcgcggcacagcgaggcgccggcccagactccactccccagctgtgaaaggaggagctctacggtgactttgaagacttggaaacaggggacgtgcacaagggaaaatcgggccccgatactcagaatgaagatgtagagaaacaaggaagaaattgaccctgacgaagaagaaagtgccaagaaaaagcatttggataagaagagaaaattgaaggagatgtttgatgtggaatatgatgaaggagaaagcacatattttgatgatcttaaaggagaaatgcagaaacaagcacagataacagcatacaggtttcccccccccaccccgtcatgtacagctgaatcatgcagaatttgaagatcaagatgatgaagccagagttcagtatgagggttttcgacctgggatgtacgtctgcgttgagattgaaaatgttccctgtgaatttgtgtagaactttgacccccgttaccccattatcctgggtggcttgggcaacagcgagggaaatgttggatacgtgcagatgcgtctgaagaaacatcgctggtataagaaaatccatcccgctctgttatatcgaagaccacaatggaagacaaaggcttctaaagtataccccacagcatgtgcatcgcggagcagccttttgggataaaatatgattacaataacttgcctattgctgagattaaaccttacaggctgcgttattttagctttgtgcttttcctttcataaaattccactcctaagatttttctcttttctgggagcagggaggtggtttggagtatatacgtaaatctatatccaaatctaaatgtccatatccagtatgttaaactagaatctaaaatttgtggtttgctatatttctttttttccttttcctttaagaccctatcactccacagggaactggtttcttggcaatacagtctgtcagtggcataatggtaactatcttggatgatttcttttacagattggttttgagaaatatatcctgaatgtggattactatgtacatgagactttaagttgaaaattactcatttttattaatataaagtaaatttccctttgcttttaatcttcgtacatccttttcagtagggtgtgggattagaggaggggaggtggaagaattataatggtacatttcctatttttgtgcatcttttgcatttatttatctaagcaagtacttaagcagtgctcaccatgtgctaagcactgtatgaggttgtgaggagccatcagagaccacccagacacaagactccctgcagctgtgctggggtagcagtctgttcactccattttcatttgaccagtcaggcagggcagggtttactggtcccatttaacagagaagaaagcagaataatgagcagatggaatcttccctggaggtccaaattttaatttcctaaacattgcaactgtatttttcttttccatttcgttccaaataaatcattatagtaaaattacattcc

SEQ ID NO: 327510 - DNA, 477 bp, Homo sapiens
tgttcatgttaatgctatgtttattacagataacagcatacaggtttcccccccccaccccgtcatgtacagctgaatcatgcagaatttgaagatcaagatgatgaagccagagttcagtatgagggttttcgacctgggatgtacgtctgcgttgagattgaaaatgttccctgtgaatttgtgtagaactttgacccccgttaccccattatcctgggtggcttgggcaacagcgagggaaatgttggatacgtgcaggtgggtccctttgctgcatatttggtgcctgaggctctgtggatttcccctccatcaatcatcttaccctctcatccccctcagatgcgtctgaagaaacatcgctggtataagaaaatcctcaagtcccgagatccaatcatattttctgtagggtggaggaggtttcagaccatcccgctctgttatatcgaagaccacaatggaagacaaagg

SEQ ID NO: 327511 - DNA, 1635 bp, Homo sapiens
tctagtgatgggaacagtgagaatcagacttggaacacggagcgcattgtgggcctgtcgtgggtggggccagcagcacatgcatgccgggctgacagagcagcctttgggtgttcttttcccagaggagctctacggtgactttgaagacttggaaacaggggacgtgcacaagggaaaatcgggccccgatactcagaatgaagatgtagagaaacaaggaagaaattgaccctgacgaagaagaaagtgccaagaaaaagcatttggataagaagagaaaattgaaggagatgtttgatgtggaatatgatgaaggagaaagcacatattttgatgatcttaaaggagaaatgcagaaacaagcacagataacagcatacaggtttcccccccccaccccgtcatgtacagctgaatcatgcagaatttgaagatcaagatgatgaagccagagttcagtatgagggttttcgacctgggatgtacgtctgcgttgagattgaaaatgttccctgtgaatttgtgtagaactttgacccccgttaccccattatcctgggtggcttgggcaacagcgagggaaatgttggatacgtgcagatgcgtctgaagaaacatcgctggtataagaaaatcctcaagtcccgagatccaatcatattttctgtagggtggaggaggtttcagaccatcccgctctgttatatcgaagaccacaatggaagacaaaggcttctaaagtataccccacagcatgtgcatcgcggagcagccttttgggataaaatatgattacaataacttgcctattgctgagattaaaccttacaggctgcgttattttagctttgtgcttttcctttcataaaattccactcctaagatttttctcttttctgggagcagggaggtggtttggagtatatacgtaaatctatatccaaatctaaatgtccatatccagtatgttaaactagaatctaaaatttgtggtttgctatatttctttttttccttttcctttaagaccctatcactccacagggaactggtttcttggcaatacagtctgtcagtggcataatggtaactatcttggatgatttcttttacagattggttttgagaaatatatcctgaatgtggattactatgtacatgagactttaagttgaaaattactcatttttattaatataaagtaaatttccctttgcttttaatcttcgtacatccttttcagtagggtgtgggattagaggaggggaggtggaagaattataatggtacatttcctatttttgtgcatcttttgcatttatttatctaagcaagtacttaagcagtgctcaccatgtgctaagcactgtatgaggttgtgaggagccatcagagaccacccagacacaagactccctgcagctgtgctggggtagcagtctgttcactccattttcatttgaccagtcaggcagggcagggtttactggtcccatttaacagagaagaaagcagaataatgagcagatggaatcttccctggaggtccaaattttaatttcctaaacattgcaactgtatttttcttttccatttcgttccaaataaatcattatagtaaaattacattcc

SEQ ID NO: 327512 - DNA, 720 bp, Homo sapiens
gctttcataggtagcttcttcttgaatggtaataataaggtgttttgtgatactaattttaaattattgatttctgtgaattttaaatgatgaatttatatgaatgggaatggaaattatattgcctttttattgtgaaggtcgtcttgtaggataggactatagagagagcagaaggaattttgaatatctgatattattgctgacaaatattttagaaaaactatataataggttaaagtaaattttcttcattgatttattatggctaatatttagggcaaagggtgatatactctcgtgagtcagtaactgctaggataacttattcagtcaaaaaattttccctaggcccgtttaccgccactccccctaagttgaattcataatgatgcagtgctttggaaaacagctctgtattaatacaaggtaaaaaagcccccacaaaataaaagcttcttttaattatcctagcatgaaatgaaacaaaaagaaaagtaatagggtagacgctaatttcatctttctttctttgtttctctttgtttctctctttctttgtttctctctctctttctctctctctctctctctttcttgctctgtctctctctgtgtctcttgctctgtctcgctctcttgctctgtctcactgtctctcgctcactgtctgtctcactcttttgctctctctcgctctctcgctctgtctcgctctct

SEQ ID NO: 327513 - DNA, 323 bp, Homo sapiens
ttcagggtatacagcctggggatggaatgtatgtcagtaccattttcattaaaatatacacacatactctctttttcttttttaaatacataaaaattacatacagttgttgcctatggtgggacaagcaagaaatttaacatttttaatctttgtagtaattgcatagtatttaatagattattttatcatgtagtctaggtctctgtgcagccataacctcacagaaaaatgtgctatgatgtagtttaacctgtcttgaaggtgtttgttggagttattttattttatagtgccacagaaatgtgccaaatttcaagaag

SEQ ID NO: 327514 - DNA, 2698 bp, Homo sapiens
catagtatctagattgatcaagatctgacagaaggaatgcacaaaggattctatattcttaatgatttattaattaccaggatccttttctaaattgaatgtacttttgaattactaggtttcttctttttttttgttctgcaatagtgaaagaaaactcagtagtttagtttcagtttctcatggaaattggtaaatgttagttttgacttcatctattttttatttgtttttattagcgtagagtaggaagtctcatattctactgttctatctaggatggtgaaattccaaaggtgcctaacttgagtaagggatttgtgacaagatagtacacattactataagggctattatttcctgaactggatgtccctaaaagcaaataaactgcccactatctctactctagtgctctctttgtccttatcaacatatacctccaataagtaattacataattcaccgttaaacatggacccactctaggtaaaattaccctcatggaaacattttcactgtgagaatgatgaatttaaaaattatgtttgaatcacctaaaatgtatgtgcagcttctagatggccccttagatctgctgggctctagctgtgtactttaaaaaaacaaaaacagctttattgatatataatttacatattatgtaatttacccacttttaagtatctaattcagtgatgttttaatacatatgtagaactatgcagccatcagcacaatctggatttagaacgtttccatcattccaaaagattccttttgtcttttttgcagactcatacctaacacaaatctaaagtttatcactgttgccaggataattacagcaggttatgtttggtttcatttttaagagtggaggtgttcatgattctaagctcaggaatcttgtgatcatgtattaaatatgttatctcatactataatgataaaaaagcttaatgatgtgggttgggatggatattaacataaataattgagtccgctgcttctatagcaatgctgtaggatagaacaataatgtaagtgatatatgtaattaaaaaattctagaagccacattaaaaaataaaaataaacagctgaagttaattttaatattttatttaactcaatacatccaaaatgttatcattttaacatgtaattgatgtaaagatttattctgatagtttgtactatttcttgtactaattttttgaaatctggtatgcattttacaaatttgggcaagccacattttaagtgctcattagccacatgaggccagtggatactgtattgaatagcacagtcctatagcatatttattaatttgtcttgtagtaagatgaaatagacaataatacggaataatatcttaaatggaaatctttgttagtctctagagccttcattgcttgataaataggacatctaaactttagatataaatcagttgtcaatgagataaaattattgccagcaaatattttccttcaaagataagtaacttttgatatggcagttggtgaaatgaaagaatataatctgccttcttgttaaatggttgactattctgtagcttgtaggtagtacgtattagaaacttgtgtatgtgggaaatatttggcataatactgttttcagtatatagtagctattttttaaggaaattagtttcatacaagaaaaagattattataaaagtgatacttttgcatgaaatattagtttgtgttgataactcttagttaacccttaaagtttaaaacagtactcaaaaaaaaataatgagaatctagtattctgtagttaactaatctataagataaattgctaaagtactagggagcttgtaaatcttaaaaatctttttatttcagtgttcattcaggttggatatatttgaaattgtagatttctatctgtacaacatctcctagttaatagaatttttttccttcccctcccttctctctcctcctccttttctaaccaaagggcattttatcaacaatcatgctgaattcaattaatatctcaagctaaaaaactatgtaattgaggttgtatctggagaagatgggaaaacattgtataatttaagcccttaattgtctgttgagcttttagggctgagtaattgcctttcatacaaataaaagctttaactcttttctcaagagtgtaccaccgtccttagaatcaggtgttttaaatccagtttcttttaattaaatgggactgtagtgatccctaccctgtagagaaatcaacagaactagagaagctaagggcttgatcaggtttcccctagaacctgtgttgcctgcctgctgtatcttccatgtctttcttattcaacttctagaagtagagaaggttgggacttgagtgtagaagaaacatcagaataatttcaaaaaacaggaagttggaactataatttttaaattattgtattgtttttacggattttacatgtatagttaaatattaaaattcatctcttgcagttcaataaaagctatagtatagattttatttttaagaagtttatataattcttttgtgaaccaatatgtaaaactagaatatttattaaactaataatatgtattagtatcaataaaatatgtatttatttttaaattggtatgaaacaaaataaaaatttgtagacactcttaaaaaa

SEQ ID NO: 327515 - DNA, 3122 bp, Homo sapiens
catagtatctagattgatcaagatctgacagaaggaatgcacaaaggattctatattcttaatgatttattaattaccaggatccttttctaaattgaatgtacttttgaattactaggtttcttctttttttttgttctgcaatagtgaaagaaaactcagtagtttagtttcagtttctcatggaaattggtaaatgttagttttgacttcatctattttttatttgtttttattagcgtagagtaggaagtctcatattctactgttctatctaggatggtgaaattccaaaggtgcctaacttgagtaagggatttgtgacaagatagtacacattactataagggctattatttcctgaactggatgtccctaaaagcaaataaactgcccactatctctactctagtgctctctttgtccttatcaacatatacctccaataagtaattacataattcaccgttaaacatggacccactctaggtaaaattaccctcatggaaacattttcactgtgagaatgatgaatttaaaaattatgtttgaatcacctaaaatgtatgtgcagcttctagatggccccttagatctgctgggctctagctgtgtactttaaaaaaacaaaaacagctttattgatatataatttacatattatgtaatttacccacttttaagtatctaattcagtgatgttttaatacatatgtagaactatgcagccatcagcacaatctggatttagaacgtttccatcattccaaaagattccttttgtcttttttgcagactcatacctaacacaaatctaaagtttatcactgttgccaggataattacagcaggttatgtttggtttcatttttaagagtggaggtgttcatgattctaagctcaggaatcttgtgatcatgtattaaatatgttatctcatactataatgataaaaaagcttaatgatgtgggttgggatggatattaacataaataattgagtccgctgcttctatagcaatgctgtaggatagaacaataatgtaagtgatatatgtaattaaaaaattctagaagccacattaaaaaataaaaataaacagctgaagttaattttaatattttatttaactcaatacatccaaaatgttatcattttaacatgtaattgatgtaaagatttattctgatagtttgtactatttcttgtactaattttttgaaatctggtatgcattttacaaatttgggcaagccacattttaagtgctcattagccacatgaggccagtggatactgtattgaatagcacagtcctatagcatatttattaatttgtcttgtagtaagatgaaatagacaataatacggaataatatcttaaatggaaatctttgttagtctctagagccttcattgcttgataaataggacatctaaactttagatataaatcagttgtcaatgagataaaattattgccagcaaatattttccttcaaagataagtaacttttgatatggcagttggtgaaatgaaagaatataatctgccttcttgttaaatggttgactattctgtagcttgtaggtagtacgtattagaaacttgtgtatgtgggaaatatttggcataatactgttttcagtatatagtagctattttttaaggaaattagtttcatacaagaaaaagattattataaaagtgatacttttgcatgaaatattagtttgtgttgataactcttagttaacccttaaagtttaaaacagtactcaaaaaaaaataatgagaatctagtattctgtagttaactaatctataagataaattgctaaagtactagggagcttgtaaatcttaaaaatctttttatttcagtgttcattcaggttggatatatttgaaattgtagatttctatctgtacaacatctcctagttaatagaatttttttccttcccctcccttctctctcctcctccttttctaaccaaagggcattttatcaacaatcatgctgaattcaattaatatctcaagctaaaaaactatgtaattgaggttgtatctggagaagatgggaaaacattgtataatttaagcccttaattgtctgttgagcttttagggctgagtaattgcctttcatacaaataaaagctttaactcttttctcaagagtgtaccaccgtccttagaatcaggtgttttaaatccagtttcttttaattaaatgggactgtagtgatccctaccctgtagagaaatcaacagaactagagaagctaagggcttgatcaggtttcccctagaacctgtgttgcctgcctgctgtatcttccatgtctttcttattcaacttctagaagtagagaaggttgggacttgagtgtagaagaaacatcagaataatttcaaaaaacaggaagttggaactataatttttaaattattgtattgtttttacggattttacatgtatagttaaatattaaaattcatctcttgcagttcaataaaagctatagtatagattttatttttaagaagtttatataattcttttgtgaaccaatatgtaaaactagaatatttattaaactaataatatgtattagtatcaataaaatatgtatttatttttaaattggtatgaaacaaaataaaaatttgtagacactcttaaaaaaaaaaaaaaaaaaacaaaaaaaaaaacaaaaaacaaaaaaaaaaaaaaaaaaaaaagaaaaaaacaaaaaaaaaaaaaaaaaaaaagaagaagagaagagaagaggcgacaaacgacaactaaaataaaaaaggcaaagagagagcacgaaccgccaggacccgccacaagacaccccagcgcccacagaagaggagagggacagaacagaaaacacgtaacaacacgccaagccgcagacgaccgacatgacaaaaaaaaacggagaagaagcggtggagaaagaacaaaccaagaaatacagcggaggtcaagagaagagaaagaagccactgaaaacagacaagacagagcacacacacagagccacccgacagcgtcaataaaaaataaaagagagccaaaaacaagaaaaacaagaaagc

SEQ ID NO: 327516 - DNA, 2455 bp, Homo sapiens
gcacgggacaggccgggccacacccaccggggcgagctcggagggcggcgctctgggcggagggcccggcggctcggcccagggcgcgttacctcgtcgccggggccggagagggcgggcggaggcacggggcctggaggcgccaggcggaggatgcgggcgacacggtggcggcggcgaccgcgcgaccgggcgggcgggcgggcaggggcgagcggagggagggagcggactgcggcaggatctgtcgaggaaaaatcttgcggccggcgattccccgccttttaagcgcagcctgcactccccccaccccacgcaggggcgggccttccccaacgcgggcgcccactggccgccgcgcgccgctcccctccagctcgcctgcgcctttcactctccgtcagccgcattgcccgctcggcgtccggcccccgacccgcgctcgtccgcccgcccgcccgcccgcccgcgccatgaacgccaaggtcgtggtcgtgctggtcctcgtgctgaccgcgctctgcctcagcgacgggaagcccgtcagcctgagctacagatgcccatgccgattcttcgaaagccatgttgccagagccaacgtcaagcatctcaaaattctcaacactccaaactgtgcccttcagattgtagcccggctgaagaacaacaacagacaagtgtgcattgacccgaagctaaagtggattcaggagtacctggagaaagctttaaacaagtaagcacaacagccaaaaaggactttccgctagacccactcgaggaaaactaaaaccttgtgagagatgaaagggcaaagacgtgggggagggggccttaaccatgaggaccaggtgtgtgtgtggggtgggcacattgatctgggatcgggcctgaggtttgccagcatttagaccctgcatttatagcatacggtatgatattgcagcttatattcatccatgccctgtacctgtgcacgttggaacttttattactggggtttttctaagaaagaaattgtattatcaacagcattttcaagcagttagttccttcatgatcatcacaatcatcatcattctcattctcattttttaaatcaacgagtacttcaagatctgaatttggcttgtttggagcatctcctctgctcccctggggagtctgggcacagtcaggtggtggcttaacagggagctggaaaaagtgtcctttcttcagacactgaggctcccgcagcagcgcccctcccaagaggaaggcctctgtggcactcagataccgactggggctgggcgccgccactgccttcacctcctctttcaacctcagtgattggctctgtgggctccatgtagaagccactattactgggactgtgctcagagacccctctcccagctattcctactctctccccgactccgagagcatgcttaatcttgcttctgcttctcatttctgtagcctgatcagcgccgcaccagccgggaagagggtgattgctggggctcgtgccctgcatccctctcctcccagggcctgccccacagctcgggccctctgtgagatccgtctttggcctcctccagaatggagctggccctctcctggggatgtgtaatggtccccctgcttacccgcaaaagacaagtctttacagaatcaaatgcaattttaaatctgagagctcgctttgagtgactgggttttgtgattgcctctgaagcctatgtatgccatggaggcactaacaaactctgaggtttccgaaatcagaagcgaaaaaatcagtgaataaaccatcatcttgccactaccccctcctgaagccacagcagggtttcaggttccaatcagaactgttggcaaggtgacatttccatgcataaatgcgatccacagaaggtcctggtggtatttgtaactttttgcaaggcatttttttatatatatttttgtgcacatttttttttacgtttctttagaaaacaaatgtatttcaaaatatatttatagtcgaacaattcatatatttgaagtggagccatatgaatgtcagtagtttatacttctctattatctcaaactactggcaatttgtaaagaaatatatatgatatataaatgtgattgcagcttttcaatgttagccacagtgtattttttcacttgtactaaaattgtatcaaatgtgacattatatgcactagcaataaaatgctaattgtttcatggtaaaaacgtcctactgtatgtgggaatttatttacctgaaataaaattcattagttgttagtgatggagcttatagacgtttctggtttatatagttaagcctgcctgcagtcaggtgtctgagaccccttctcacagcccatgtgtgacagtgtatgggcttttctcacgagcagattagatctgcagctcaagtttttggatcttttttttt

SEQ ID NO: 327517 - DNA, 319 bp, Homo sapiens
ggcaggcgaagcagagaaactctggtggaggtcgtagcggtcctctaaaattgtatcaaatgtgacattatatgcactagcaataaaatgctaattgtttcatggtaaaaacgtcctactgtatgtgggaatttatttacctgaaataaaattcattagttgttagtgatggagcttatagacgtttctggtttatatagttaagcctgcctgcagtcaggtgtctgagaccccttctcacagcccatgtgtgacagtgtatgggcttttctcacgagcagattagatctgcagctcaagtttttggatcttttttttt

SEQ ID NO: 327518 - DNA, 281 bp, Homo sapiens
ccattttcacattatctgggagatgcaattgaaacaatacaaaatacagtattcatcacatttaacactgtattttgtattgtttcaattgcatctcccagataatgtgaaaatggtccaggagaaggccaattcctatacgcagcgtgctttaaaaaataaataagaaacaactctttgagaaacaacaatttctactttgaagtcataccaatgaaaaaatgtatatgcacttataattttcctaataaagttctgtactcaaatgtaaaaaaaaaaaa

SEQ ID NO: 327519 - DNA, 3929 bp, Homo sapiens
gcacgggacaggccgggccacacccaccggggcgagctcggagggcggcgctctgggcggagggcccggcggctcggcccagggcgcgttacctcgtcgccggggccggagagggcgggcggaggcacggggcctggaggcgccaggcggaggatgcgggcgacacggtggcggcggcgaccgcgcgaccgggcgggcgggcgggcaggggcgagcggagggagggagcggactgcggcaggatctgtcgaggaaaaatcttgcggccggcgattccccgccttttaagcgcagcctgcactccccccaccccacgcaggggcgggccttccccaacgcgggcgcccactggccgccgcgcgccgctcccctccagctcgcctgcgcctttcactctccgtcagccgcattgcccgctcggcgtccggcccccgacccgcgctcgtccgcccgcccgcccgcccgcccgcgccatgaacgccaaggtcgtggtcgtgctggtcctcgtgctgaccgcgctctgcctcagcgacgggaagcccgtcagcctgagctacagatgcccatgccgattcttcgaaagccatgttgccagagccaacgtcaagcatctcaaaattctcaacactccaaactgtgcccttcagattgtagcccggctgaagaacaacaacagacaagtgtgcattgacccgaagctaaagtggattcaggagtacctggagaaagctttaaacaagaggttcaagatgtgagagggtcagacgcctgaggaacccttacagtaggagcccagctctgaaaccagtgttagggaagggcctgccacagcctcccctgccagggcagggccccaggcattgccaagggctttgttttgcacactttgccatattttcaccatttgattatgtagcaaaatacatgacatttatttttcatttagtttgattattcagtgtcactggcgacacgtagcagcttagactaaggccattattgtacttgccttattagagtgtctttccacggagccactcctctgactcagggctcctgggttttgtattctctgagctgtgcaggtggggagactgggctgagggagcctggccccatggtcagccctagggtggagagccaccaagagggacgcctgggggtgccaggaccagtcaacctgggcaaagcctagtgaaggcttctctctgtgggatgggatggtggagggccacatgggaggctcacccccttctccatccacatgggagccgggtctgcctcttctgggagggcagcagggctaccctgagctgaggcagcagtgtgaggccagggcagagtgagacccagccctcatcccgagcacctccacatcctccacgttctgctcatcattctctgtctcatccatcatcatgtgtgtccacgactgtctccatggccccgcaaaaggactctcaggaccaaagctttcatgtaaactgtgcaccaagcaggaaatgaaaatgtcttgtgttacctgaaaacactgtgcacatctgtgtcttgtttggaatattgtccattgtccaatcctatgtttttgttcaaagccagcgtcctcctctgtgaccaatgtcttgatgcatgcactgttccccctgtgcagccgctgagcgaggagatgctccttgggccctttgagtgcagtcctgatcagagccgtggtcctttggggtgaactaccttggttcccccactgatcacaaaaacatggtgggtccatgggcagagcccaagggaattcggtgtgcaccagggttgaccccagaggattgctgccccatcagtgctccctcacatgtcagtaccttcaaactagggccaagcccagcactgcttgaggaaaacaagcattcacaacttgtttttggtttttaaaacccagtccacaaaataaccaatcctggacatgaagattctttcccaattcacatctaacctcatcttcttcaccatttggcaatgccatcatctcctgccttcctcctgggccctctctgctctgcgtgtcacctgtgcttcgggcccttcccacaggacatttctctaagagaacaatgtgctatgtgaagagtaagtcaacctgcctgacatttggagtgttccccttccactgagggcagtcgatagagctgtattaagccacttaaaatgttcacttttgacaaaggcaagcacttgtgggtttttgttttgtttttcattcagtcttacgaatacttttgccctttgattaaagactccagttaaaaaaaattttaatgaagaaagtggaaaacaaggaagtcaaagcaaggaaactatgtaacatgtaggaagtaggaagtaaattatagtgatgtaatcttgaattgtaactgttcttgaatttaataatctgtagggtaattagtaacatgtgttaagtattttcataagtatttcaaattggagcttcatggcagaaggcaaacccatcaacaaaaattgtcccttaaacaaaaattaaaatcctcaatccagctatgttatattgaaaaaatagagcctgagggatctttactagttataaagatacagaactctttcaaaaccttttgaaattaacctctcactataccagtataattgagttttcagtggggcagtcattatccaggtaatccaagatattttaaaatctgtcacgtagaacttggatgtacctgcccccaatccatgaaccaagaccattgaattcttggttgaggaaacaaacatgaccctaaatcttgactacagtcaggaaaggaatcatttctatttctcctccatgggagaaaatagataagagtagaaactgcagggaaaattatttgcataacaattcctctactaacaatcagctccttcctggagactgcccagctaaagcaatatgcatttaaatacagtcttccatttgcaagggaaaagtctcttgtaatccgaatctctttttgctttcgaactgctagtcaagtgcgtccacgagctgtttactagggatccctcatctgtccctccgggacctggtgctgcctctacctgacactcccttgggctccctgtaacctcttcagaggccctcgctgccagctctgtatcaggacccagaggaaggggccagaggctcgttgactggctgtgtgttgggattgagtctgtgccacgtgtttgtgctgtggtgtgtccccctctgtccaggcactgagataccagcgaggaggctccagagggcactctgcttgttattagagattacctcctgagaaaaaaggttccgcttggagcagaggggctgaatagcagaaggttgcacctcccccaaccttagatgttctaagtctttccattggatctcattggacccttccatggtgtgatcgtctgactggtgttatcaccgtgggctccctgactgggagttgatcgcctttcccaggtgctacacccttttccagctggatgagaatttgagtgctctgatccctctacagagcttccctgactcattctgaaggagccccattcctgggaaatattccctagaaacttccaaatcccctaagcagaccactgataaaaccatgtagaaaatttgttattttgcaacctcgctggactctcagtctctgagcagtgaatgattcagtgttaaatgtgatgaatactgtattttgtattgtttcaattgcatctcccagataatgtgaaaatggtccaggagaaggccaattcctatacgcagcgtgctttaaaaaataaataagaaacaactctttgagaaacaacaatttctactttgaagtcataccaatgaaaaaatgtatatgcacttataattttcctaataaagttctgtactcaaatgtaaaaaaaaaaaa

SEQ ID NO: 327520 - DNA, 3878 bp, Homo sapiens
gcacgggacaggccgggccacacccaccggggcgagctcggagggcggcgctctgggcggagggcccggcggctcggcccagggcgcgttacctcgtcgccggggccggagagggcgggcggaggcacggggcctggaggcgccaggcggaggatgcgggcgacacggtggcggcggcgaccgcgcgaccgggcgggcgggcgggcaggggcgagcggagggagggagcggactgcggcaggatctgtcgaggaaaaatcttgcggccggcgattccccgccttttaagcgcagcctgcactccccccaccccacgcaggggcgggccttccccaacgcgggcgcccactggccgccgcgcgccgctcccctccagctcgcctgcgcctttcactctccgtcagccgcattgcccgctcggcgtccggcccccgacccgcgctcgtccgcccgcccgcccgcccgcccgcgccatgaacgccaaggtcgtggtcgtgctggtcctcgtgctgaccgcgctctgcctcagcgacgggaagcccgtcagcctgagctacagatgcccatgccgattcttcgaaagccatgttgccagagccaacgtcaagcatctcaaaattctcaacactccaaactgtgcccttcagattgtagcccggctgaagaacaacaacagacaagtgtgcattgacccgaagctaaagtggattcaggagtacctggagaaagctttaaacaagaggttcaagatgtgagagggtcagacgcctgaggaacccttacagtaggagcccagctctgaaaccagtgttagggaagggcctgccacagcctcccctgccagggcagggccccaggcattgccaagggctttgttttgcacactttgccatattttcaccatttgattatgtagcaaaatacatgacatttatttttcatttagtttgattattcagtgtcactggcgacacgtagcagcttagactaaggccattattgtacttgccttattagagtgtctttccacggagccactcctctgactcagggctcctgggttttgtattctctgagctgtgcaggtggggagactgggctgagggagcctggccccatggtcagccctagggtggagagccaccaagagggacgcctgggggtgccaggaccagtcaacctgggcaaagcctagtgaaggcttctctctgtgggatgggatggtggagggccacatgggaggctcacccccttctccatccacatgggagccgggtctgcctcttctgggagggcagcagggctaccctgagctgaggcagcagtgtgaggccagggcagagtgagacccagccctcatcccgagcacctccacatcctccacgttctgctcatcattctctgtctcatccatcatcatgtgtgtccacgactgtctccatggccccgcaaaaggactctcaggaccaaagctttcatgtaaactgtgcaccaagcaggaaatgaaaatgtcttgtgttacctgaaaacactgtgcacatctgtgtcttgtttggaatattgtccattgtccaatcctatgtttttgttcaaagccagcgtcctcctctgtgaccaatgtcttgatgcatgcactgttccccctgtgcagccgctgagcgaggagatgctccttgggccctttgagtgcagtcctgatcagagccgtggtcctttggggtgaactaccttggttcccccactgatcacaaaaacatggtgggtccatgggcagagcccaagggaattcggtgtgcaccagggttgaccccagaggattgctgccccatcagtgctccctcacatgtcagtaccttcaaactagggccaagcccagcactgcttgaggaaaacaagcattcacaacttgtttttggtttttaaaacccagtccacaaaataaccaatcctggacatgaagattctttcccaattcacatctaacctcatcttcttcaccatttggcaatgccatcatctcctgccttcctcctgggccctctctgctctgcgtgtcacctgtgcttcgggcccttcccacaggacatttctctaagagaacaatgtgctatgtgaagagtaagtcaacctgcctgacatttggagtgttccccttccactgagggcagtcgatagagctgtattaagccacttaaaatgttcacttttgacaaaggcaagcacttgtgggtttttgttttgtttttcattcagtcttacgaatacttttgccctttgattaaagactccagttaaaaaaaattttaatgaagaaagtggaaaacaaggaagtcaaagcaaggaaactatgtaacatgtaggaagtaggaagtaaattatagtgatgtaatcttgaattgtaactgttcttgaatttaataatctgtagggtaattagtaacatgtgttaagtattttcataagtatttcaaattggagcttcatggcagaaggcaaacccatcaacaaaaattgtcccttaaacaaaaattaaaatcctcaatccagctatgttatattgaaaaaatagagcctgagggatctttactagttataaagatacagaactctttcaaaaccttttgaaattaacctctcactataccagtataattgagttttcagtggggcagtcattatccaggtaatccaagatattttaaaatctgtcacgtagaacttggatgtacctgcccccaatccatgaaccaagaccattgaattcttggttgaggaaacaaacatgaccctaaatcttgactacagtcaggaaaggaatcatttctatttctcctccatgggagaaaatagataagagtagaaactgcagggaaaattatttgcataacaattcctctactaacaatcagctccttcctggagactgcccagctaaagcaatatgcatttaaatacagtcttccatttgcaagggaaagtccacgagctgtttactagggatccctcatctgtccctccgggacctggtgctgcctctacctgacactcccttgggctccctgtaacctcttcagaggccctcgctgccagctctgtatcaggacccagaggaaggggccagaggctcgttgactggctgtgtgttgggattgagtctgtgccacgtgtttgtgctgtggtgtgtccccctctgtccaggcactgagataccagcgaggaggctccagagggcactctgcttgttattagagattacctcctgagaaaaaaggttccgcttggagcagaggggctgaatagcagaaggttgcacctcccccaaccttagatgttctaagtctttccattggatctcattggacccttccatggtgtgatcgtctgactggtgttatcaccgtgggctccctgactgggagttgatcgcctttcccaggtgctacacccttttccagctggatgagaatttgagtgctctgatccctctacagagcttccctgactcattctgaaggagccccattcctgggaaatattccctagaaacttccaaatcccctaagcagaccactgataaaaccatgtagaaaatttgttattttgcaacctcgctggactctcagtctctgagcagtgaatgattcagtgttaaatgtgatgaatactgtattttgtattgtttcaattgcatctcccagataatgtgaaaatggtccaggagaaggccaattcctatacgcagcgtgctttaaaaaataaataagaaacaactctttgagaaacaacaatttctactttgaagtcataccaatgaaaaaatgtatatgcacttataattttcctaataaagttctgtactcaaatgtaaaaaaaaaaaa

SEQ ID NO: 327521 - DNA, 3134 bp, Homo sapiens
gcacgggacaggccgggccacacccaccggggcgagctcggagggcggcgctctgggcggagggcccggcggctcggcccagggcgcgttacctcgtcgccggggccggagagggcgggcggaggcacggggcctggaggcgccaggcggaggatgcgggcgacacggtggcggcggcgaccgcgcgaccgggcgggcgggcgggcaggggcgagcggagggagggagcggactgcggcaggatctgtcgaggaaaaatcttgcggccggcgattccccgccttttaagcgcagcctgcactccccccaccccacgcaggggcgggccttccccaacgcgggcgcccactggccgccgcgcgccgctcccctccagctcgcctgcgcctttcactctccgtcagccgcattgcccgctcggcgtccggcccccgacccgcgctcgtccgcccgcccgcccgcccgcccgcgccatgaacgccaaggtcgtggtcgtgctggtcctcgtgctgaccgcgctctgcctcagcgacgggaagcccgtcagcctgagctacagatgcccatgccgattcttcgaaagccatgttgccagagccaacgtcaagcatctcaaaattctcaacactccaaactgtgcccttcagattgtagcccggctgaagaacaacaacagacaagtgtgcattgacccgaagctaaagtggattcaggagtacctggagaaagctttaaacaagaggttcaagatgtgagagggtcagacgcctgaggaacccttacagtaggagcccagctctgaaaccagtgttagggaagggcctgccacagcctcccctgccagggcagggccccaggcattgccaagggctttgttttgcacactttgccatattttcaccatttgattatgtagcaaaatacatgacatttatttttcatttagtttgattattcagtgtcactggcgacacgtagcagcttagactaaggccattattgtacttgccttattagagtgtctttccacggagccactcctctgactcagggctcctgggttttgtattctctgagctgtgcaggtggggagactgggctgagggagcctggccccatggtcagccctagggtggagagccaccaagagggacgcctgggggtgccaggaccagtcaacctgggcaaagcctagtgaaggcttctctctgtgggatgggatggtggagggccacatgggaggctcacccccttctccatccacatgggagccgggtctgcctcttctgggagggcagcagggctaccctgagctgaggcagcagtgtgaggccagggcagagtgagacccagccctcatcccgagcacctccacatcctccacgttctgctcatcattctctgtctcatccatcatcatgtgtgtccacgactgtctccatggccccgcaaaaggactctcaggaccaaagctttcatgtaaactgtgcaccaagcaggaaatgaaaatgtcttgtgttacctgaaaacactgtgcacatctgtgtcttgtttggaatattgtccattgtccaatcctatgtttttgttcaaagccagcgtcctcctctgtgaccaatgtcttgatgcatgcactgttccccctgtgcagccgctgagcgaggagatgctccttgggccctttgagtgcagtcctgatcagagccgtggtcctttggggtgaactaccttggttcccccactgatcacaaaaacatggtgggtccatgggcagagcccaagggaattcggtgtgcaccagggttgaccccagaggattgctgccccatcagtgctccctcacatgtcagtaccttcaaactagggccaagcccagcactgcttgaggaaaacaagcattcacaacttgtttttggtttttaaaacccagtccacaaaataaccaatcctggacatgaagattctttcccaattcacatctaacctcatcttcttcaccatttggcaatgccatcatctcctgccttcctcctgggccctctctgctctgcgtgtcacctgtgcttcgggcccttcccacaggacatttctctaagagaacaatgtgctatgtgaagagtaagtcaacctgcctgacatttggagtgttccccttccactgagggcagtcgatagagctgtattaagccacttaaaatgttcacttttgacaaaggcaagcacttgtgggtttttgttttgtttttcattcagtcttacgaatacttttgccctttgattaaagactccagttaaaaaaaattttaatgaagaaagtggaaaacaaggaagtcaaagcaaggaaactatgtaacatgtaggaagtaggaagggccagaggctcgttgactggctgtgtgttgggattgagtctgtgccacgtgtttgtgctgtggtgtgtccccctctgtccaggcactgagataccagcgaggaggctccagagggcactctgcttgttattagagattacctcctgagaaaaaaggttccgcttggagcagaggggctgaatagcagaaggttgcacctcccccaaccttagatgttctaagtctttccattggatctcattggacccttccatggtgtgatcgtctgactggtgttatcaccgtgggctccctgactgggagttgatcgcctttcccaggtgctacacccttttccagctggatgagaatttgagtgctctgatccctctacagagcttccctgactcattctgaaggagccccattcctgggaaatattccctagaaacttccaaatcccctaagcagaccactgataaaaccatgtagaaaatttgttattttgcaacctcgctggactctcagtctctgagcagtgaatgattcagtgttaaatgtgatgaatactgtattttgtattgtttcaattgcatctcccagataatgtgaaaatggtccaggagaaggccaattcctatacgcagcgtgctttaaaaaataaataagaaacaactctttgagaaacaacaatttctactttgaagtcataccaatgaaaaaatgtatatgcacttataattttcctaataaagttctgtactcaaatgtaaaaaaaaaaaa

SEQ ID NO: 327522 - DNA, 3875 bp, Homo sapiens
gcacgggacaggccgggccacacccaccggggcgagctcggagggcggcgctctgggcggagggcccggcggctcggcccagggcgcgttacctcgtcgccggggccggagagggcgggcggaggcacggggcctggaggcgccaggcggaggatgcgggcgacacggtggcggcggcgaccgcgcgaccgggcgggcgggcgggcaggggcgagcggagggagggagcggactgcggcaggatctgtcgaggaaaaatcttgcggccggcgattccccgccttttaagcgcagcctgcactccccccaccccacgcaggggcgggccttccccaacgcgggcgcccactggccgccgcgcgccgctcccctccagctcgcctgcgcctttcactctccgtcagccgcattgcccgctcggcgtccggcccccgacccgcgctcgtccgcccgcccgcccgcccgcccgcgccatgaacgccaaggtcgtggtcgtgctggtcctcgtgctgaccgcgctctgcctcagcgacgggaagcccgtcagcctgagctacagatgcccatgccgattcttcgaaagccatgttgccagagccaacgtcaagcatctcaaaattctcaacactccaaactgtgcccttcagattgtagcccggctgaagaacaacaacagacaagtgtgcattgacccgaagctaaagtggattcaggagtacctggagaaagctttaaacaagaggttcaagatgtgagagggtcagacgcctgaggaacccttacagtaggagcccagctctgaaaccagtgttagggaagggcctgccacagcctcccctgccagggcagggccccaggcattgccaagggctttgttttgcacactttgccatattttcaccatttgattatgtagcaaaatacatgacatttatttttcatttagtttgattattcagtgtcactggcgacacgtagcagcttagactaaggccattattgtacttgccttattagagtgtctttccacggagccactcctctgactcagggctcctgggttttgtattctctgagctgtgcaggtggggagactgggctgagggagcctggccccatggtcagccctagggtggagagccaccaagagggacgcctgggggtgccaggaccagtcaacctgggcaaagcctagtgaaggcttctctctgtgggatgggatggtggagggccacatgggaggctcacccccttctccatccacatgggagccgggtctgcctcttctgggagggcagcagggctaccctgagctgaggcagcagtgtgaggccagggcagagtgagacccagccctcatcccgagcacctccacatcctccacgttctgctcatcattctctgtctcatccatcatcatgtgtgtccacgactgtctccatggccccgcaaaaggactctcaggaccaaagctttcatgtaaactgtgcaccaagcaggaaatgaaaatgtcttgtgttacctgaaaacactgtgcacatctgtgtcttgtttggaatattgtccattgtccaatcctatgtttttgttcaaagccagcgtcctcctctgtgaccaatgtcttgatgcatgcactgttccccctgtgcagccgctgagcgaggagatgctccttgggccctttgagtgcagtcctgatcagagccgtggtcctttggggtgaactaccttggttcccccactgatcacaaaaacatggtgggtccatgggcagagcccaagggaattcggtgtgcaccagggttgaccccagaggattgctgccccatcagtgctccctcacatgtcagtaccttcaaactagggccaagcccagcactgcttgaggaaaacaagcattcacaacttgtttttggtttttaaatctaacctcatcttcttcaccatttggcaatgccatcatctcctgccttcctcctgggccctctctgctctgcgtgtcacctgtgcttcgggcccttcccacaggacatttctctaagagaacaatgtgctatgtgaagagtaagtcaacctgcctgacatttggagtgttccccttccactgagggcagtcgatagagctgtattaagccacttaaaatgttcacttttgacaaaggcaagcacttgtgggtttttgttttgtttttcattcagtcttacgaatacttttgccctttgattaaagactccagttaaaaaaaattttaatgaagaaagtggaaaacaaggaagtcaaagcaaggaaactatgtaacatgtaggaagtaggaagtaaattatagtgatgtaatcttgaattgtaactgttcttgaatttaataatctgtagggtaattagtaacatgtgttaagtattttcataagtatttcaaattggagcttcatggcagaaggcaaacccatcaacaaaaattgtcccttaaacaaaaattaaaatcctcaatccagctatgttatattgaaaaaatagagcctgagggatctttactagttataaagatacagaactctttcaaaaccttttgaaattaacctctcactataccagtataattgagttttcagtggggcagtcattatccaggtaatccaagatattttaaaatctgtcacgtagaacttggatgtacctgcccccaatccatgaaccaagaccattgaattcttggttgaggaaacaaacatgaccctaaatcttgactacagtcaggaaaggaatcatttctatttctcctccatgggagaaaatagataagagtagaaactgcagggaaaattatttgcataacaattcctctactaacaatcagctccttcctggagactgcccagctaaagcaatatgcatttaaatacagtcttccatttgcaagggaaaagtctcttgtaatccgaatctctttttgctttcgaactgctagtcaagtgcgtccacgagctgtttactagggatccctcatctgtccctccgggacctggtgctgcctctacctgacactcccttgggctccctgtaacctcttcagaggccctcgctgccagctctgtatcaggacccagaggaaggggccagaggctcgttgactggctgtgtgttgggattgagtctgtgccacgtgtttgtgctgtggtgtgtccccctctgtccaggcactgagataccagcgaggaggctccagagggcactctgcttgttattagagattacctcctgagaaaaaaggttccgcttggagcagaggggctgaatagcagaaggttgcacctcccccaaccttagatgttctaagtctttccattggatctcattggacccttccatggtgtgatcgtctgactggtgttatcaccgtgggctccctgactgggagttgatcgcctttcccaggtgctacacccttttccagctggatgagaatttgagtgctctgatccctctacagagcttccctgactcattctgaaggagccccattcctgggaaatattccctagaaacttccaaatcccctaagcagaccactgataaaaccatgtagaaaatttgttattttgcaacctcgctggactctcagtctctgagcagtgaatgattcagtgttaaatgtgatgaatactgtattttgtattgtttcaattgcatctcccagataatgtgaaaatggtccaggagaaggccaattcctatacgcagcgtgctttaaaaaataaataagaaacaactctttgagaaacaacaatttctactttgaagtcataccaatgaaaaaatgtatatgcacttataattttcctaataaagttctgtactcaaatgtaaaaaaaaaaaa

SEQ ID NO: 327523 - DNA, 3637 bp, Homo sapiens
gcacgggacaggccgggccacacccaccggggcgagctcggagggcggcgctctgggcggagggcccggcggctcggcccagggcgcgttacctcgtcgccggggccggagagggcgggcggaggcacggggcctggaggcgccaggcggaggatgcgggcgacacggtggcggcggcgaccgcgcgaccgggcgggcgggcgggcaggggcgagcggagggagggagcggactgcggcaggatctgtcgaggaaaaatcttgcggccggcgattccccgccttttaagcgcagcctgcactccccccaccccacgcaggggcgggccttccccaacgcgggcgcccactggccgccgcgcgccgctcccctccagctcgcctgcgcctttcactctccgtcagccgcattgcccgctcggcgtccggcccccgacccgcgctcgtccgcccgcccgcccgcccgcccgcgccatgaacgccaaggtcgtggtcgtgctggtcctcgtgctgaccgcgctctgcctcagcgacgggaagcccgtcagcctgagctacagatgcccatgccgattcttcgaaagccatgttgccagagccaacgtcaagcatctcaaaattctcaacactccaaactgtgcccttcagattgtagcccggctgaagaacaacaacagacaagtgtgcattgacccgaagctaaagtggattcaggagtacctggagaaagctttaaacaagaggttcaagatgtgagagggtcagacgcctgaggaacccttacagtaggagcccagctctgaaaccagtgttagggaagggcctgccacagcctcccctgccagggcagggccccaggcattgccaagggctttgttttgcacactttgccatattttcaccatttgattatgtagcaaaatacatgacatttatttttcatttagtttgattattcagtgtcactggcgacacgtagcagcttagactaaggccattattgtacttgccttattagagtgtctttccacggagccactcctctgactcagggctcctgggttttgtattctctgagctgtgcaggtggggagactgggctgagggagcctggccccatggtcagccctagggtggagagccaccaagagggacgcctgggggtgccaggaccagtcaacctgggcaaagcctagtgaaggcttctctctgtgggatgggatggtggagggccacatgggaggctcacccccttctccatccacatgggagccgggtctgcctcttctgggagggcagcagggctaccctgagctgaggcagcagtgtgaggccagggcagagtgagacccagccctcatcccgagcacctccacatcctccacgttctgctcatcattctctgtctcatccatcatcatgtgtgtccacgactgtctccatggccccgcaaaaggactctcaggaccaaagctttcatgtaaactgtgcaccaagcaggaaatgaaaatgtcttgtgttacctgaaaacactgtgcacatctgtgtcttgtttggaatattgtccattgtccaatcctatgtttttgttcaaagccagcgtcctcctctgtgaccaatgtcttgatgcatgcactgttccccctgtgcagccgctgagcgaggagatgctccttgggccctttgagtgcagtcctgatcagagccgtggtcctttggggtgaactaccttggttcccccactgatcacaaaaacatggtgggtccatgggcagagcccaagggaattcggtgtgcaccagggttgaccccagaggattgctgccccatcagtgctccctcacatgtcagtaccttcaaactagggccaagcccagcactgcttgaggaaaacaagcattcacaacttgtttttggtttttaaaacccagtccacaaaataaccaatcctggacatgaagattctttcccaattcacatctaacctcatcttcttcaccatttggcaatgccatcatctcctgccttcctcctgggccctctctgctctgcgtgtcacctgtgcttcgggcccttcccacaggacatttctctaagagaacaatgtgctatgtgaagagtaagtcaacctgcctgacatttggagtgttccccttccactgagggcagtcgatagagctgtattaagccacttaaaatgttcacttttgacaaaggcaagcacttgtgggtttttgttttgtttttcattcagtcttacgaatacttttgccctttgattaaagactccagttaaaaaaaattttaatgaagaaagtggaaaacaaggaagtcaaagcaaggaaactatgtaacatgtaggaagtaggaagtaaattatagtgatgtaatcttgaattgtaactgttcttgaatttaataatctgtagggtaattagtaacatgtgttaagtattttcataagtatttcaaattggagcttcatggcagaaggcaaacccatcaacaaaaattgtcccttaaacaaaaattaaaatcctcaatccagctatgttatattgaaaaaatagagcctgagggatctttactagttataaagatacagaactctttcaaaaccttttgaaattaacctctcactataccagtataattgagttttcagtggggcagtcattatccaggtaatccaagatattttaaaatctgtcacgtagaacttggatgtacctgcccccaatccatgaaccaagaccattgaattcttggttgaggaaacaaacatgaccctaaatcttgactacagtcaggaaaggaatcatttctatttctcctccatgggagaaaatagataagagtagaaactgcagggaaaattatttgcataacaattcctctactaacaatcagctccttcctggagactgcccagctaaagcaatatgcatttaaatacagtcttccatttgcaagggaaaagtctcttgtaatccgaatctctttttgctttcgaactgctagtcaagtgcgtccacgagctgtttactagggatccctcatctgtccctccgggacctggtgctgcctctacctgacactcccttgggctccctgtaacctcttcagaggccctcgctgccagctctgtatcaggacccagaggaaggggccagaggctcgttgactggctgtgtgttgggattgagtctgtgccacgtgtttgtgctgtggtgtgtccccctctgtccaggcactgagataccagcgaggaggctccagagggcactctgcttgttattagagattacctcctgagaaaaaaggttccgcttggagcagaggggctgaatagcagaaggttgcacctcccccaaccttagcagtctctgagcagtgaatgattcagtgttaaatgtgatgaatactgtattttgtattgtttcaattgcatctcccagataatgtgaaaatggtccaggagaaggccaattcctatacgcagcgtgctttaaaaaataaataagaaacaactctttgagaaacaacaatttctactttgaagtcataccaatgaaaaaatgtatatgcacttataattttcctaataaagttctgtactcaaatgtaaaaaaaaaaaa

SEQ ID NO: 327524 - DNA, 3235 bp, Homo sapiens
gcacgggacaggccgggccacacccaccggggcgagctcggagggcggcgctctgggcggagggcccggcggctcggcccagggcgcgttacctcgtcgccggggccggagagggcgggcggaggcacggggcctggaggcgccaggcggaggatgcgggcgacacggtggcggcggcgaccgcgcgaccgggcgggcgggcgggcaggggcgagcggagggagggagcggactgcggcaggatctgtcgaggaaaaatcttgcggccggcgattccccgccttttaagcgcagcctgcactccccccaccccacgcaggggcgggccttccccaacgcgggcgcccactggccgccgcgcgccgctcccctccagctcgcctgcgcctttcactctccgtcagccgcattgcccgctcggcgtccggcccccgacccgcgctcgtccgcccgcccgcccgcccgcccgcgccatgaacgccaaggtcgtggtcgtgctggtcctcgtgctgaccgcgctctgcctcagcgacgggaagcccgtcagcctgagctacagatgcccatgccgattcttcgaaagccatgttgccagagccaacgtcaagcatctcaaaattctcaacactccaaactgtgcccttcagattgtagcccggctgaagaacaacaacagacaagtgtgcattgacccgaagctaaagtggattcaggagtacctggagaaagctttaaacaagaggttcaagatgtgagagggtcagacgcctgaggaacccttacagtaggagcccagctctgaaaccagtgttagggaagggcctgccacagcctcccctgccagggcagggccccaggcattgccaagggctttgttttgcacactttgccatattttcaccatttgattatgtagcaaaatacatgacatttatttttcatttagtttgattattcagtgtcactggcgacacgtagcagcttagactaaggccattattgtacttgccttattagagtgtctttccacggagccactcctctgactcagggctcctgggttttgtattctctgagctgtgcaggtggggagactgggctgagggagcctggccccatggtcagccctagggtggagagccaccaagagggacgcctgggggtgccaggaccagtcaacctgggcaaagcctagtgaaggcttctctctgtgggatgggatggtggagggccacatgggaggctcacccccttctccatccacatgggagccgggtctgcctcttctgggagggcagcagggctaccctgagctgaggcagcagtgtgaggccagggcagagtgagacccagccctcatcccgagcacctccacatcctccacgttctgctcatcattctctgtctcatccatcatcatgtgtgtccacgactgtctccatggccccgcaaaaggactctcaggaccaaagctttcatgtaaactgtgcaccaagcaggaaatgaaaatgtcttgtgttacctgaaaacactgtgcacatctgtgtcttgtttggaatattgtccattgtccaatcctatgtttttgttcaaagccagcgtcctcctctgtgaccaatgtcttgatgcatgcactgttccccctgtgcagccgctgagcgaggagatgctccttgggccctttgagtgcagtcctgatcagagccgtggtcctttggggtgaactaccttggttcccccactgatcacaaaaacatggtgggtccatgggcagagcccaagggaattcggtgtgcaccagggttgaccccagaggattgctgccccatcagtgctccctcacatgtcagtaccttcaaactagggccaagcccagcactgcttgaggaaaacaagcattcacaacttgtttttggtttttaaaacccagtccacaaaataaccaatcctggacatgaagattctttcccaattcacatctaacctcatcttcttcaccatttggcaatgccatcatctcctgccttcctcctgggccctctctgctctgcgtgtcacctgtgcttcgggcccttcccacaggacatttctctaagagaacaatgtgctatgtgaagagtaagtcaacctgcctgacatttggagtgttccccttccactgagggcagtcgatagagctgtattaagccacttaaaatgttcacttttgacaaaggcaagcacttgtgggtttttgttttgtttttcattcagtcttacgaatacttttgccctttgattaaagactccagttaaaaaaaattttaatgaagaaagtggaaaacaaggaagtcaaagcaaggaaactatgtaacatgtaggaagtaggaagtaaattatagtgatgtaatcttgaattgtaactgttcttgaatttaataatctgtagggtaattagtaacatgtgttaagtattttcataagtatttcaaattggagcttcatggcagaaggcaaacccatcaacaaaaattgtcccttaaacaaaaattaaaatcctcaatccagctatgttatattgaaaaaatagagcctgagggatctttactagttataaagatacagaactctttcaaaaccttttgaaattaacctctcactataccagtataattgagttttcagtggggcagtcattatccaggtaatccaagatattttaaaatctgtcacgtagaacttggatgtacctgcccccaatccatgaaccaagaccattgaattcttggttgaggaaacaaacatgaccctaaatcttgactacagtcaggaaaggaatcatttctatttctcctccatgggagaaaatagataagagtagaaactgcagggaaaattatttgcataacaattcctctactaacaatcagctccttcctggagactgcccagctaaagcaatatgcatttaaatacagtcttccatttgcaagggaaacagtctctgagcagtgaatgattcagtgttaaatgtgatgaatactgtattttgtattgtttcaattgcatctcccagataatgtgaaaatggtccaggagaaggccaattcctatacgcagcgtgctttaaaaaataaataagaaacaactctttgagaaacaacaatttctactttgaagtcataccaatgaaaaaatgtatatgcacttataattttcctaataaagttctgtactcaaatgtaaaaaaaaaaaa

SEQ ID NO: 327525 - DNA, 3875 bp, Homo sapiens
gcacgggacaggccgggccacacccaccggggcgagctcggagggcggcgctctgggcggagggcccggcggctcggcccagggcgcgttacctcgtcgccggggccggagagggcgggcggaggcacggggcctggaggcgccaggcggaggatgcgggcgacacggtggcggcggcgaccgcgcgaccgggcgggcgggcgggcaggggcgagcggagggagggagcggactgcggcaggatctgtcgaggaaaaatcttgcggccggcgattccccgccttttaagcgcagcctgcactccccccaccccacgcaggggcgggccttccccaacgcgggcgcccactggccgccgcgcgccgctcccctccagctcgcctgcgcctttcactctccgtcagccgcattgcccgctcggcgtccggcccccgacccgcgctcgtccgcccgcccgcccgcccgcccgcgccatgaacgccaaggtcgtggtcgtgctggtcctcgtgctgaccgcgctctgcctcagcgacgggaagcccgtcagcctgagctacagatgcccatgccgattcttcgaaagccatgttgccagagccaacgtcaagcatctcaaaattctcaacactccaaactgtgcccttcagattgtagcccggctgaagaacaacaacagacaagtgtgcattgacccgaagctaaagtggattcaggagtacctggagaaagctttaaacaagaggttcaagatgtgagagggtcagacgcctgaggaacccttacagtaggagcccagctctgaaaccagtgttagggaagggcctgccacagcctcccctgccagggcagggccccaggcattgccaagggctttgttttgcacactttgccatattttcaccatttgattatgtagcaaaatacatgacatttatttttcatttagtttgattattcagtgtcactggcgacacgtagcagcttagactaaggccattattgtacttgccttattagagtgtctttccacggagccactcctctgactcagggctcctgggttttgtattctctgagctgtgcaggtggggagactgggctgagggagcctggccccatggtcagccctagggtggagagccaccaagagggacgcctgggggtgccaggaccagtcaacctgggcaaagcctagtgaaggcttctctctgtgggatgggatggtggagggccacatgggaggctcacccccttctccatccacatgggagccgggtctgcctcttctgggagggcagcagggctaccctgagctgaggcagcagtgtgaggccagggcagagtgagacccagccctcatcccgagcacctccacatcctccacgttctgctcatcattctctgtctcatccatcatcatgtgtgtccacgactgtctccatggccccgcaaaaggactctcaggaccaaagctttcatgtaaactgtgcaccaagcaggaaatgaaaatgtcttgtgttacctgaaaacactgtgcacatctgtgtcttgtttggaatattgtccattgtccaatcctatgtttttgttcaaagccagcgtcctcctctgtgaccaatgtcttgatgcatgcactgttccccctgtgcagccgctgagcgaggagatgctccttgggccctttgagtgcagtcctgatcagagccgtggtcctttggggtgaactaccttggttcccccactgatcacaaaaacatggtgggtccatgggcagagcccaagggaattcggtgtgcaccagggttgaccccagaggattgctgccccatcagtgctccctcacatgtcagtaccttcaaactagggccaagcccagcactgcttgaggaaaacaagcattcacaacttgtttttggtttttaaaacccagtccacaaaataaccaatcctggacatgaagattctttcccaattcacatctaacctcatcttcttcaccatttggcaatgccatcatctcctgccttcctcctgggccctctctgctctgcgtgtcacctgtgcttcgggcccttcccacaggacatttctctaagagaacaatgtgctatgtgaagagtaagtcaacctgcctgacatttggagtgttccccttccactgagggcagtcgatagagctgtattaagccacttaaaatgttcacttttgacaaaggcaagcacttgtgggtttttgttttgtttttcattcagtcttacgaatacttttgccctttgattaaagactccagttaaaaaaaattttaatgaagaaagtggaaaacaaggaagtcaaagcaaggaaactatgtaacatgtaggaagtaggaagtaaattatagtgatgtaatcttgaattgtaactgttcttgaatttaataatctgtagggtaattagtaacatgtgttaagtattttcataagtatttcaaattggagcttcatggcagaaggcaaacccatcaacaaaaattgtcccttaaacaaaaattaaaatcctcaatccagctatgttatattgaaaaaatagagcctgagggatctttactagttataaagatacagaactctttcaaaaccttttgaaattaacctctcactataccagtataattgagttttcagtggggcagtcattatccaggtaatccaagatattttcattgaattcttggttgaggaaacaaacatgaccctaaatcttgactacagtcaggaaaggaatcatttctatttctcctccatgggagaaaatagataagagtagaaactgcagggaaaattatttgcataacaattcctctactaacaatcagctccttcctggagactgcccagctaaagcaatatgcatttaaatacagtcttccatttgcaagggaaaagtctcttgtaatccgaatctctttttgctttcgaactgctagtcaagtgcgtccacgagctgtttactagggatccctcatctgtccctccgggacctggtgctgcctctacctgacactcccttgggctccctgtaacctcttcagaggccctcgctgccagctctgtatcaggacccagaggaaggggccagaggctcgttgactggctgtgtgttgggattgagtctgtgccacgtgtttgtgctgtggtgtgtccccctctgtccaggcactgagataccagcgaggaggctccagagggcactctgcttgttattagagattacctcctgagaaaaaaggttccgcttggagcagaggggctgaatagcagaaggttgcacctcccccaaccttagatgttctaagtctttccattggatctcattggacccttccatggtgtgatcgtctgactggtgttatcaccgtgggctccctgactgggagttgatcgcctttcccaggtgctacacccttttccagctggatgagaatttgagtgctctgatccctctacagagcttccctgactcattctgaaggagccccattcctgggaaatattccctagaaacttccaaatcccctaagcagaccactgataaaaccatgtagaaaatttgttattttgcaacctcgctggactctcagtctctgagcagtgaatgattcagtgttaaatgtgatgaatactgtattttgtattgtttcaattgcatctcccagataatgtgaaaatggtccaggagaaggccaattcctatacgcagcgtgctttaaaaaataaataagaaacaactctttgagaaacaacaatttctactttgaagtcataccaatgaaaaaatgtatatgcacttataattttcctaataaagttctgtactcaaatgtaaaaaaaaaaaa

SEQ ID NO: 327526 - DNA, 3870 bp, Homo sapiens
gcacgggacaggccgggccacacccaccggggcgagctcggagggcggcgctctgggcggagggcccggcggctcggcccagggcgcgttacctcgtcgccggggccggagagggcgggcggaggcacggggcctggaggcgccaggcggaggatgcgggcgacacggtggcggcggcgaccgcgcgaccgggcgggcgggcgggcaggggcgagcggagggagggagcggactgcggcaggatctgtcgaggaaaaatcttgcggccggcgattccccgccttttaagcgcagcctgcactccccccaccccacgcaggggcgggccttccccaacgcgggcgcccactggccgccgcgcgccgctcccctccagctcgcctgcgcctttcactctccgtcagccgcattgcccgctcggcgtccggcccccgacccgcgctcgtccgcccgcccgcccgcccgcccgcgccatgaacgccaaggtcgtggtcgtgctggtcctcgtgctgaccgcgctctgcctcagcgacgggaagcccgtcagcctgagctacagatgcccatgccgattcttcgaaagccatgttgccagagccaacgtcaagcatctcaaaattctcaacactccaaactgtgcccttcagattgtagcccggctgaagaacaacaacagacaagtgtgcattgacccgaagctaaagtggattcaggagtacctggagaaagctttaaacaagaggttcaagatgtgagagggtcagacgcctgaggaacccttacagtaggagcccagctctgaaaccagtgttagggaagggcctgccacagcctcccctgccagggcagggccccaggcattgccaagggctttgttttgcacactttgccatattttcaccatttgattatgtagcaaaatacatgacatttatttttcatttagtttgattattcagtgtcactggcgacacgtagcagcttagactaaggccattattgtacttgccttattagagtgtctttccacggagccactcctctgactcagggctcctgggttttgtattctctgagctgtgcaggtggggagactgggctgagggagcctggccccatggtcagccctagggtggagagccaccaagagggacgcctgggggtgccaggaccagtcaacctgggcaaagcctagtgaaggcttctctctgtgggatgggatggtggagggccacatgggaggctcacccccttctccatccacatgggagccgggtctgcctcttctgggagggcagcagggctaccctgagctgaggcagcagtgtgaggccagggcagagtgagacccagccctcatcccgagcacctccacatcctccacgttctgctcatcattctctgtctcatccatcatcatgtgtgtccacgactgtctccatggccccgcaaaaggactctcaggaccaaagctttcatgtaaactgtgcaccaagcaggaaatgaaaatgtcttgtgttacctgaaaacactgtgcacatctgtgtcttgtttggaatattgtccattgtccaatcctatgtttttgttcaaagccagcgtcctcctctgtgaccaatgtcttgatgcatgcactgttccccctgtgcagccgctgagcgaggagatgctccttgggccctttgagtgcagtcctgatcagagccgtggtcctttggggtgaactaccttggttcccccactgatcacaaaaacatggtgggtccatgggcagagcccaagggaattcggtgtgcaccagggttgaccccagaggattgctgccccatcagtgctccctcacatgtcagtaccttcaaactagggccaagcccagcactgcttgaggaaaacaagcattcacaacttgtttttggtttttaaaacccagtccacaaaataaccaatcctggacatgaagattctttcccaattcacatctaacctcatcttcttcaccatttggcaatgccatcatctcctgccttcctcctgggccctctctgctctgcgtgtcacctgtgcttcgggcccttcccacaggacatttctctaagagaacaatgtgctatgtgaagagtaagtcaacctgcctgacatttggagtgttccccttccactgagggcagtcgatagagctgtattaagccacttaaaatgttcacttttgacaaaggcaagcacttgtgggtttttgttttgtttttcattcagtcttacgaatacttttgccctttgattaaagactccagttaaaaaaaattttaatgaagaaagtggaaaacaaggaagtcaaagcaaggaaactatgtaacatgtaggaagtaggaagtaaattatagtgatgtaatcttgaattgtaactgttcttgaatttaataatctgtagggtaattagtaacatgtgttaagtattttcataagtatttcaaattggagcttcatggcagaaggcaaacccatcaacaaaaattgtcccttaaacaaaaattaaaatcctcaatccagctatgttatattgaaaaaatagagcctgagggatctttactagttataaagatacagaactctttcaaaaccttttgaaattaacctctcactataccagtataattgagttttcagtggggcagtcattatccaggtaatccaagatattttaaaatctgtcacgtagaacttggatgtacctgcccccaatccatgaaccaagaccattgaattcttggttgaggaaacaaacatgaccctaaatcttgactacagtcaggaaaggaatcatttctatttctcctccatgggagaaaatagataagagtagaaactgcagggaaaattatttgcataacaattcctctactaacaatcagctccttcctggagactgcccagctaaagcaatatgcatttaaatacagtcttccatttgcaagggaaaagtctcttgtaatccgaatctctttttgctttcgaactgctagtcaagtgcgtccacgagctgtttactagggatccctcatctgtccctccgggacctggtgctgcctctacctgacactcccttgggctccctgtaacctcttcagaggccctcgctgccagctctgtatcaggacccagaggaaggggccagaggctcgttgactggctgtgtgttgggattgagtctgtgccacgtgtttgtgctgtggtgtgtccccctctgtccaggcactgagataccagcgaggaggctccagagggcactctgcttgttattagagattacctcctgagaaaaaatgttctaagtctttccattggatctcattggacccttccatggtgtgatcgtctgactggtgttatcaccgtgggctccctgactgggagttgatcgcctttcccaggtgctacacccttttccagctggatgagaatttgagtgctctgatccctctacagagcttccctgactcattctgaaggagccccattcctgggaaatattccctagaaacttccaaatcccctaagcagaccactgataaaaccatgtagaaaatttgttattttgcaacctcgctggactctcagtctctgagcagtgaatgattcagtgttaaatgtgatgaatactgtattttgtattgtttcaattgcatctcccagataatgtgaaaatggtccaggagaaggccaattcctatacgcagcgtgctttaaaaaataaataagaaacaactctttgagaaacaacaatttctactttgaagtcataccaatgaaaaaatgtatatgcacttataattttcctaataaagttctgtactcaaatgtaaaaaaaaaaaa

SEQ ID NO: 327527 - DNA, 3519 bp, Homo sapiens
gcacgggacaggccgggccacacccaccggggcgagctcggagggcggcgctctgggcggagggcccggcggctcggcccagggcgcgttacctcgtcgccggggccggagagggcgggcggaggcacggggcctggaggcgccaggcggaggatgcgggcgacacggtggcggcggcgaccgcgcgaccgggcgggcgggcgggcaggggcgagcggagggagggagcggactgcggcaggatctgtcgaggaaaaatcttgcggccggcgattccccgccttttaagcgcagcctgcactccccccaccccacgcaggggcgggccttccccaacgcgggcgcccactggccgccgcgcgccgctcccctccagctcgcctgcgcctttcactctccgtcagccgcattgcccgctcggcgtccggcccccgacccgcgctcgtccgcccgcccgcccgcccgcccgcgccatgaacgccaaggtcgtggtcgtgctggtcctcgtgctgaccgcgctctgcctcagcgacgggaagcccgtcagcctgagctacagatgcccatgccgattcttcgaaagccattattgtacttgccttattagagtgtctttccacggagccactcctctgactcagggctcctgggttttgtattctctgagctgtgcaggtggggagactgggctgagggagcctggccccatggtcagccctagggtggagagccaccaagagggacgcctgggggtgccaggaccagtcaacctgggcaaagcctagtgaaggcttctctctgtgggatgggatggtggagggccacatgggaggctcacccccttctccatccacatgggagccgggtctgcctcttctgggagggcagcagggctaccctgagctgaggcagcagtgtgaggccagggcagagtgagacccagccctcatcccgagcacctccacatcctccacgttctgctcatcattctctgtctcatccatcatcatgtgtgtccacgactgtctccatggccccgcaaaaggactctcaggaccaaagctttcatgtaaactgtgcaccaagcaggaaatgaaaatgtcttgtgttacctgaaaacactgtgcacatctgtgtcttgtttggaatattgtccattgtccaatcctatgtttttgttcaaagccagcgtcctcctctgtgaccaatgtcttgatgcatgcactgttccccctgtgcagccgctgagcgaggagatgctccttgggccctttgagtgcagtcctgatcagagccgtggtcctttggggtgaactaccttggttcccccactgatcacaaaaacatggtgggtccatgggcagagcccaagggaattcggtgtgcaccagggttgaccccagaggattgctgccccatcagtgctccctcacatgtcagtaccttcaaactagggccaagcccagcactgcttgaggaaaacaagcattcacaacttgtttttggtttttaaaacccagtccacaaaataaccaatcctggacatgaagattctttcccaattcacatctaacctcatcttcttcaccatttggcaatgccatcatctcctgccttcctcctgggccctctctgctctgcgtgtcacctgtgcttcgggcccttcccacaggacatttctctaagagaacaatgtgctatgtgaagagtaagtcaacctgcctgacatttggagtgttccccttccactgagggcagtcgatagagctgtattaagccacttaaaatgttcacttttgacaaaggcaagcacttgtgggtttttgttttgtttttcattcagtcttacgaatacttttgccctttgattaaagactccagttaaaaaaaattttaatgaagaaagtggaaaacaaggaagtcaaagcaaggaaactatgtaacatgtaggaagtaggaagtaaattatagtgatgtaatcttgaattgtaactgttcttgaatttaataatctgtagggtaattagtaacatgtgttaagtattttcataagtatttcaaattggagcttcatggcagaaggcaaacccatcaacaaaaattgtcccttaaacaaaaattaaaatcctcaatccagctatgttatattgaaaaaatagagcctgagggatctttactagttataaagatacagaactctttcaaaaccttttgaaattaacctctcactataccagtataattgagttttcagtggggcagtcattatccaggtaatccaagatattttaaaatctgtcacgtagaacttggatgtacctgcccccaatccatgaaccaagaccattgaattcttggttgaggaaacaaacatgaccctaaatcttgactacagtcaggaaaggaatcatttctatttctcctccatgggagaaaatagataagagtagaaactgcagggaaaattatttgcataacaattcctctactaacaatcagctccttcctggagactgcccagctaaagcaatatgcatttaaatacagtcttccatttgcaagggaaaagtctcttgtaatccgaatctctttttgctttcgaactgctagtcaagtgcgtccacgagctgtttactagggatccctcatctgtccctccgggacctggtgctgcctctacctgacactcccttgggctccctgtaacctcttcagaggccctcgctgccagctctgtatcaggacccagaggaaggggccagaggctcgttgactggctgtgtgttgggattgagtctgtgccacgtgtttgtgctgtggtgtgtccccctctgtccaggcactgagataccagcgaggaggctccagagggcactctgcttgttattagagattacctcctgagaaaaaaggttccgcttggagcagaggggctgaatagcagaaggttgcacctcccccaaccttagatgttctaagtctttccattggatctcattggacccttccatggtgtgatcgtctgactggtgttatcaccgtgggctccctgactgggagttgatcgcctttcccaggtgctacacccttttccagctggatgagaatttgagtgctctgatccctctacagagcttccctgactcattctgaaggagccccattcctgggaaatattccctagaaacttccaaatcccctaagcagaccactgataaaaccatgtagaaaatttgttattttgcaacctcgctggactctcagtctctgagcagtgaatgattcagtgttaaatgtgatgaatactgtattttgtattgtttcaattgcatctcccagataatgtgaaaatggtccaggagaaggccaattcctatacgcagcgtgctttaaaaaataaataagaaacaactctttgagaaacaacaatttctactttgaagtcataccaatgaaaaaatgtatatgcacttataattttcctaataaagttctgtactcaaatgtaaaaaaaaaaaa

SEQ ID NO: 327528 - DNA, 2266 bp, Homo sapiens
gcacgggacaggccgggccacacccaccggggcgagctcggagggcggcgctctgggcggagggcccggcggctcggcccagggcgcgttacctcgtcgccggggccggagagggcgggcggaggcacggggcctggaggcgccaggcggaggatgcgggcgacacggtggcggcggcgaccgcgcgaccgggcgggcgggcgggcaggggcgagcggagggagggagcggactgcggcaggatctgtcgaggaaaaatcttgcggccggcgattccccgccttttaagcgcagcctgcactccccccaccccacgcaggggcgggccttccccaacgcgggcgcccactggccgccgcgcgccgctcccctccagctcgcctgcgcctttcactctccgtcagccgcattgcccgctcggcgtccggcccccgacccgcgctcgtccgcccgcccgcccgcccgcccgcgccatgaacgccaaggtcgtggtcgtgctggtcctcgtgctgaccgcgctctgcctcagcgacgggaagcccgtcagcctgagctacagatgcccatgccgattcttcgaaagccatgttgccagagccaacgtcaagcatctcaaaattctcaacactccaaactgtgcccttcagattgtagcccggctgaagaacaacaacagacaagtgtgcattgatctgggatcgggcctgaggtttgccagcatttagaccctgcatttatagcatacggtatgatattgcagcttatattcatccatgccctgtacctgtgcacgttggaacttttattactggggtttttctaagaaagaaattgtattatcaacagcattttcaagcagttagttccttcatgatcatcacaatcatcatcattctcattctcattttttaaatcaacgagtacttcaagatctgaatttggcttgtttggagcatctcctctgctcccctggggagtctgggcacagtcaggtggtggcttaacagggagctggaaaaagtgtcctttcttcagacactgaggctcccgcagcagcgcccctcccaagaggaaggcctctgtggcactcagataccgactggggctgggcgccgccactgccttcacctcctctttcaacctcagtgattggctctgtgggctccatgtagaagccactattactgggactgtgctcagagacccctctcccagctattcctactctctccccgactccgagagcatgcttaatcttgcttctgcttctcatttctgtagcctgatcagcgccgcaccagccgggaagagggtgattgctggggctcgtgccctgcatccctctcctcccagggcctgccccacagctcgggccctctgtgagatccgtctttggcctcctccagaatggagctggccctctcctggggatgtgtaatggtccccctgcttacccgcaaaagacaagtctttacagaatcaaatgcaattttaaatctgagagctcgctttgagtgactgggttttgtgattgcctctgaagcctatgtatgccatggaggcactaacaaactctgaggtttccgaaatcagaagcgaaaaaatcagtgaataaaccatcatcttgccactaccccctcctgaagccacagcagggtttcaggttccaatcagaactgttggcaaggtgacatttccatgcataaatgcgatccacagaaggtcctggtggtatttgtaactttttgcaaggcatttttttatatatatttttgtgcacatttttttttacgtttctttagaaaacaaatgtatttcaaaatatatttatagtcgaacaattcatatatttgaagtggagccatatgaatgtcagtagtttatacttctctattatctcaaactactggcaatttgtaaagaaatatatatgatatataaatgtgattgcagcttttcaatgttagccacagtgtattttttcacttgtactaaaattgtatcaaatgtgacattatatgcactagcaataaaatgctaattgtttcatggtaaaaacgtcctactgtatgtgggaatttatttacctgaaataaaattcattagttgttagtgatggagcttatagacgtttctggtttatatagttaagcctgcctgcagtcaggtgtctgagaccccttctcacagcccatgtgtgacagtgtatgggcttttctcacgagcagattagatctgcagctcaagtttttggatcttttttttt

SEQ ID NO: 327529 - DNA, 2398 bp, Homo sapiens
gcacgggacaggccgggccacacccaccggggcgagctcggagggcggcgctctgggcggagggcccggcggctcggcccagggcgcgttacctcgtcgccggggccggagagggcgggcggaggcacggggcctggaggcgccaggcggaggatgcgggcgacacggtggcggcggcgaccgcgcgaccgggcgggcgggcgggcaggggcgagcggagggagggagcggactgcggcaggatctgtcgaggaaaaatcttgcggccggcgattccccgccttttaagcgcagcctgcactccccccaccccacgcaggggcgggccttccccaacgcgggcgcccactggccgccgcgcgccgctcccctccagctcgcctgcgcctttcactctccgtcagccgcattgcccgctcggcgtccggcccccgacccgcgctcgtccgcccgcccgcccgcccgcccgcgccatgaacgccaaggtcgtggtcgtgctggtcctcgtgctgaccgcgctctgcctcagcgacgggaagcccgtcagcctgagctacagatgcccatgccgattcttcgaaagccatgttgccagagccaacgtcaagcatctcaaaattctcaacactccaaactgtgcccttcagattgtagcccggctgaagaacaacaacagacaagtgtgcattgacccgaagctaaagtggattcaggagtacctggagaaagctttaaacaagaggttcaagatgtgagagggtcagacgcctgaggaacccttacagtaggagcccagctctgaaaccagtgttagggaagggcctgccacagcctcccctgccagggcagggccccaggcattgccaagggctttgttttgcacactttgccatattttcaccatttgattatgtagcaaaatacatgacatttatttttcatttagtttgattattcagtgtcactggcgacacgtagcagcttagactaaggccattattgtacttgccttattagagtgtctttccacggagccactcctctgactcagggctcctgggttttgtattctctgagctgtgcaggtggggagactgggctgagggagcctggccccatggtcagccctagggtggagagccaccaagagggacgcctgggggtgccaggaccagtcaacctgggcaaagcctagtgaaggcttctctctgtgggatgggatggtggagggccacatgggaggctcacccccttctccatccacatgggagccgggtctgcctcttctgggagggcagcagggctaccctgagctgaggcagcagtgtgaggccagggcagagtgagacccagccctcatcccgagcacctccacatcctccacgttctgctcatcattctctgtctcatccatcatcatgtgtgtccacgactgtctccatggccccgcaaaaggactctcaggaccaaagctttcatgtaaactgtgcaccaagcaggaaatgaaaatgtcttgtgttacctgaaaacactgtgcacatctgtgtcttgtttggaatattgtccattgtccaatcctatgtttttgttcaaagccagcgtcctcctctgtgaccaatgtcttgatgcatgcactgttccccctgtgcagccgctgagcgaggagatgctccttgggccctttgagtgcagtcctgatcagagccgtggtcctttggggtgaactaccttggttcccccactgatcacaaaaacatggtgggtccatgggcagagcccaagggaattcggtgtgcaccagggttgaccccagaggattgctgccccatcagtgctccctcacatgtcagtaccttcaaactagggccaagcccagcactgcttgaggaaaacaagcattcacaacttgtttttggtttttaaaacccagtccacaaaataaccaatcctggacatgaagattctttcccaattcacatctaacctcatcttcttcaccatttggcaatgccatcatctcctgccttcctcctgggccctctctgctctgcgtgtcacctgtgcttcgggcccttcccacaggacatttctctaagagaacaatgtgctatgtgaagagtaagtcaacctgcctgacatttggagtgttccccttccactgagggcagtcgatagagctgtattaagccacttaaaatgttcacttttgacaaaggcaagcacttgtgggtttttgttttgtttttcattcagtcttacgaatacttttgccctttgattaaagactccagttaaaaaaaattttaatgaagaaaaagatatcccagaagaaactgaagaaacaaaaacttatggcacgggagtaaattcagcattaaaataaatgtaattaaaagga

SEQ ID NO: 327530 - DNA, 352 bp, Homo sapiens
gaactccaaatatatgttgactaaccacgcacaagcagatttaattctggccctaagatcatttaaaaaaataataaaacccagttttccagagtgtatttctctcttttggaaaagtttctgctccacatctggaagtgattttctaacaacactaattccaatgagtcatctatgatattaagcaatgattccatagggtgaaccctgatcatatttttccattgactggcagccaccgaggtcaatgaaaggcaaaggcgaacccagacatggagaacctcaccctccacagctccatcttgtattatcaaggacatgggttttaagaagtacaggaatgcaatccatc

SEQ ID NO: 327531 - DNA, 1254 bp, Homo sapiens
gggggtggggtccccggggcggggcggggcgcgctgtgtcgcgggtcggagctcggtcctgctggaggccacgggtgccacacactcggtcccgacatgatggcgagcatgcgagtggtgaaggagctggaggatcttcagaagaagcctcccccatacctgcggaacctgtccagcgatgatgccaatgtcctggtgtggcacgctctcctcctacccgaccaacctccctaccacctgaaagccttcaacctgcgcatcagcttcccgccggagtatccgttcaagcctcccatgatcaaattcacaaccaagatctaccaccccaacgtggacgagaacggacagatttgcctgcccatcatcagcagtgagaactggaagccttgcaccaagacttgccaagtcctggaggccctcaatgtgctggtgaatagaccgaatatcagggagcccctgcggatggacctcgctgacctgctgacacagaatccggagctgttcagaaagaatgccgaagagttcaccctccgattcggagtggaccggccctcctaactcatgttctgaccctctgtgcactggatcctcggcatagcggacggacacacctcatggactgaggccagagccccctgtggcccattccccattcatttttcccttcttaggttgttagtcattagtttgtgtgtgtgtgtggtggagggaagggagctatgagtgtgtgtgttgtgtatggactcactcccaggttcacctggccacaggtgcacccttcccacaccctttacattccccagagccaagggagtttaagtttgcagttacaggccagttctccagctctccatcttagagagacaggtcaccttgcaggcctgcttgcaggaaatgaatccagcagccaactcgaatccccctagggctcaggcactgagggcctggggacagtggagcatatgggtgggagacagatggagggtaccctatttacaactgagtcagccaagccactgatgggaatatacagatttaggtgctaaaccgtttattttccacggatgagtcacaatctgaagaatcaaacttccatcctgaaaatctatatgtttcaaaaccacttgccatcctgttagattgccagttcctgggaccaggcctcagactgtgaagtatatatcctccagcattcagtccagggggagccacggaaaccatgttcttgcttaagccattaaagtcagagatgaa

SEQ ID NO: 327532 - DNA, 1413 bp, Homo sapiens
gggggtggggtccccggggcggggcggggcgcgctgtgtcgcgggtcggagctcggtcctgctggaggccacgggtgccacacactcggtcccgacatgatggcgagcatgcgagtggtgaaggagctggaggatcttcagaagaagcctcccccatacctgcggaacctgtccagcgatgatgccaatgtcctggtgtggcacgctctcctcctacccgaccaacctccctaccacctgaaagccttcaacctgcgcatcagcttcccgccggagtatccgttcaagcctcccatgatcaaattcacaaccaagatctaccaccccaacgtggacgagaacggacagatttgcctgcccatcatcagcagtgagaactggaagccttgcaccaagacttgccaagtcctggaggccctcaatgtgctggtgaatagaccgaatatcagggagcccctgcggatggacctcgctgacctgctgacacagaatccggagctgttcagaaagaatgccgaagagttcaccctccgattcggagtggaccggccctcctaactcatgttctgaccctctgtgcactggatcctcggcatagcggacggacacacctcatggactgaggccagagccccctgtggcccattccccattcatttttcccttcttaggttgttagtcattagtttgtgtgtgtgtgtggtggagggaagggagctatgagtgtgtgtgttgtgtatggactcactcccaggttcacctggccacaggtgcacccttcccacaccctttacattccccagagccaagggagtttaagtttgcagttacaggccagttctccagctctccatcttagagagacaggtcaccttgcaggcctgcttgcaggaaatgaatccagcagccaactcgaatccccctagggctcaggcactgagggcctggggacagtggagcatatgggtgggagacagatggagggtaccctatttacaactgagtcagccaagccactgatgggaatatacagatttaggtgctaaaccgtttattttccacggatgagtcacaatctgaagaatcaaacttccatcctgaaaatctatatgtttcaaaaccacttgccatcctgttagattgccagttcctgggaccaggcctcagactgtgaagtatatatcctccagcattcagtccagggggagccacggaaaccatgttcttgcttaagccattaaagtcagagatgaaacaacaaccaaaaggggggggctaaattccccagggccattaccgcaccgtttttgcacgggcccaaggaaggataaaaggcaggggtaaccggcggaacggtgggttgggggccttcggggaggcccccaaccggaaggattgctcgggggtaaaacg

SEQ ID NO: 327533 - DNA, 1263 bp, Homo sapiens
aagactggaacccgtatgagcgccccccagcgcccctgagcgctcgccgccggtgcacggcgcaccccgcgggaggcagggatcagcaaagccgtgcgccccgaggcccgcccccgtctccgcacaaagaccgagctggaggatcttcagaagaagcctcccccatacctgcggaacctgtccagcgatgatgccaatgtcctggtgtggcacgctctcctcctacccgaccaacctccctaccacctgaaagccttcaacctgcgcatcagcttcccgccggagtatccgttcaagcctcccatgatcaaattcacaaccaagatctaccaccccaacgtggacgagaacggacagatttgcctgcccatcatcagcagtgagaactggaagccttgcaccaagacttgccaagtcctggaggccctcaatgtgctggtgaatagaccgaatatcagggagcccctgcggatggacctcgctgacctgctgacacagaatccggagctgttcagaaagaatgccgaagagttcaccctccgattcggagtggaccggccctcctaactcatgttctgaccctctgtgcactggatcctcggcatagcggacggacacacctcatggactgaggccagagccccctgtggcccattccccattcatttttcccttcttaggttgttagtcattagtttgtgtgtgtgtgtggtggagggaagggagctatgagtgtgtgtgttgtgtatggactcactcccaggttcacctggccacaggtgcacccttcccacaccctttacattccccagagccaagggagtttaagtttgcagttacaggccagttctccagctctccatcttagagagacaggtcaccttgcaggcctgcttgcaggaaatgaatccagcagccaactcgaatccccctagggctcaggcactgagggcctggggacagtggagcatatgggtgggagacagatggagggtaccctatttacaactgagtcagccaagccactgatgggaatatacagatttaggtgctaaaccgtttattttccacggatgagtcacaatctgaagaatcaaacttccatcctgaaaatctatatgtttcaaaaccacttgccatcctgttagattgccagttcctgggaccaggcctcagactgtgaagtatatatcctccagcattcagtccagggggagccacggaaaccatgttcttgcttaagccattaaagtcagagatgaa

SEQ ID NO: 327534 - DNA, 1507 bp, Homo sapiens
gggggtggggtccccggggcggggcggggcgcgctgtgtcgcgggtcggagctcggtcctgctggaggccacgggtgccacacactcggtcccgacatgatggcgagcatgcgagtggtgaaggagctggaggatcttcagaagaagcctcccccatacctgcggaacctgtccagcgatgatgccaatgtcctggtgtggcacgctctcctcctacccgaggcagaggttgcggtgagccgagatcacgccattgcactccagcctgggcagcaaagtgaaactccatctcaaaaaaaaaaaaaaaaagaagcttggcaccagcatctccttctgatgaggccctcaggaagcttccactcatggtggaaggcaaaggggagccacgtgtacagatcacattgcaagagaagaagtgaaagagagagagagcgagcaggtgccaggatcttctaaacaaccagctttttcagaccaacctccctaccacctgaaagccttcaacctgcgcatcagcttcccgccggagtatccgttcaagcctcccatgatcaaattcacaaccaagatctaccaccccaacgtggacgagaacggacagatttgcctgcccatcatcagcagtgagaactggaagccttgcaccaagacttgccaagtcctggaggccctcaatgtgctggtgaatagaccgaatatcagggagcccctgcggatggacctcgctgacctgctgacacagaatccggagctgttcagaaagaatgccgaagagttcaccctccgattcggagtggaccggccctcctaactcatgttctgaccctctgtgcactggatcctcggcatagcggacggacacacctcatggactgaggccagagccccctgtggcccattccccattcatttttcccttcttaggttgttagtcattagtttgtgtgtgtgtgtggtggagggaagggagctatgagtgtgtgtgttgtgtatggactcactcccaggttcacctggccacaggtgcacccttcccacaccctttacattccccagagccaagggagtttaagtttgcagttacaggccagttctccagctctccatcttagagagacaggtcaccttgcaggcctgcttgcaggaaatgaatccagcagccaactcgaatccccctagggctcaggcactgagggcctggggacagtggagcatatgggtgggagacagatggagggtaccctatttacaactgagtcagccaagccactgatgggaatatacagatttaggtgctaaaccgtttattttccacggatgagtcacaatctgaagaatcaaacttccatcctgaaaatctatatgtttcaaaaccacttgccatcctgttagattgccagttcctgggaccaggcctcagactgtgaagtatatatcctccagcattcagtccagggggagccacggaaaccatgttcttgcttaagccattaaagtcagagatgaa

SEQ ID NO: 327535 - DNA, 984 bp, Homo sapiens
atttgatcatctgaggcgtatgaacggtctactccgagtgcggaccgctgatgcgccgttgaaggcttgcaggtcgtctggaggtagctctgactaggagaagaccgtgccacaccaggacattggcatcatcgctggagctggtggaagggaggctggtggaagggagctggtggaagggagcccctgcggatggacctcgctgacctgctgacacagaatccggagctgttcagaaagaatgccgaagagttcaccctccgattcggagtggaccggccctcctaactcatgttctgaccctctgtgcactggatcctcggcatagcggacggacacacctcatggactgaggccagagccccctgtggcccattccccattcatttttcccttcttaggttgttagtcattagtttgtgtgtgtgtgtggtggagggaagggagctatgagtgtgtgtgttgtgtatggactcactcccaggttcacctggccacaggtgcacccttcccacaccctttacattccccagagccaagggagtttaagtttgcagttacaggccagttctccagctctccatcttagagagacaggtcaccttgcaggcctgcttgcaggaaatgaatccagcagccaactcgaatccccctagggctcaggcactgagggcctggggacagtggagcatatgggtgggagacagatggagggtaccctatttacaactgagtcagccaagccactgatgggaatatacagatttaggtgctaaaccgtttattttccacggatgagtcacaatctgaagaatcaaacttccatcctgaaaatctatatgtttcaaaaccacttgccatcctgttagattgccagttcctgggaccaggcctcagactgtgaagtatatatcctccagcattcagtccagggggagccacggaaaccatgttcttgcttaagccattaaagtcagagatgaa

SEQ ID NO: 327536 - DNA, 556 bp, Homo sapiens
aagactggaacccgtatgagcgccccccagcgcccctgagcgctcgccgccggtgcacggcgcaccccgcgggaggcagggatcagcaaagccgtgcgccccgaggcccgcccccgtctccgcacaaagaccgagctggaggatcttcagaagaagcctcccccatacctgcggaacctgtccagcgatgatgccaatgtcctggtgtggcacgctctcctcctacccggctcaggcactgagggcctggggacagtggagcatatgggtgggagacagatggagggtaccctatttacaactgagtcagccaagccactgatgggaatatacagatttaggtgctaaaccgtttattttccacggatgagtcacaatctgaagaatcaaacttccatcctgaaaatctatatgtttcaaaaccacttgccatcctgttagattgccagttcctgggaccaggcctcagactgtgaagtatatatcctccagcattcagtccagggggagccacggaaaccatgttcttgcttaagccattaaagtcagagatgaa

SEQ ID NO: 327537 - DNA, 645 bp, Homo sapiens
gggggtggggtccccggggcggggcggggcgcgctgtgtcgcgggtcggagctcggtcctgctggaggccacgggtgccacacactcggtcccgacatgatggcgagcatgcgagtggtgaaggagctggaggatcttcagaagaagcctcccccatacctgcggaacctgtccagcgatgatgccaatgtcctggtgtggcacgctctcctcctacccgtgagtatccatggggaccatggctttggattggggccaaattaggccagggacatgggcagggagggttaggactaggcaagaattttccctgcttgagatccttttactggaggttatcattgctggagggggcttctctctgaattgattgcttctgagatccagatacttctgaggttcaccttctgataaagatgccaaaggacttttgacttagtaggagaccccttccttaaaccagtagccaccaagcccaccacagaacttcaggagacaaacagcatcaaaaagaagaagaaataaagatttcttggacctttgtcaaggggtagggataaacttccaggctctcacagttgggagaatttgctcccgcaaacctaaattgtattttgtttttctgtagtcttatttcagaaaatt

SEQ ID NO: 327538 - DNA, 271 bp, Homo sapiens
cactaatccatgactcaattgtcaaatgaatgcaggtgctgtgtgtgtcctggctcatgattcctcctgggagtgaagcagaggatgcctaggaccctcggattggggcaggaagggaggaaaaccagactggagcttgaccccttttctctctgcacaggaccaacctccctaccacctgaaagccttcaacctgcgcatcagcttcccgccggagtatccgttcaagcctcccatgatcaaattcacaaccaagatctaccaccccaac

SEQ ID NO: 327539 - DNA, 305 bp, Homo sapiens
agcgggagaaacgttgcagcccgcgccgaacgccgggcagcacaaaggatccccgactgccggggagcggtgctcggagggcacaggtctacgccatcccccacgcagtttcggagatggagcgctgggcccatggagggaaggcggcaggctcggcggctccggcagcttgctggggcaggggctcaaggcggcagtccgatagtggaggccgctgagaactgtcacggagctgcgtctgtacagcgagcatcccttatttattcagggcgagtgtgtatttggggcggcgtgcagggggctga

SEQ ID NO: 327540 - DNA, 1414 bp, Homo sapiens
tcctgcctgaaacttgtgataacaactgggtgcatctccagtgcaggaaaagtccttggcatcttggtgccaggcattctgctactgctggtggtgggttatgaacacagatgaccaggatgaagtccttgccttggaataagcccatagcccatcccataatttgatgcctgtattactagagtcctgagaaacacggaatgctgattagaatttgggacaaagttccctgagtattctctggaggaaaagatgcggaggtggacctggaaggcctcctggagagctggaggatcttcagaagaagcctcccccatacctgcggaacctgtccagcgatgatgccaatgtcctggtgtggcacgctctcctcctacccgaccaacctccctaccacctgaaagccttcaacctgcgcatcagcttcccgccggagtatccgttcaagcctcccatgatcaaattcacaaccaagatctaccaccccaacgtggacgagaacggacagatttgcctgcccatcatcagcagtgagaactggaagccttgcaccaagacttgccaagtcctggaggccctcaatgtgctggtgaatagaccgaatatcagggagcccctgcggatggacctcgctgacctgctgacacagaatccggagctgttcagaaagaatgccgaagagttcaccctccgattcggagtggaccggccctcctaactcatgttctgaccctctgtgcactggatcctcggcatagcggacggacacacctcatggactgaggccagagccccctgtggcccattccccattcatttttcccttcttaggttgttagtcattagtttgtgtgtgtgtgtggtggagggaagggagctatgagtgtgtgtgttgtgtatggactcactcccaggttcacctggccacaggtgcacccttcccacaccctttacattccccagagccaagggagtttaagtttgcagttacaggccagttctccagctctccatcttagagagacaggtcaccttgcaggcctgcttgcaggaaatgaatccagcagccaactcgaatccccctagggctcaggcactgagggcctggggacagtggagcatatgggtgggagacagatggagggtaccctatttacaactgagtcagccaagccactgatgggaatatacagatttaggtgctaaaccgtttattttccacggatgagtcacaatctgaagaatcaaacttccatcctgaaaatctatatgtttcaaaaccacttgccatcctgttagattgccagttcctgggaccaggcctcagactgtgaagtatatatcctccagcattcagtccagggggagccacggaaaccatgttcttgcttaagccattaaagtcagagatgaa

SEQ ID NO: 327541 - DNA, 1237 bp, Homo sapiens
agcgggagaaacgttgcagcccgcgccgaacgccgggcagcacaaaggatccccgactgccggggagcggtgctcggagggcacaggtctacgccatcccccacgcagtttcggagatggagcgctgggcccatggagggaaggcggcaggctgtccagcgatgatgccaatgtcctggtgtggcacgctctcctcctacccgaccaacctccctaccacctgaaagccttcaacctgcgcatcagcttcccgccggagtatccgttcaagcctcccatgatcaaattcacaaccaagatctaccaccccaacgtggacgagaacggacagatttgcctgcccatcatcagcagtgagaactggaagccttgcaccaagacttgccaagtcctggaggccctcaatgtgctggtgaatagaccgaatatcagggagcccctgcggatggacctcgctgacctgctgacacagaatccggagctgttcagaaagaatgccgaagagttcaccctccgattcggagtggaccggccctcctaactcatgttctgaccctctgtgcactggatcctcggcatagcggacggacacacctcatggactgaggccagagccccctgtggcccattccccattcatttttcccttcttaggttgttagtcattagtttgtgtgtgtgtgtggtggagggaagggagctatgagtgtgtgtgttgtgtatggactcactcccaggttcacctggccacaggtgcacccttcccacaccctttacattccccagagccaagggagtttaagtttgcagttacaggccagttctccagctctccatcttagagagacaggtcaccttgcaggcctgcttgcaggaaatgaatccagcagccaactcgaatccccctagggctcaggcactgagggcctggggacagtggagcatatgggtgggagacagatggagggtaccctatttacaactgagtcagccaagccactgatgggaatatacagatttaggtgctaaaccgtttattttccacggatgagtcacaatctgaagaatcaaacttccatcctgaaaatctatatgtttcaaaaccacttgccatcctgttagattgccagttcctgggaccaggcctcagactgtgaagtatatatcctccagcattcagtccagggggagccacggaaaccatgttcttgcttaagccattaaagtcagagatgaa

SEQ ID NO: 327542 - DNA, 637 bp, Homo sapiens
gggggtggggtccccggggcggggcggggcgcgctgtgtcgcgggtcggagctcggtcctgctggaggccacgggtgccacacactcggtcccgacatgatggcgagcatgcgagtggtgaaggagctggaggatcttcagaagaagcctcccccatacctgcggaacctgtccagcgatgatgccaatgtcctggtgtggcacgctctcctcctacccgaccaacctccctaccacctgaaagccttcaacctgcgcatcagcttcccgccggagtatccgttcaagcctcccatgatcaaattcacaaccaagatctaccaccccaacgtggacgagaacggacagatttgcctgcccatcatcagcagtgagaactggaagccttgcaccaagacttgccaagtcctggaggccctcaatgtgctggtgaatagaccgaatatcagggagcccctgcggatggacctcgctgactttaatggcttaagcaagaacatggtttccgtggctccccctggactgaatgctggaggatatatacttcacagtctgaggcctggtcccaggaactggcaatctaacaggatggcaagtggttttgaaacatatagattttcaggatggaagtttgatt

SEQ ID NO: 327543 - DNA, 812 bp, Homo sapiens
aaatatcagaacaatagtttttgatcttgatggaattcaacagagatattcttagtaaatgttcagaggtaaagaaagaatttaatatgaaccatttttggaaaacaacgtccaggtacgtatatgtatataaaccagaaggaaatgaaccaaaatgttaataagggttatttttggcagttttatggtattgtaaactattttaatcttgtttttttttatatgaattatgtgatcagaaaaaaatattaatatttagttaagaggaaagcaaataaattgtgccttggtatttcacatctctgaataaaaatagtctctcaaacctgaacaaatactgtcttggttatcaagaataataatcatttatttttcttttttcccagtgttgcatctgagccaagaaaactttatgaaatgccaaaatgttccaaatcagaaaaaatagaggatgctttattatgggaatgcccagtgggagatatacttcccaattcatcagattataagtcctcactcatagcactgactgctcataattggctacttcgtatatcagcaactacgggaaaaatccttgagaaaatatatcttgcaccttattgcaaattcagatacttgagctgggacactcctcaagaagtcattgcagttaagtcagctcagaacagaggctcagcagtggcccggcaggtatacatatttaaacattcaataaaatgaagactctttttcataggaatttgtctgcagatttgttatgaaaaatctaatgatcttttatttctgaagcatgctgtaaaagataggat

SEQ ID NO: 327544 - DNA, 5354 bp, Homo sapiens
aaaaaaaaaaaaaaaaaaaaaaaaaaaaaaagttcctgggagaagccgggctgcctcacgaggcactaggaactacatttcccggaaagtactaaatttaagaatgtttggacaactcattccaggtcacctatagcctatgagagaggaagaatatattttgacaattatcggcgctgtgtcagcagtgttgcatctgagccaagaaaactttatgaaatgccaaaatgttccaaatcagaaaaaatagaggatgctttattatgggaatgcccagtgggagatatacttcccaattcatcagattataagtcctcactcatagcactgactgctcataattggctacttcgtatatcagcaactacgggaaaaatccttgagaaaatatatcttgcaccttattgcaaattcagatacttgagctgggacactcctcaagaagtcattgcagttaagtcagctcagaacagaggctcagcagtggcccggcaggcaggcattcaacaacatgttttgctgtaccttgcagtgttccgagttctacctttttcacttgtagggattctagagatcaacaaaaagatttttgggaacgttacagatgctaccttgtctcatggaatactgattgtgatgtacagctcaggactggtcagactctatagcttccaaaccatcgctgaacagacatgccaccactgctctttgaggtgtcatccctggagaatgcttttcagattggaggccatccttggcactacatcgtcacacctaataagaagaaacagaaaggagttttccatatttgtgccctaaaagacaattccctggcaaaaaatgggatccaggaaatggattgttgttctctagaatctgactggatctatttccatcctgatgcttctggtagaataatacatgttggtccaaatcaagtcaaagttttgaagctaactgaaatagaaaataatagttctcagcatcagatctctgaagattttgtcattttggccaacagggagaaccataaaaatgaaaatgtactcactgttacagcttctggacgggtggtaaaaaaaagttttaaccttctggatgatgacccagaacaagagactttcaaaattgtggactatgaagatgagttagatttgctttctgtggtagctgttactcaaatagatgctgaaggaaaagctcacctggatttccactgtaatgaatatggaactttacttaaaagcattccactagtggagtcatgggatgtgacatatagccatgaagtctactttgacagagacttggtgctacacatagagcagaaacccaacagagtcttcagctgctatgtttaccagatgatatgtgacactggggaagaagaagaaaccataaacagaagctgttaaaaagagtgagataattgtaacctaagagacttttagccaaacaccccagcagctgcgtccaatccattttattatctgcatggcacattctccagtattttccaaaaaagtcttgtgttgacttcagatgactatgacttcttttttaaactcttgctgtaaaagatggtgaggacttcattttttttaaaggttttttagaatactgttccaagaagtttagtgttttgcagctttgagctaggtggtaatgcaaatataaaatgctgggaacagaaaaggacaggttaattccaattgttgaggagttaagtcattgatggggtgggtcattgatgagttcttaaaggatggtatggaattttgtttgttaaggctaggaaagacagggagagacaaaagtaaacatgcagaaagaaatcttatatcctctataccaaactttgcttaaggatgagaaatgagatgtgttatgtgagaacattattttgagcccaaaatgtgtcatcacagtttttaaaaatcttatatatgtatttatatgtgtttcgtatttgtatatagtatcaagaattggttctagttcccaaattatcttttcttccttggttttgttctcttggcttgatgttcacattgaatatttgtgtttctatataggctaatgtaaaagatgccaagcaaaccttaagtgaaattgttttctgatttgcatcctgtttagctcttaatgtatctaaggatgttctcatctcaccattctactcatttagtgagttttctgatcttgtttaggcaatatttgcatacttatgcaataagataaaggtacccttgcctgcagtagttctgtttcctgtagaaaagtggataaagagtcccagaagaagttcttactagcttgggagttacctgattaaccagagaaaatttttggcttacttatggaacaagcattatttcttctttgttaggaaagatctaaatatggtccttgacttttaataatcattctttagaatgttaaataaaggcaacccaagtaaagggagaaaatgtttctttgtgcttcctgtttgagaaattcagttgcttccatttcgcatgttctgcacatttatccgatgtaacctcaaaagaataactggtaataagggaaggaaacagcagcaacaatcattgctgattcaagtttaaggttaaaatatggaatttttagcttggatgatttatattaaaatctttccattttttttttcagttttggcttgatgccatgttaagaatgatgtgaattcttcccagttctgccctggtgctagacattgccccatactttcaattagacactagctgtatctaaatagtcccactcagtaaacttacatcttgaaaaacaagaccagtaagaggccagtgaaagtactaaagaaagaaaccaatgttgtgtgagtttcaaagcagctgcaatgctgtgtaaaagtagagtgttcattctccatttccaagagtgtttcagaataggatgtcttaagacttcagtcatgtcagagatttttttttttaggtgattattgagtttctccttctcctttaagtcatcaccttccttttatgaaatgatagtaaggaactcgtctattctgaaaggcatttgagaaatagctgaattcctggctgcttttttgctgggggtagatggtggaatacttctggtctagatataacttaccactaagaaacccccagtatgtcaccactgcctaaatctaactagaccagggtccaaatgccatccaggccaggcaggaaatatacctcatgtgaaagacagtaaggagttgtgggcagtgtaacaaacaggagagctatgccccaactaaaaggagcagctgctactgcttagtttcagccagttgcaacagtatgtgggaatgtaggctgcatggttgttaacaagatagatggtaaaaagatgccagaagatacagaagatagcaaagaatgtggggaatttggataccacacatagcgagagacaatgaagcatgcttcccagctcgccagagtgtcacacagctgctcattctgccacctgccagacattaatgtcttcctgccctacctaaaccccctctttacctgatattttaattcgagactctagctacatgcccacctacttaacaggtactagtgacaggtacaaaacattatgggtaacaattctgagtgtttaatgcaagcccaggtgaagcagggtagcttccatcagcaggtacagacgttacgctgaaaagaggtgcattctgcattgcactcctggatctaagtttctgtattctcagagcatcaatgcagcaagcttattgttcctcaattttttacaatatttatcacaactctgggagaaaacaaaacaaatcctatcctatttactatttgtgctacctagtgaggagataccgctctgtttagacaaattaaggcacttcacattcttccaccaattgaaagttttgtatcttacagttctttttttaaataatatatttattgagcactttctatctactagtcactgtgatacagtataagtaaagtgggttgtctcatttaatattcagaataaccacatgaagtatgaactgccattatctttcccctttgtacaaatgaggaaagtgaggctcacagaagttaattggcccagggtcccacaactagtcagtgcagaggtgggaaacataaccagatttgttcggcatgaacttgtgccaaatttcctccaaagttctcaaaaggcaaggcatgttattttatcccaatttagcataccaacaactataatactagatatgtaggaaagtgcttaataatcgttttttactgatgattcagtgtctaaattttgaacaaatttgggtaagatacaagtcacacataaattgacagaaaatgtagttcttcattcaatggttagcagtcattaaaaggtactttccctttgtttgtggtgataatcagtattagtagttttcatattatttggcttccatattaatcatttttatattttcttctccttcttaccatgtttacttatatcatccatcttttagaatcccagggagctaatttctggtccctgtgttgctatcaaatctgtatcttgcagaaagaataatttatttcaaacaagggacatacaatagaaagataagacctactgaggtctttttcccatcattttattatgaaaaatgttcaaacatacagtaaaattgaaagaattttatagtaaatactgaccacggggattctacatcttactctacttgttttattattttcctatccagcgtactttttgatggatttcaaaataaattgcagttgctgatatacttccccctagtacttcaactgcagattattaactagagtttagtatttatttagtttttaaatttttttgatttaagatttacctgcaataaaatgtacaaatcttaagtataaatttactgagttcttgcagacatatacacctgtgtaacccaaaccctttccaaaatttagaccattgcaatcatcttcagaaagtttcctaaatccctctcccagtctatcccctccccacccctcaggtataactactgttctcattcttttatatcaaaggttaaatttacctgttctaaacttcatatgagtgaaattatacaaaatgtaatgcttctttcacttagcataatgtttttgagatttattcatgttgttgcatgtgtcagtgattcatttctttttattgctgagtattctttcgtatgaatatatcacagtttgtttttttatctttctgttgatggacactgggctctttctgcttgttttttactgttatgaataaagctgctatgaacattcttagacaaa

SEQ ID NO: 327545 - DNA, 5310 bp, Homo sapiens
gaggaccaacctgggcatcctgcgggcgctggtgtgccaggaaagtactaaatttaagaatgtttggacaactcattccaggtcacctatagcctatgagagaggaagaatatattttgacaattatcggcgctgtgtcagcagtgttgcatctgagccaagaaaactttatgaaatgccaaaatgttccaaatcagaaaaaatagaggatgctttattatgggaatgcccagtgggagatatacttcccaattcatcagattataagtcctcactcatagcactgactgctcataattggctacttcgtatatcagcaactacgggaaaaatccttgagaaaatatatcttgcaccttattgcaaattcagatacttgagctgggacactcctcaagaagtcattgcagttaagtcagctcagaacagaggctcagcagtggcccggcaggcaggcattcaacaacatgttttgctgtaccttgcagtgttccgagttctacctttttcacttgtagggattctagagatcaacaaaaagatttttgggaacgttacagatgctaccttgtctcatggaatactgattgtgatgtacagctcaggactggtcagactctatagcttccaaaccatcgctgaacagacatgccaccactgctctttgaggtgtcatccctggagaatgcttttcagattggaggccatccttggcactacatcgtcacacctaataagaagaaacagaaaggagttttccatatttgtgccctaaaagacaattccctggcaaaaaatgggatccaggaaatggattgttgttctctagaatctgactggatctatttccatcctgatgcttctggtagaataatacatgttggtccaaatcaagtcaaagttttgaagctaactgaaatagaaaataatagttctcagcatcagatctctgaagattttgtcattttggccaacagggagaaccataaaaatgaaaatgtactcactgttacagcttctggacgggtggtaaaaaaaagttttaaccttctggatgatgacccagaacaagagactttcaaaattgtggactatgaagatgagttagatttgctttctgtggtagctgttactcaaatagatgctgaaggaaaagctcacctggatttccactgtaatgaatatggaactttacttaaaagcattccactagtggagtcatgggatgtgacatatagccatgaagtctactttgacagagacttggtgctacacatagagcagaaacccaacagagtcttcagctgctatgtttaccagatgatatgtgacactggggaagaagaagaaaccataaacagaagctgttaaaaagagtgagataattgtaacctaagagacttttagccaaacaccccagcagctgcgtccaatccattttattatctgcatggcacattctccagtattttccaaaaaagtcttgtgttgacttcagatgactatgacttcttttttaaactcttgctgtaaaagatggtgaggacttcattttttttaaaggttttttagaatactgttccaagaagtttagtgttttgcagctttgagctaggtggtaatgcaaatataaaatgctgggaacagaaaaggacaggttaattccaattgttgaggagttaagtcattgatggggtgggtcattgatgagttcttaaaggatggtatggaattttgtttgttaaggctaggaaagacagggagagacaaaagtaaacatgcagaaagaaatcttatatcctctataccaaactttgcttaaggatgagaaatgagatgtgttatgtgagaacattattttgagcccaaaatgtgtcatcacagtttttaaaaatcttatatatgtatttatatgtgtttcgtatttgtatatagtatcaagaattggttctagttcccaaattatcttttcttccttggttttgttctcttggcttgatgttcacattgaatatttgtgtttctatataggctaatgtaaaagatgccaagcaaaccttaagtgaaattgttttctgatttgcatcctgtttagctcttaatgtatctaaggatgttctcatctcaccattctactcatttagtgagttttctgatcttgtttaggcaatatttgcatacttatgcaataagataaaggtacccttgcctgcagtagttctgtttcctgtagaaaagtggataaagagtcccagaagaagttcttactagcttgggagttacctgattaaccagagaaaatttttggcttacttatggaacaagcattatttcttctttgttaggaaagatctaaatatggtccttgacttttaataatcattctttagaatgttaaataaaggcaacccaagtaaagggagaaaatgtttctttgtgcttcctgtttgagaaattcagttgcttccatttcgcatgttctgcacatttatccgatgtaacctcaaaagaataactggtaataagggaaggaaacagcagcaacaatcattgctgattcaagtttaaggttaaaatatggaatttttagcttggatgatttatattaaaatctttccattttttttttcagttttggcttgatgccatgttaagaatgatgtgaattcttcccagttctgccctggtgctagacattgccccatactttcaattagacactagctgtatctaaatagtcccactcagtaaacttacatcttgaaaaacaagaccagtaagaggccagtgaaagtactaaagaaagaaaccaatgttgtgtgagtttcaaagcagctgcaatgctgtgtaaaagtagagtgttcattctccatttccaagagtgtttcagaataggatgtcttaagacttcagtcatgtcagagatttttttttttaggtgattattgagtttctccttctcctttaagtcatcaccttccttttatgaaatgatagtaaggaactcgtctattctgaaaggcatttgagaaatagctgaattcctggctgcttttttgctgggggtagatggtggaatacttctggtctagatataacttaccactaagaaacccccagtatgtcaccactgcctaaatctaactagaccagggtccaaatgccatccaggccaggcaggaaatatacctcatgtgaaagacagtaaggagttgtgggcagtgtaacaaacaggagagctatgccccaactaaaaggagcagctgctactgcttagtttcagccagttgcaacagtatgtgggaatgtaggctgcatggttgttaacaagatagatggtaaaaagatgccagaagatacagaagatagcaaagaatgtggggaatttggataccacacatagcgagagacaatgaagcatgcttcccagctcgccagagtgtcacacagctgctcattctgccacctgccagacattaatgtcttcctgccctacctaaaccccctctttacctgatattttaattcgagactctagctacatgcccacctacttaacaggtactagtgacaggtacaaaacattatgggtaacaattctgagtgtttaatgcaagcccaggtgaagcagggtagcttccatcagcaggtacagacgttacgctgaaaagaggtgcattctgcattgcactcctggatctaagtttctgtattctcagagcatcaatgcagcaagcttattgttcctcaattttttacaatatttatcacaactctgggagaaaacaaaacaaatcctatcctatttactatttgtgctacctagtgaggagataccgctctgtttagacaaattaaggcacttcacattcttccaccaattgaaagttttgtatcttacagttctttttttaaataatatatttattgagcactttctatctactagtcactgtgatacagtataagtaaagtgggttgtctcatttaatattcagaataaccacatgaagtatgaactgccattatctttcccctttgtacaaatgaggaaagtgaggctcacagaagttaattggcccagggtcccacaactagtcagtgcagaggtgggaaacataaccagatttgttcggcatgaacttgtgccaaatttcctccaaagttctcaaaaggcaaggcatgttattttatcccaatttagcataccaacaactataatactagatatgtaggaaagtgcttaataatcgttttttactgatgattcagtgtctaaattttgaacaaatttgggtaagatacaagtcacacataaattgacagaaaatgtagttcttcattcaatggttagcagtcattaaaaggtactttccctttgtttgtggtgataatcagtattagtagttttcatattatttggcttccatattaatcatttttatattttcttctccttcttaccatgtttacttatatcatccatcttttagaatcccagggagctaatttctggtccctgtgttgctatcaaatctgtatcttgcagaaagaataatttatttcaaacaagggacatacaatagaaagataagacctactgaggtctttttcccatcattttattatgaaaaatgttcaaacatacagtaaaattgaaagaattttatagtaaatactgaccacggggattctacatcttactctacttgttttattattttcctatccagcgtactttttgatggatttcaaaataaattgcagttgctgatatacttccccctagtacttcaactgcagattattaactagagtttagtatttatttagtttttaaatttttttgatttaagatttacctgcaataaaatgtacaaatcttaagtataaatttactgagttcttgcagacatatacacctgtgtaacccaaaccctttccaaaatttagaccattgcaatcatcttcagaaagtttcctaaatccctctcccagtctatcccctccccacccctcaggtataactactgttctcattcttttatatcaaaggttaaatttacctgttctaaacttcatatgagtgaaattatacaaaatgtaatgcttctttcacttagcataatgtttttgagatttattcatgttgttgcatgtgtcagtgattcatttctttttattgctgagtattctttcgtatgaatatatcacagtttgtttttttatctttctgttgatggacactgggctctttctgcttgttttttactgttatgaataaagctgctatgaacattcttagacaaa

SEQ ID NO: 327546 - DNA, 978 bp, Homo sapiens
gcggccgagcctcctgcggggatgcggttttaacgcgctggggcctccctttatagggtcacatgtgatggggaggaggatacaagcccggaatctgggataggtggtaatagggccaccagctgcttttagttttacgcttcttatgtcttacctggaaacaattattctaaaagttggtcacctcattaagccaaaacatgagggcagagtggaggaaggatgcaaaaagttttaaaataatataggaaagtactaaatttaagaatgtttggacaactcattccaggtcacctatagcctatgagagaggaagaatatattttgacaattatcggcgctgtgtcagcagtgttgcatctgagccaagaaaactttatgaaatgccaaaatgttccaaatcagaaaaaatagaggatgctttattatgggaatgcccagtgggagatatacttcccaattcatcagattataagtcctcactcatagcactgactgctcataattggctacttcgtatatcagcaactacgggaaaaatccttgagaaaatatatcttgcaccttattgcaaattcagatacttgagctgggacactcctcaagaagtcattgcagttaagtcagctcagaacagaggctcagcagtggcccggcaggcagaggcattcatcaacctggtttggtggaccttgcagggtccgaaggtactaacgtttctcaccctgtgtacgggaattcctaggaaaatcgaggaaagagcatttttaggggcaacagctcgaggaaggcataccgatggccccacggggacaacccggccggcgaaagaccacggcagagcaaggggcaaaaccataatagagacaaaacaatgagggaacaacgacgggccccagggcacagttagagcgcacacccgggagacacagtagtcagcaaggcacgacaccgtgggcaaagaacgacacacaagtg

SEQ ID NO: 327547 - DNA, 1472 bp, Homo sapiens
ggctgcagacgccctggtcggagcgtctggggccagatgttatagggcaagctaaaaataaccgggcaggccagccaccatcgaggaaggggcatgtgctggacgcggacacatgatccgagggaccctgctgggtggaactaagaaagtccagcagactgtgcacgctcctgtccccactcacaggcccacgcagcgaggggggcccctcttctgtgtgcgtctggaaggtcgctgcccagggaggaaatgcctttaaccggcgtggggccgggcagctgcaggaggcagatcatccgggctctgtgcctcttgctacttctcctccacgccggctctgccaagaatatctggaaacgggcattgcctgcgaggctggccgagaaatcccgtgccgaggaggcgggcgcgcccggcggcccccggcagccccgagcagaccgctgcccgccgcctccgcggacgctgccccccggcgcctgccaggccgcgcgctgtcaggcggactccgagtgcccgcggcaccggcgctgctgctacaacggatgcgcctacgcctgcctagaagctgtgccgcccccgccagtcttagactggctggtgcagccgaaacctcgatggcttggtggcaatggctggctcctggatggccctgaggaggtgttacaagcagaggcgtgcagcaccacggaggatggggccgaacccctgctctgtccctcgggctatgagtgccacatcctgagcccaggtgacgtggccgaaggtatccccaaccgtgggcagtgcgtcaagcagcgccggcaagcagatgggcgaatcctacgacacaaactttacaaagaatatccagaaggtgactcaaagaatgtggcagaacctggaaggggacaacagaagcactttcagtaaagcaacggcaagcagctaggttgcaagaacattcctctactttctgctaagccttggaaacagttgggaaaagtagtttgaccctcacagttcacattcagctcagcagagcaagaccccagagatgcttagagacaggacacctggccatcaaacccagtttggcccagcctggttgggtgactttgtgggagccacttaacagctctgggtccctgttttaccatcctgggagcaaggccctgcagctccacgagacctttaccccgggaagaagccgccgcccatgaaagcatttctgaagcccctttctaagacaaggctcagcatcttgatatttttgacagattcctcccaagtctggctctgggaggtatgtacccatctcaaatgttcccaagataaattcatccttcaggaaatggaaatgaacttgcttactaatgtgtgattcctagttgtagccaccggatgtgctgaggcctaaatgttagcaggtgggaggaggccacagaacaataaaaacaaccaaataaaaaaccgagtctctggtgttttgt

SEQ ID NO: 327548 - DNA, 960 bp, Homo sapiens
agaggctgcagccacccagccccgaagcagggcccagcgagacagggcccagtggggccttattctctctcttgcagccccaagcgtgacccagctgcagagaagctgagacggtgattcggactgactggactctggcctccaggtgtctgcacctcacactggacccacctggagactccacgggctcccggcagctccggctgcttgggtggatccgggtgcccgcaggggctgtgggagggccccggggcctgcactgctcccccgatggcctgctcttcctcacggccggggctgcaccctgtgtccacgtgctagatctggagggacgccccatctgcctcctgccctgccgcactccggggagcggggccttcgttccagaggacgtggctgtgacagcgtcagggcttgtggtggtcagcgatcccatccatggggctgtccatgcactccagcacacagcccgggaccccgggggccactgggtgacagtgggcaccttcctgtctccccgagggctggctgtggatgccctcaaccgcctcctggtgacggactacttgcctggggctgtgcacagcttctcgttgggtcctgcttgggagcccctggccccagcctccatgctgggtctggagggcccctgctgggtgggcccagggcctgatgggggccttgctgtgagtgaggagtttggggatgtgaggctgtttggcagtgcccgccaacccctgggctccctggggggctggacggggcacactttcggctgcccagcgggcatctgctccaactcagagggcaatgttattgtggcagacgagcagaggcgccaggtgaccctgtttccccgggctgggccaccatctgcctggtgtcagaggggcttgggcagcccttgggagtggcctgtgcaccccagggccagctcctggtggctgatgccaaggacaa

SEQ ID NO: 327549 - DNA, 935 bp, Homo sapiens
agaggctgcagccacccagccccgaagcagggcccagcgagacagggcccagccccaagcgtgacccagctgcagagaagctgagacggtgattcggactgactggactctggcctccaggtgtctgcacctcacactggacccacctggagactccacgggctcccggcagctccggctgcttgggtggatccgggtgcccgcaggggctgtgggagggccccggggcctgcactgctcccccgatggcctgctcttcctcacggccggggctgcaccctgtgtccacgtgctagatctggagggacgccccatctgcctcctgccctgccgcactccggggagcggggccttcgttccagaggacgtggctgtgacagcgtcagggcttgtggtggtcagcgatcccatccatggggctgtccatgcactccagcacacagcccgggaccccgggggccactgggtgacagtgggcaccttcctgtctccccgagggctggctgtggatgccctcaaccgcctcctggtgacggactacttgcctggggctgtgcacagcttctcgttgggtcctgcttgggagcccctggccccagcctccatgctgggtctggagggcccctgctgggtgggcccagggcctgatgggggccttgctgtgagtgaggagtttggggatgtgaggctgtttggcagtgcccgccaacccctgggctccctggggggctggacggggcacactttcggctgcccagcgggcatctgctccaactcagagggcaatgttattgtggcagacgagcagaggcgccaggtgaccctgtttccccgggctgggccaccatctgcctggtgtcagaggggcttgggcagcccttgggagtggcctgtgcaccccagggccagctcctggtggctgatgccaaggacaa

SEQ ID NO: 327550 - DNA, 1181 bp, Homo sapiens
aagtccctcagtcccccaggagcctccttcatggacccggggatcccaagaggggctgcctcaacttaggatgggcaactgtgtcaagtatccactgagaaatctctcaaggaagatgtgccaggaggaacagaccagctacatggtggtgcagacgagcgaggaggggctggcggctgacgccgagctcccgggaccgctcctgatgctggcccagaactgcgcagtcatgcacaacctgctgggccctgcctgcattttcctgcgcaagggcttcgctgagaacaggcagcctgatagatcactgcgaccagaggaaattgaagagctccgagaggccttcagagaattcgacaaggacaaggatggctacatcaactgccgggatctgggcaactgcatgcgcaccatgggctacatgcccaccgagatggagctcatcgaactgtcccagcagatcaacatgaacctgggtggccatgtagattttgatgacttcgtggagctaatggggcctaaactcctggcagagacagcagatatgattggtgtaaaggaactgcgagatgctttccgagagtttgacaccaatggtgatggggaaataagcaccagtgagctgcgagaggctatgaggaagctcctgggtcatcaggtgggacaccgagacatagaggaaattatccgagatgtggacctcaatggggatggacgagtggactttgaagagtttgtccggatgatgtcccgctgaggccgcgagggcccctccaggactgccaagctcccaaaggcggggctaagaggagctagagcttgcctcacccgctgtagccgccgagagcccaggatgtactggcggatggggcctgcctgcaccccggggaggcgcccaccccggacccccacccctccgcactgtgaaagactaactcctgcaactggaaagcgggggcgcccgccgacgaggaggccaccgtgccaagccggcagaggtcatgccaggcgccaagggccatgtgcccagctgctgctggctgggtgggccagggagcccgccagcagaccccacacagcatgtccgccccagggcaaagcctcccaccttcgctctgcgcccgtcccagctcgcctcagccctgttatctcagaaccaataaaaatatttccaagagcaaaca

SEQ ID NO: 327551 - DNA, 1856 bp, Homo sapiens
gggtgggtgcctgtagaccaagctgctcaggaggctgaggcaggagaatcacttgaatccgggagtcagaggttgcagtgagccaagatcacgccactgcactccagcctgggcgacagagtgcactagccacacacaaaaaaggagggggcatgtttccactttgccccagtccccacctctcacaccctgcctgcttcgtttatgtcagcaatggcacctgcatgtgcaacctctggtctggcagaccagccaagcctggtctccatgctgccagctccgattgccctcactgccttccagcggggatctggctggggtaggacaagtctgtttgggagctgggaggaatgacttagccctggagattgactgaattgggaggttgggagcatttcgggaaaggatgttgtctcattaggctctgagtgaacacttcccattggtgagaatagaagccccccgctgcccctgtctcttcatgcacttgggtgtgtgattctgtgcatatgtatgtgccagtgcgtgcgtgtgtgtgtgtgtgtgtgcgcatgtgccacacagagggcatcacattcagctctccccggaaccaccatttccgtcaaggattggagactctgtctgttggaccaatttgatgcctgtgcacgctcagggctctctgaaccccgctccttgactctcagggtcccctcttgcggaaagcccctcccgggaccaggagccaggctgggcagggaggtgacaccctggctctcttttgcatttgcttggtgctggtctgaaaatgtgccaggaggaacagaccagctacatggtggtgcagacgagcgaggaggggctggcggctgacgccgagctcccgggaccgctcctgatgctggcccagaactgcgcagtcatgcacaacctgctgggccctgcctgcattttcctgcgcaagggcttcgctgagaacaggcagcctgatagatcactgcgaccagaggaaattgaagagctccgagaggccttcagagaattcgacaaggacaaggatggctacatcaactgccgggatctgggcaactgcatgcgcaccatgggctacatgcccaccgagatggagctcatcgaactgtcccagcagatcaacatgaacctgggtggccatgtagattttgatgacttcgtggagctaatggggcctaaactcctggcagagacagcagatatgattggtgtaaaggaactgcgagatgctttccgagagtttgacaccaatggtgatggggaaataagcaccagtgagctgcgagaggctatgaggaagctcctgggtcatcaggtgggacaccgagacatagaggaaattatccgagatgtggacctcaatggggatggacgagtggactttgaagagtttgtccggatgatgtcccgctgaggccgcgagggcccctccaggactgccaagctcccaaaggcggggctaagaggagctagagcttgcctcacccgctgtagccgccgagagcccaggatgtactggcggatggggcctgcctgcaccccggggaggcgcccaccccggacccccacccctccgcactgtgaaagactaactcctgcaactggaaagcgggggcgcccgccgacgaggaggccaccgtgccaagccggcagaggtcatgccaggcgccaagggccatgtgcccagctgctgctggctgggtgggccagggagcccgccagcagaccccacacagcatgtccgccccagggcaaagcctcccaccttcgctctgcgcccgtcccagctcgcctcagccctgttatctcagaaccaataaaaatatttccaagagcaaaca

SEQ ID NO: 327552 - DNA, 734 bp, Homo sapiens
ggcgctgcaggttagagcctggcaatgccgtttgggtgtgtgactctgggcgacaagaagaactataaccagccatcggaggtgactgacagatatgattggtgtaaaggaactgcgagatgctttccgagagtttgacaccaatggtgatggggaaataagcaccagtgagctgcgagaggctatgaggaagctcctgggtcatcaggtgggacaccgagacatagaggaaattatccgagatgtggacctcaatggggatggacgagtggactttgaagagtttgtccggatgatgtcccgctgaggccgcgagggcccctccaggactgccaagctcccaaaggcggggctaagaggagctagagcttgcctcacccgctgtagccgccgagagcccaggatgtactggcggatggggcctgcctgcaccccggggaggcgcccaccccggacccccacccctccgcactgtgaaagactaactcctgcaactggaaagcgggggcgcccgccgacgaggaggccaccgtgccaagccggcagaggtcatgccaggcgccaagggccatgtgcccagctgctgctggctgggtgggccagggagcccgccagcagaccccacacagcatgtccgccccagggcaaagcctcccaccttcgctctgcgcccgtcccagctcgcctcagccctgttatctcagaaccaataaaaatatttccaagagcaaaca

SEQ ID NO: 327553 - DNA, 806 bp, Homo sapiens
gtgttccatgtttcttcgtgtgtcatcacccttcatgggctacatgcccaccgagatggagctcatcgaactgtcccagcagatcaacatgaacctgggtggccatgtagattttgatgacttcgtggagctaatggggcctaaactcctggcagagacagcagatatgattggtgtaaaggaactgcgagatgctttccgagagtttgacaccaatggtgatggggaaataagcaccagtgagctgcgagaggctatgaggaagctcctgggtcatcaggtgggacaccgagacatagaggaaattatccgagatgtggacctcaatggggatggacgagtggactttgaagagtttgtccggatgatgtcccgctgaggccgcgagggcccctccaggactgccaagctcccaaaggcggggctaagaggagctagagcttgcctcacccgctgtagccgccgagagcccaggatgtactggcggatggggcctgcctgcaccccggggaggcgcccaccccggacccccacccctccgcactgtgaaagactaactcctgcaactggaaagcgggggcgcccgccgacgaggaggccaccgtgccaagccggcagaggtcatgccaggcgccaagggccatgtgcccagctgctgctggctgggtgggccagggagcccgccagcagaccccacacagcatgtccgccccagggcaaagcctcccaccttcgctctgcgcccgtcccagctcgcctcagccctgttatctcagaaccaataaaaatatttccaagagcaaaca

SEQ ID NO: 327554 - DNA, 223 bp, Homo sapiens
ggtgactctacaggatcttaccgactagccggcagaggtcatgccaggcgccaagggccatgtgcccagctgctgctggctgggtgggccagggagcccgccagcagaccccacacagcatgtccgccccagggcaaagcctcccaccttcgctctgcgcccgtcccagctcgcctcagccctgttatctcagaaccaataaaaatatttccaagagcaaaca

SEQ ID NO: 327555 - DNA, 386 bp, Homo sapiens
cctgctgccacgtggatggcccccaggttagatattttgtgacttccaggtcccttgtcgcggctaataggacatgttcttttgtttcaggatagatcactgcgaccagaggaaattgaaggtaaaacttggccccttgggggaaaggactgcctagccctctaggaaggtgtgggaagggaggttgatgggaagagaggcccctggaaatggggcctggtgcaacgcggggtatcttctgtgaaaccagctgctgaaggtgtgcacaggaggcaagagaaatgccccagcatcctgggaagctcctgggcctctctttccatgccggtgggcctttgggctgcctttgcccacagaggctctgcgggtcctacccctgaccacat

SEQ ID NO: 327556 - DNA, 1001 bp, Homo sapiens
aagtccctcagtcccccaggagcctccttcatggacccggggatcccaagaggggctgcctcaacttaggatgggcaactgtgtcaagtatccactgagaaatctctcaaggaaggatagatcactgcgaccagaggaaattgaagagctccgagaggccttcagagaattcgacaaggacaaggatggctacatcaactgccgggatctgggcaactgcatgcgcaccatgggctacatgcccaccgagatggagctcatcgaactgtcccagcagatcaacatgaacctgggtggccatgtagattttgatgacttcgtggagctaatggggcctaaactcctggcagagacagcagatatgattggtgtaaaggaactgcgagatgctttccgagagtttgacaccaatggtgatggggaaataagcaccagtgagctgcgagaggctatgaggaagctcctgggtcatcaggtgggacaccgagacatagaggaaattatccgagatgtggacctcaatggggatggacgagtggactttgaagagtttgtccggatgatgtcccgctgaggccgcgagggcccctccaggactgccaagctcccaaaggcggggctaagaggagctagagcttgcctcacccgctgtagccgccgagagcccaggatgtactggcggatggggcctgcctgcaccccggggaggcgcccaccccggacccccacccctccgcactgtgaaagactaactcctgcaactggaaagcgggggcgcccgccgacgaggaggccaccgtgccaagccggcagaggtcatgccaggcgccaagggccatgtgcccagctgctgctggctgggtgggccagggagcccgccagcagaccccacacagcatgtccgccccagggcaaagcctcccaccttcgctctgcgcccgtcccagctcgcctcagccctgttatctcagaaccaataaaaatatttccaagagcaaaca

SEQ ID NO: 327557 - DNA, 1220 bp, Homo sapiens
agcggagcgcgtcctcgggcttggctcccgccgggagccccgttctctgcccgccgggggccccgcgccgcgccgcaccgcgccgcccccgccgggccatgcgagcgcgggccccgccgcgatgagctcgcacatcgccaaaagcgagtccaagtcgtcgccgctgccgccggcccgcgggcgggatggggaggaacggggactgtccccggcgctcggcctccggggctctctgcgagcccggggccgcggggactccgttccagccgccgcgtccgaggcggacccgttcctccaccggctgcgccccatgctcagctccgcctttggccaggatagatcactgcgaccagaggaaattgaagagctccgagaggccttcagagaattcgacaaggacaaggatggctacatcaactgccgggatctgggcaactgcatgcgcaccatgggctacatgcccaccgagatggagctcatcgaactgtcccagcagatcaacatgaacctgggtggccatgtagattttgatgacttcgtggagctaatggggcctaaactcctggcagagacagcagatatgattggtgtaaaggaactgcgagatgctttccgagagtttgacaccaatggtgatggggaaataagcaccagtgagctgcgagaggctatgaggaagctcctgggtcatcaggtgggacaccgagacatagaggaaattatccgagatgtggacctcaatggggatggacgagtggactttgaagagtttgtccggatgatgtcccgctgaggccgcgagggcccctccaggactgccaagctcccaaaggcggggctaagaggagctagagcttgcctcacccgctgtagccgccgagagcccaggatgtactggcggatggggcctgcctgcaccccggggaggcgcccaccccggacccccacccctccgcactgtgaaagactaactcctgcaactggaaagcgggggcgcccgccgacgaggaggccaccgtgccaagccggcagaggtcatgccaggcgccaagggccatgtgcccagctgctgctggctgggtgggccagggagcccgccagcagaccccacacagcatgtccgccccagggcaaagcctcccaccttcgctctgcgcccgtcccagctcgcctcagccctgttatctcagaaccaataaaaatatttccaagagcaaaca

SEQ ID NO: 327558 - DNA, 1293 bp, Homo sapiens
tgttctctgactcattctttttttgttttttttttttgagacaggtctcactctgttgtccaggttgacagagtgcaatggcaccatcatagctccttacagcctcaaactcctgctgacccattcttgtatctggaacaaggggctggaggcacagaggttctgtgcccaggctggtggggctggtggcttcttgggcatctcctgttaggggcccaggagcttctatgtctaagggagatgtggggctttcttctcccctcaaggacctgatccaggcacacctgtgctgcatcctcgtcacctcctacccagtgcctgctgccacgtggatggcccccaggttagatattttgtgacttccaggtcccttgtcgcggctaataggacatgttcttttgtttcaggatagatcactgcgaccagaggaaattgaagagctccgagaggccttcagagaattcgacaaggacaaggatggctacatcaactgccgggatctgggcaactgcatgcgcaccatgggctacatgcccaccgagatggagctcatcgaactgtcccagcagatcaacatgaacctgggtggccatgtagattttgatgacttcgtggagctaatggggcctaaactcctggcagagacagcagatatgattggtgtaaaggaactgcgagatgctttccgagagtttgacaccaatggtgatggggaaataagcaccagtgagctgcgagaggctatgaggaagctcctgggtcatcaggtgggacaccgagacatagaggaaattatccgagatgtggacctcaatggggatggacgagtggactttgaagagtttgtccggatgatgtcccgctgaggccgcgagggcccctccaggactgccaagctcccaaaggcggggctaagaggagctagagcttgcctcacccgctgtagccgccgagagcccaggatgtactggcggatggggcctgcctgcaccccggggaggcgcccaccccggacccccacccctccgcactgtgaaagactaactcctgcaactggaaagcgggggcgcccgccgacgaggaggccaccgtgccaagccggcagaggtcatgccaggcgccaagggccatgtgcccagctgctgctggctgggtgggccagggagcccgccagcagaccccacacagcatgtccgccccagggcaaagcctcccaccttcgctctgcgcccgtcccagctcgcctcagccctgttatctcagaaccaataaaaatatttccaagagcaaaca

SEQ ID NO: 327559 - DNA, 3301 bp, Homo sapiens
ttctattccggcacctcccttaggcgccagggacagccgagcgttacctggtcccgggcagcggagttctttacccaccccagttctggttctgacgccctagctcattccgcaaatttagggcttgggtctggcttgttcccctccggctcgaaccacctcttctctgagccgagccagctaccggggctcctggaattgccacccctccctgggcacccttgaggcctccgtggagggacgtcacggggcagagcgggacgtgagcctgagtttgctgcaggcgtgctctgtgtggtggctgggttctgccaatccccgtgcccaccgggtgggcgcggccgggaagctcctgcccctccctgctggtcggcgtcacgcgtgacgtcccgcgtgatggctgggagggcccggcggcgacagcggaggcagagaggaaggcggttctgagagcttcagagagcgatggaaagcaaaatgggtgaattgcctttagacatcaacatccaggaacctcgctgggaccaaagtactttcctgggcagagcccggcactttttcactgttactgatcctcgaaatctgctgctgtccggggcacagctggaagcttctcggaacatcgtgcagaactacagggccggcgtggtgaccccagggatcaccgaggaccagctgtggagggccaagtatgtgtatgactccgccttccatccggacacaggggagaaggtggtcctgattggccgcatgtcagcccaggtgcccatgaacatgaccatcactggctgcatgctcacattctacaggaagaccccaaccgtggtgttctggcagtgggtgaatcagtccttcaatgccattgttaactactccaaccgcagtggtgacactcccatcactgtgaggcagctggggacagcctatgtgagtgccaccactggagctgtggccacggccctgggactcaaatccctcaccaagcacctgccccccttggtcggcagatttgtgccctttgcagcagtggcagctgccaactgcatcaacatccccctgatgaggcagagagagctgcaggtgggcatcccggtggctgatgaggcaggtcagaggcttggctactcggtgactgcagccaagcagggaatcttccaggtggtgatttcaagaatctgcatggcgattcctgccatggccatcccaccactgatcatggacactctggagaagaaagacttcctgaagcgccgcccctggctgggggcacccctgcaggtgggactggtgggcttctgcctggtatttgcaacccccctgtgctgtgccctattcccccagaagagctccatacacataagcaacctggaaccagagctgagagctcagatccatgagcaaaaccccagcgttgaagtggtctactacaacaaggggctttgaggagggtcagcctctgtcccctccctcacttccttgggctgctgctttagtggagtcatgtcacccctaccacttggctatctgcctagcactgggcaggggccttggtgggcagatggcaattgagggtagcaacctattagggtgggggagggacctccataaggcttttcctcccttctctggtttcaaagatcagagcacataacccctcctgtgcttgagtgtccatgcatatacatacatgatacacatgtgtatgtgtacattgggtcctgaaagctagaagcaggcatgctagcctagtatgttctgacatctggcttcccttctcagcctcatgtccacctgcctgccagccaggctacaggtgtgacttccttctctaaactgttacaccagccaagttatttttgatggcacctcatcccttctagaaataggaggagccccaggatctcaggacagagacttatagacactagtaggacaaagcgggctgaatccttcaggtttctgatacctagctccccaagctgactgggctggcagaggagaacatgttgagacaagggaggcaggggacttatgcatccctcagtgccatcccttgtatcctggaatagctccatttcccctcctcctctctaccagacaaaggagtgcctgtgtcctgtactgccctcgctgtctcccccaccaccctacttgacagcgtgggcatcttcaggcacagccttgggagttcctggtgtgctctgacatcatgacctcaaatctaaatcctccaatcccaactccctttcccaaacaaaaagccacagaggcagagcaagcattcccctttaagagcttccactgcaccccctcccaagggacacagcggtaggaatggtgcttaaactccacaggtatcagagagggtgtaactaggacatcctcaagggcagctaggccccgaatgtacaatgttaagacagggaattttgtgttccattgacttttttttttttttttaatggagtttcactattttgcccaggctggagtgcgatggtgcgatcttggctcactgcaacctctgcctcctgggttcaagtgattctcttgcctcagtctcccgagtagtggaaattacaggtgtgtgctaccacatcttgctagttttgtatttttagcagagatgggggtttcaccatgttggccaggctagtctcgaactcctgacctcaggtgatccacctgccttggcctcccaaagcactgggattacaagcatgagccactgtgcccagcctgttccactgacatttcttagacattcagcaaaacccccaccttaacctcttttctttcttgagggttggtcctgtccccacctccaccctcccaccccctggaagaggaagggcccgggcatcagtggctagtccaaataaaatatgggcttggggatggaatgggtggtggtaagttcacagagtgtagttagatcccaactcccatgacctctggcttcagtggtgggtggggcagggcagatgaaagggcttcagtgggaacctctgagagcattttcctgttccccctatcaaccgcccccagtgataacatctgtgaagccagccattactcaataaactgcaaacttgtctaaaaaaaaaaaataatgtgaacaaacagataaataacaaccgtaccacagtacaacatcctcggcgccgctcattcgcgcgggcgagaacaggcaggctcttagacgggcgccgtggactatcatttctctgcccccttttttttcaccatgtgtaaaccccgcgcgccccaatagggccgaaattcagaagcgggtcccgta

SEQ ID NO: 327560 - DNA, 3295 bp, Homo sapiens
ttctattccggcacctcccttaggcgccagggacagccgagcgttacctggtcccgggcagcggagttctttacccaccccagttctggttctgacgccctagctcattccgcaaatttagggcttgggtctggcttgttcccctccggctcgaaccacctcttctctgagccgagccagctaccggggctcctggaattgccacccctccctgggcacccttgaggcctccgtggagggacgtcacggggcagagcgggacgtgagcctgagtttgctgcaggcgtgctctgtgtggtggctgggttctgccaatccccgtgcccaccgggtgggcgcggccgggaagctcctgcccctccctgctggtcggcgtcacgcgtgacgtcccgcgtgatggctgggagggcccggcggcgacagcggaggcagagaggaaggcggttctgagagcttcagagagcgatggaaagcaaaatgggtgaattgcctttagacatcaacatccaggaacctcgctgggaccaaagtactttcctgggcagagcccggcactttttcactgttactgatcctcgaaatctgctgctgtccggggcacagctggaagcttctcggaacatcgtgcagaactacagggccggcgtggtgaccccagggatcaccgaggaccagctgtggagggccaagtatgtgtatgactccgccttccatccggacacaggggagaaggtggtcctgattggccgcatgtcagcccaggtgcccatgaacatgaccatcactggctgcatgctcacattctacaggaagaccccaaccgtggtgttctggcagtgggtgaatcagtccttcaatgccattgttaactactccaaccgcagtggtgacactcccatcactgtgaggcagctggggacagcctatgtgagtgccaccactggagctgtggccacggccctgggactcaaatccctcaccaagcacctgccccccttggtcggcagatttgtgccctttgcagcagtggcagctgccaactgcatcaacatccccctgatgaggcagagagagctgcaggtgggcatcccggtggctgatgaggcaggtcagaggcttggctactcggtgactgcagccaagcagggaatcttccaggtggtgatttcaagaatctgcatggcgattcctgccatggccatcccaccactgatcatggacactctggagaagaaagacttcctgaagcgccgcccctggctgggggcacccctgcaggtgggactggtgggcttctgcctggtatttgcaacccccctgtgctgtgccctattcccccagaagagctccatacacataagcaacctggaaccagagctgagagctcagatccatgagcaaaaccccagcgttgaagtggtctactacaacaaggggctttgaggagggtcagcctctgtcccctccctcacttccttgggctgctgctttagtggagtcatgtcacccctaccacttggctatctgcctagcactgggcaggggccttggtgggcagatggcaattgagggtagcaacctattagggtgggggagggacctccataaggcttttcctcccttctctggtttcaaagatcagagcacataacccctcctgtgcttgagtgtccatgcatatacatacatgatacacatgtgtatgtgtacattgggtcctgaaagctagaagcaggcatgctagcctagtatgttctgacatctggcttcccttctcagcctcatgtccacctgcctgccagccaggctacaggtgtgacttccttctctaaactgttacaccagccaagttatttttgatggcacctcatcccttctagaaataggaggagccccaggatctcaggacagagacttatagacactagtaggacaaagcgggctgaatccttcaggtttctgatacctagctccccaagctgactgggctggcagaggagaacatgttgagacaagggaggcaggggacttatgcatccctcagtgccatcccttgtatcctggaatagctccatttcccctcctcctctctaccagacaaaggagtgcctgtgtcctgtactgccctcgctgtctcccccaccaccctacttgacagcgtgggcatcttcaggcacagccttgggagttcctggtgtgctctgacatcatgacctcaaatctaaatcctccaatcccaactccctttcccaaacaaaaagccacagaggcagagcaagcattcccctttaagagcttccactgcaccccctcccaagggacacagcggtaggaatggtgcttaaactccacaggtatcagagagggtgtaactaggacatcctcaagggcagctaggccccgaatgtacaatgttaagacagggaattttgtgttccattgacttttttttttttttttaatggagtttcactattttgcccaggctggagtgcgatggtgcgatcttggctcactgcaacctctgcctcctgggttcaagtgattctcttgcctcagtctcccgagtagtggaaattacaggtgtgtgctaccacatcttgctagttttgtatttttagcagagatgggggtttcaccatgttggccaggctagtctcgaactcctgacctcaggtgatccacctgccttggcctcccaaagcactgggattacaagcatgagccactgtgcccagcctgttccactgacatttcttagacattcagcaaaacccccaccttaacctcttttctttcttgagggttggtcctgtccccacctccaccctcccaccccctggaagaggaagggcccgggcatcagtggctagtccaaataaaatatgggcttggggatggaatgggtggtggtaagttcacagagtgtagttagatcccaactcccatgacctctggcttcagtggtgggtggggcagggcagatgaaagggcttcagtgggaacctctgagagcattttcctgttccccctatcaaccgcccccagtgataacatctgtgaagccagccattactcaataaactgcaaacttgtctacttcttggtcttcacttgattccacgtcctgagggcccagaaagagtcccctgcttgcagccttccgtctctccctggactctccccaagtccaggtcttgtctcattcctccccctgtgtagggagcctcatgccccagcagagggagctctgagattagaaaatcagtcctccctatagccaccccaaagtatg

SEQ ID NO: 327561 - DNA, 2499 bp, Homo sapiens
ggaaggcggttctgagagcttcagagagcgatggaaagcaaaatgtgtgaattgcctttagacatcaacatccccctgatgagcgcagagagagctgcaggtgggcatcccggtggctgacgaggaccagctgtggagggccaagtatgtgtatgactccgccttccatccggacacaggggagaaggtggtcctgattggccgcatgtcagcccaggtgcccatgaacatgaccatcactggctgcatgctcacattctacaggaagaccccaaccgtggtgttctggcagtgggtgaatcagtccttcaatgccattgttaactactccaaccgcagtggtgacactcccatcactgtgaggcagctggggacagcctatgtgagtgccaccactggagctgtggccacggccctgggactcaaatccctcaccaagcacctgccccccttggtcggcagatttgtgccctttgcagcagtggcagctgccaactgcatcaacatccccctgatgaggcagagtcggtgactgcagccaagcagggaatcttccaggtggtgatttcaagaatctgcatggcgattcctgccatggccatcccaccactgatcatggacactctggagaagaaagacttcctgaagcgccgcccctggctgggggcacccctgcaggtgggactggtgggcttctgcctggtatttgcaacccccctgtgctgtgccctattcccccagaagagctccatacacataagcaacctggaaccagagctgagagctcagatccatgagcaaaaccccagcgttgaagtggtctactacaacaaggggctttgaggagggtcagcctctgtcccctccctcacttccttgggctgctgctttagtggagtcatgtcacccctaccacttggctatctgcctagcactgggcaggggccttggtgggcagatggcaattgagggtagcaacctattagggtgggggagggacctccataaggcttttcctcccttctctggtttcaaagatcagagcacataacccctcctgtgcttgagtgtccatgcatatacatacatgatacacatgtgtatgtgtacattgggtcctgaaagctagaagcaggcatgctagcctagtatgttctgacatctggcttcccttctcagcctcatgtccacctgcctgccagccaggctacaggtgtgacttccttctctaaactgttacaccagccaagttatttttgatggcacctcatcccttctagaaataggaggagccccaggatctcaggacagagacttatagacactagtaggacaaagcgggctgaatccttcaggtttctgatacctagctccccaagctgactgggctggcagaggagaacatgttgagacaagggaggcaggggacttatgcatccctcagtgccatcccttgtatcctggaatagctccatttcccctcctcctctctaccagacaaaggagtgcctgtgtcctgtactgccctcgctgtctcccccaccaccctacttgacagcgtgggcatcttcaggcacagccttgggagttcctggtgtgctctgacatcatgacctcaaatctaaatcctccaatcccaactccctttcccaaacaaaaagccacagaggcagagcaagcattcccctttaagagcttccactgcaccccctcccaagggacacagcggtaggaatggtgcttaaactccacaggtatcagagagggtgtaactaggacatcctcaagggcagctaggccccgaatgtacaatgttaagacagggaattttgtgttccattgacttttttttttttttttaatggagtttcactattttgcccaggctggagtgcgatggtgcgatcttggctcactgcaacctctgcctcctgggttcaagtgattctcttgcctcagtctcccgagtagtggaaattacaggtgtgtgctaccacatcttgctagttttgtatttttagcagagatgggggtttcaccatgttggccaggctagtctcgaactcctgacctcaggtgatccacctgccttggcctcccaaagcactgggattacaagcatgagccactgtgcccagcctgttccactgacatttcttagacattcagcaaaacccccaccttaacctcttttctttcttgagggttggtcctgtccccacctccaccctcccaccccctggaagaggaagggcccgggcatcagtggctagtccaaataaaatatgggcttggggatggaatgggtggtggtaagttcacagagtgtagttagatcccaactcccatgacctctggcttcagtggtgggtggggcagggcagatgaaagggcttcagtgggaacctctgagagcattttcctgttccccctatcaaccgcccccagtgataacatctgtgaagccagccattactcaataaactgcaaacttgtcta

SEQ ID NO: 327562 - DNA, 1289 bp, Homo sapiens
cgtaaaattctagatggcagaagcaggaagaccagccaagttatttttgatggcacctcatcccttctagaaataggaggagccccaggatctcaggacagagacttatagacactagtaggacaaagcgggctgaatccttcaggtttctgatacctagctccccaagctgactgggctggcagaggagaacatgttgagacaagggaggcaggggacttatgcatccctcagtgccatcccttgtatcctggaatagctccatttcccctcctcctctctaccagacaaaggagtgcctgtgtcctgtactgccctcgctgtctcccccaccaccctacttgacagcgtgggcatcttcaggcacagccttgggagttcctggtgtgctctgacatcatgacctcaaatctaaatcctccaatcccaactccctttcccaaacaaaaagccacagaggcagagcaagcattcccctttaagagcttccactgcaccccctcccaagggacacagcggtaggaatggtgcttaaactccacaggtatcagagagggtgtaactaggacatcctcaagggcagctaggccccgaatgtacaatgttaagacagggaattttgtgttccattgacttttttttttttttttaatggagtttcactattttgcccaggctggagtgcgatggtgcgatcttggctcactgcaacctctgcctcctgggttcaagtgattctcttgcctcagtctcccgagtagtggaaattacaggtgtgtgctaccacatcttgctagttttgtatttttagcagagatgggggtttcaccatgttggccaggctagtctcgaactcctgacctcaggtgatccacctgccttggcctcccaaagcactgggattacaagcatgagccactgtgcccagcctgttccactgacatttcttagacattcagcaaaacccccaccttaacctcttttctttcttgagggttggtcctgtccccacctccaccctcccaccccctggaagaggaagggcccgggcatcagtggctagtccaaataaaatatgggcttggggatggaatgggtggtggtaagttcacagagtgtagttagatcccaactcccatgacctctggcttcagtggtgggtggggcagggcagatgaaagggcttcagtgggaacctctgagagcattttcctgttccccctatcaaccgcccccagtgataacatctgtgaagccagccattactcaataaactgcaaacttgtcta

SEQ ID NO: 327563 - DNA, 1027 bp, Homo sapiens
ctgtatatcgtgtctagctgccctgaggatgctagttacaccctctctgatacctgtggacgtttaagcaccagcctacttgacagcgtgggcatcttcaggcacagccttgggagttcctggtgtgctctgacatcatgacctcaaatctaaatcctccaatcccaactccctttcccaaacaaaaagccacagaggcagagcaagcattcccctttaagagcttccactgcaccccctcccaagggacacagcggtaggaatggtgcttaaactccacaggtatcagagagggtgtaactaggacatcctcaagggcagctaggccccgaatgtacaatgttaagacagggaattttgtgttccattgacttttttttttttttttaatggagtttcactattttgcccaggctggagtgcgatggtgcgatcttggctcactgcaacctctgcctcctgggttcaagtgattctcttgcctcagtctcccgagtagtggaaattacaggtgtgtgctaccacatcttgctagttttgtatttttagcagagatgggggtttcaccatgttggccaggctagtctcgaactcctgacctcaggtgatccacctgccttggcctcccaaagcactgggattacaagcatgagccactgtgcccagcctgttccactgacatttcttagacattcagcaaaacccccaccttaacctcttttctttcttgagggttggtcctgtccccacctccaccctcccaccccctggaagaggaagggcccgggcatcagtggctagtccaaataaaatatgggcttggggatggaatgggtggtggtaagttcacagagtgtagttagatcccaactcccatgacctctggcttcagtggtgggtggggcagggcagatgaaagggcttcagtgggaacctctgagagcattttcctgttccccctatcaaccgcccccagtgataacatctgtgaagccagccattactcaataaactgcaaacttgtcta

SEQ ID NO: 327564 - DNA, 2247 bp, Homo sapiens
ttctattccggcacctcccttaggcgccagggacagccgagcgttacctggtcccgggcagcggagttctttacccaccccagttctggttctgacgccctagctcattccgcaaatttagggcttgggtctggcttgttcccctccggctcgaaccacctcttctctgagccgagccagctaccggggctcctggaattgccacccctccctgggcacccttgaggcctccgtggagggacgtcacggggcagagcgggacgtgagcctgagtttgctgcaggcgtgctctgtgtggtggctgggttctgccaatccccgtgcccaccgggtgggcgcggccgggaagctcctgcccctccctgctggtcggcgtcacgcgtgacgtcccgcgtgatggctgggagggcccggcggcgacagcggaggcagagaggaaggcggttctgagagcttcagagagcgatggaaagcaaaatgggtgaattgcctttagacatcaacatccaggaacctcgctgggaccaaagtactttcctgggcagagcccggcactttttcactgttactgatcctcgaaatctgctgctgtccggggcacagctggaagcttctcggaacatcgtgcagaactacagggccggcgtggtgaccccagggatcaccgaggaccagctgtggagggccaagtatgtgtatgactccgccttccatccggacacaggggagaaggtggtcctgattggccgcatgtcagcccaggtgcccatgaacatgaccatcactggctgcatgctcacattctacaggaagaccccaaccgtggtgttctggcagtgggtgaatcagtccttcaatgccattgttaactactccaaccgcagtggtgacactcccatcactgtgaggcagctggggacagcctatgtgagtgccaccactggagctgtggccacggccctgggactcaaatccctcaccaagcacctgccccccttggtcggcagatttgtgccctttgcagcagtggcagctgccaactgcatcaacatccccctgatgaggcagagagagctgcaggtgggcatcccggtggctgatgaggcaggtcagaggcttggctactcggtgactgcagccaagcagggaatcttccaggtggtgatttcaagaatctgcatggcgattcctgccatggccatcccaccactgatcatggacactctggagaagaaagacttcctgaaggtaggcgactgtacctctcttgtcctggaatgggcgatggctgggagaagtgaccaggccccaactctctctccagcctcgcctgattctctaagacttgccagcccttctcctgacccctgcaccgcctcctccaccttcgttcattcagcaagaatgaactgggctggggtgaaggaactctgcaggggcaggaggagaggacaaaggaaggaaaccaacttcatcagtgttactccagtggcttctgacacacagaaggggactgtcatagtcatgcttgatctcatgctcattcttttaccccctagtgcctccatactgagaggtacacacgggtgaacacgcacacacagacatgaacaggacacgaaagcaaagcacaggaacaagctctggctcattcacagaatcatttattcacaaatgtattgagtgccatgcaccaggcatgttttagggctgaggagatggcactgaacacaatggttatggcccctgtcctcatgaagtttatagtctgatgcagaaaccaataaacaaggaggcacccaataaatacattcttagaaagtgtaatatgtgctttgtaggaaagcaatgggggtagtgtaattgagattcatgggggagagctgtttagataggatgatcagagaaggggtctttaatgccgcaaaggatgaggagagagccaaataacgcagagaagagtgtttggggtacagaaaacagtcagtgcaagggcactgcagtaggaggggcttgcacatttgaggaacaggttggtggtccctgtggccagagcaaattgagaagagtgccgaggaagagatgtgcttggaaagggtcagattcatgccactgggatgggaagagggtaagtggaggttcacaggaggtttcctgaagaaatcagctcctggaggaagtgagggaagaaaaaaaagggccagggagtgccatggcaaccaattctgagaggtgagaggtcatggg

SEQ ID NO: 327565 - DNA, 1017 bp, Homo sapiens
ttctattccggcacctcccttaggcgccagggacagccgagcgttacctggtcccgggcagcggagttctttacccaccccagttctggttctgacgccctagctcattccgcaaatttagggcttgggtctggcttgttcccctccggctcgaaccacctcttctctgagccgagccagctaccggggctcctggaattgccacccctccctgggcacccttgaggcctccgtggagggacgtcacggggcagagcgggacgtgagcctgagtttgctgcaggcgtgctctgtgtggtggctgggttctgccaatccccgtgcccaccgggtgggcgcggccgggaagctcctgcccctccctgctggtcggcgtcacgcgtgacgtcccgcgtgatggctgggagggcccggcggcgacagcggaggcagagaggaaggcggttctgagagcttcagagagcgatggaaagcaaaatgggtgaattgcctttagacatcaacatccaggaacctcgctgggaccaaagtactttcctgggcagagcccggcactttttcactgttactgatcctcgaaatctgctgctgtccggggcacagctggaagcttctcggaacatcgtgcagaactacagggccggcgtggtgaccccagggatcaccgaggaccagctgtggagggccaagtatgtgtatgactccgccttccatccggacacaggggagaaggtggtcctgattggccgcatgtcagcccaggtgcccatgaacatgaccatcatggctagtccaaataaaatatgggcttggggatggaatgggtggtggtaagttcacagagtgtagttagatcccaactcccatgacctctggcttcagtggtgggtggggcagggcagatgaaagggcttcagtgggaacctctgagagcattttcctgttccccctatcaaccgcccccagtgataacatctgtgaagccagccattactcaataaactgcaaacttgtcta

SEQ ID NO: 327566 - DNA, 3099 bp, Homo sapiens
ttctattccggcacctcccttaggcgccagggacagccgagcgttacctggtcccgggcagcggagttctttacccaccccagttctggttctgacgccctagctcattccgcaaatttagggcttgggtctggcttgttcccctccggctcgaaccacctcttctctgagccgagccagctaccggggctcctggaattgccacccctccctgggcacccttgaggcctccgtggagggacgtcacggggcagagcgggacgtgagcctgagtttgctgcaggcgtgctctgtgtggtggctgggttctgccaatccccgtgcccaccgggtgggcgcggccgggaagctcctgcccctccctgctggtcggcgtcacgcgtgacgtcccgcgtgatggctgggagggcccggcggcgacagcggaggcagagaggaaggcggttctgagagcttcagagagcgatggaaagcaaaatgggtgaattgcctttagacatcaacatccaggaacctcgctgggaccaaagtactttcctgggcagagcccggcactttttcactgttactgatcctcgaaatctgctgctgtccggggcacagctggaagcttctcggaacatcgtgcagaactacagggccggcgtggtgaccccagggatcaccgaggaccagctgtggagggccaagtatgtgtatgactccgccttccatccggacacaggggagaaggtggtcctgattggccgcatgtcagcccaggtgcccatgaacatgaccatcactggctgcatgctcacattctacaggaagaccccaaccgtggtgttctggcagtgggtgaatcagtccttcaatgccattgttaactactccaaccgcagtggtgacactcccatcactgtgaggcagctggggacagcctatgtgagtgccaccactggagctgtggccacggccctgggactcaaatccctcaccaagcacctgccccccttggtcggcagatttgtgccctttgcagcagtggcagctgccaactgcatcaacatccccctgatgaggcagagagagctgcaggtgggcatcccggtggctgatgaggcaggtcagaggcttggctactcggtgactgcagccaagcagggaatcttccaggtggtgatttcaagaatctgcatggcgattcctgccatggccatcccaccactgatcatggacactctggagaagaaagacttcctgaagcgccgcccctggctgggggcacccctgcaggtgggactggtgggcttctgcctggtatttgcaacccccctgtgctgtgccctattcccccagaagagctccatacacataagcaacctggaaccagagctgagagctcagatccatgagcaaaaccccagcgttgaagtggtctactacaacaaggggctttgaggagggtcagcctctgtcccctccctcacttccttgggctgctgctttagtggagtcatgtcacccctaccacttggctatctgcctagcactgggcaggggccttggtgggcagatggcaattgagggtagcaacctattagggtgggggagggacctccataaggcttttcctcccttctctggtttcaaagatcagagcacataacccctcctgtgcttgagtgtccatgcatatacatacatgatacacatgtgtatgtgtacattgggtcctgaaagctagaagcaggcatgctagcctagtatgttctgacatctggcttcccttctcagcctcatgtccacctgcctgccagccaggctacaggtgtgacttccttctctaaactgttacaccagccaagttatttttgatggcacctcatcccttctagaaataggaggagccccaggatctcaggacagagacttatagacactagtaggacaaagcgggctgaatccttcaggtttctgatacctagctccccaagctgactgggctggcagaggagaacatgttgagacaagggaggcaggggacttatgcatccctcagtgccatcccttgtatcctggaatagctccatttcccctcctcctctctaccagacaaaggagtgcctgtgtcctgtactgccctcgctgtctcccccaccaccctacttgacagcgtgggcatcttcaggcacagccttgggagttcctggtgtgctctgacatcatgacctcaaatctaaatcctccaatcccaactccctttcccaaacaaaaagccacagaggcagagcaagcattcccctttaagagcttccactgcaccccctcccaagggacacagcggtaggaatggtgcttaaactccacaggtatcagagagggtgtaactaggacatcctcaagggcagctaggccccgaatgtacaatgttaagacagggaattttgtgttccattgacttttttttttttttttaatggagtttcactattttgcccaggctggagtgcgatggtgcgatcttggctcactgcaacctctgcctcctgggttcaagtgattctcttgcctcagtctcccgagtagtggaaattacaggtgtgtgctaccacatcttgctagttttgtatttttagcagagatgggggtttcaccatgttggccaggctagtctcgaactcctgacctcaggtgatccacctgccttggcctcccaaagcactgggattacaagcatgagccactgtgcccagcctgttccactgacatttcttagacattcagcaaaacccccaccttaacctcttttctttcttgagggttggtcctgtccccacctccaccctcccaccccctggaagaggaagggcccgggcatcagtggctagtccaaataaaatatgggcttggggatggaatgggtggtggtaagttcacagagtgtagttagatcccaactcccatgacctctggcttcagtggtgggtggggcagggcagatgaaagggcttcagtgggaacctctgagagcattttcctgttccccctatcaaccgcccccagtgataacatctgtgaagccagccattactcaataaactgcaaacttgtcta

SEQ ID NO: 327567 - DNA, 3155 bp, Homo sapiens
ttctattccggcacctcccttaggcgccagggacagccgagcgttacctggtcccgggcagcggagttctttacccaccccagttctggttctgacgccctagctcattccgcaaatttagggcttgggtctggcttgttcccctccggctcgaaccacctcttctctgagccgagccagctaccggggctcctggaattgccacccctccctgggcacccttgaggcctccgtggagggacgtcacggggcagagcgggacgtgagcctgagtttgctgcaggcgtgctctgtgtggtggctgggttctgccaatccccgtgcccaccgggtgggcgcggccgggaagctcctgcccctccctgctggtcggcgtcacgcgtgacgtcccgcgtgatggctgggagggcccggcggcgacagcggaggcagagaggaaggcggttctgagagcttcagagagcgatggaaagcaaaatgggtgaattgcctttagacatcaacatccaggaacctcgctgggaccaaagtactttcctgggcagagcccggcactttttcactgttactgatcctcgaaatctgctgctgtccggggcacagctggaagcttctcggaacatcgtgcagaactacagggccggcgtggtgaccccagggatcaccgaggaccagctgtggagggccaagtatgtgtatgactccgccttccatccggacacaggggagaaggtggtcctgattggccgcatgtcagcccaggtgcccatgaacatgaccatcactggctgcatgctcacattctacaggaagaccccaaccgtggtgttctggcagtgggtgaatcagtccttcaatgccattgttaactactccaaccgcagtggtgacactcccatcactgtgaggcagctggggacagcctatgtgagtgccaccactggagctgtggccacggccctgggactcaaatccctcaccaagagtccctcaccagcccatggcccttagggccactgaacaacacccttcctccccagcacctgccccccttggtcggcagatttgtgccctttgcagcagtggcagctgccaactgcatcaacatccccctgatgaggcagagagagctgcaggtgggcatcccggtggctgatgaggcaggtcagaggcttggctactcggtgactgcagccaagcagggaatcttccaggtggtgatttcaagaatctgcatggcgattcctgccatggccatcccaccactgatcatggacactctggagaagaaagacttcctgaagcgccgcccctggctgggggcacccctgcaggtgggactggtgggcttctgcctggtatttgcaacccccctgtgctgtgccctattcccccagaagagctccatacacataagcaacctggaaccagagctgagagctcagatccatgagcaaaaccccagcgttgaagtggtctactacaacaaggggctttgaggagggtcagcctctgtcccctccctcacttccttgggctgctgctttagtggagtcatgtcacccctaccacttggctatctgcctagcactgggcaggggccttggtgggcagatggcaattgagggtagcaacctattagggtgggggagggacctccataaggcttttcctcccttctctggtttcaaagatcagagcacataacccctcctgtgcttgagtgtccatgcatatacatacatgatacacatgtgtatgtgtacattgggtcctgaaagctagaagcaggcatgctagcctagtatgttctgacatctggcttcccttctcagcctcatgtccacctgcctgccagccaggctacaggtgtgacttccttctctaaactgttacaccagccaagttatttttgatggcacctcatcccttctagaaataggaggagccccaggatctcaggacagagacttatagacactagtaggacaaagcgggctgaatccttcaggtttctgatacctagctccccaagctgactgggctggcagaggagaacatgttgagacaagggaggcaggggacttatgcatccctcagtgccatcccttgtatcctggaatagctccatttcccctcctcctctctaccagacaaaggagtgcctgtgtcctgtactgccctcgctgtctcccccaccaccctacttgacagcgtgggcatcttcaggcacagccttgggagttcctggtgtgctctgacatcatgacctcaaatctaaatcctccaatcccaactccctttcccaaacaaaaagccacagaggcagagcaagcattcccctttaagagcttccactgcaccccctcccaagggacacagcggtaggaatggtgcttaaactccacaggtatcagagagggtgtaactaggacatcctcaagggcagctaggccccgaatgtacaatgttaagacagggaattttgtgttccattgacttttttttttttttttaatggagtttcactattttgcccaggctggagtgcgatggtgcgatcttggctcactgcaacctctgcctcctgggttcaagtgattctcttgcctcagtctcccgagtagtggaaattacaggtgtgtgctaccacatcttgctagttttgtatttttagcagagatgggggtttcaccatgttggccaggctagtctcgaactcctgacctcaggtgatccacctgccttggcctcccaaagcactgggattacaagcatgagccactgtgcccagcctgttccactgacatttcttagacattcagcaaaacccccaccttaacctcttttctttcttgagggttggtcctgtccccacctccaccctcccaccccctggaagaggaagggcccgggcatcagtggctagtccaaataaaatatgggcttggggatggaatgggtggtggtaagttcacagagtgtagttagatcccaactcccatgacctctggcttcagtggtgggtggggcagggcagatgaaagggcttcagtgggaacctctgagagcattttcctgttccccctatcaaccgcccccagtgataacatctgtgaagccagccattactcaataaactgcaaacttgtcta

SEQ ID NO: 327568 - DNA, 3068 bp, Homo sapiens
ttctattccggcacctcccttaggcgccagggacagccgagcgttacctggtcccgggcagcggagttctttacccaccccagttctggttctgacgccctagctcattccgcaaatttagggcttgggtctggcttgttcccctccggctcgaaccacctcttctctgagccgagccagctaccggggctcctggaattgccacccctccctgggcacccttgaggcctccgtggagggacgtcacggggcagagcgggacgtgagcctgagtttgctgcaggcgtgctctgtgtggtggctgggttctgccaatccccgtgcccaccgggtgggcgcggccgggaagctcctgcccctccctgctggtcggcgtcacgcgtgacgtcccgcgtgatggctgggagggcccggcggcgacagcggaggcagagaggaaggcggttctgagagcttcagagagcgatggaaagcaaaatgggtgaattgcctttagacatcaacatccaggaacctcgctgggaccaaagtactttcctgggcagagcccggcactttttcactgttactgatcctcgaaatctgctgctgtccggggcacagctggaagcttctcggaacatcgtgcagaactacagggccggcgtggtgaccccagggatcaccgaggaccagctgtggagggccaagtatgtgtatgactccgccttccatccggacacaggggagaaggtggtcctgattggccgcatgtcagcccaggtgcccatgaacatgaccatcactggctgcatgctcacattctacaggaagaccccaaccgtggtgttctggcagtgggtgaatcagtccttcaatgccattgttaactactccaaccgcagtggtgacactcccatcactgtgaggcagctggggacagcctatgtgagtgccaccactggagctgtggccacggccctgggactcaaatccctcaccaagcacctgccccccttggtcggcagatttgtgccctttgcagcagtggcagctgccaactgcatcaacatccccctgatgaggcagagagagctgcaggtgggcatcccggtggctgatgaggcaggtcagaggcttggctactcggtgactgcagccaagcagggaatcttccaggtggtgatttcaagaatctgcatggcgattcctgccatggccatcccaccactgatcatggacactctggagaagaaagacttcctgaagcgccgcccctggctgggggcacccctgcaggtgggactggtgggcttctgcctggtatttgcaacccccctgtgctgtgccctattcccccagaagagctccatacacataagcaacctggaaccagagctgagagctcagatccatgagcaaaaccccagcgttgaagtggtctactacaacaaggggctttgaggagggtcagcctctgtcccctccctcacttccttgggctgctgctttagtggagtcatgtcacccctaccacttggctatctgcctagcactgggcaggggccttggtgggcagatggcaattgagggtagcaacctattagggtgggggagggacctccataaggcttttcctcccttctctggtttcaaagatcagagcacataacccctcctgtgcttgagtgtccatgcatatacatacatgatacacatgtgtatgtgtacattgggtcctgaaagctagaagcaggcatgctagcctagtatgttctgacatctggcttcccttctcagcctcatgtccacctgcctgccagccaggctacaggtgtgacttccttctctaaactgttacaccagccaagttatttttgatggcacctcatcccttctagaaataggaggagccccaggatctcaggacagagacttatagacactagtaggacaaagcgggctgaatccttcaggtttctgatacctagctccccaagctgactgggctggcagaggagaacatgttgagacaagggaggcaggggacttatgcatccctcagtgccatcccttgtatcctggaatagctccatttcccctcctcctctctaccagacaaaggagtgcctgtgtcctgtactgccctcgctgtctcccccaccacagccttgggagttcctggtgtgctctgacatcatgacctcaaatctaaatcctccaatcccaactccctttcccaaacaaaaagccacagaggcagagcaagcattcccctttaagagcttccactgcaccccctcccaagggacacagcggtaggaatggtgcttaaactccacaggtatcagagagggtgtaactaggacatcctcaagggcagctaggccccgaatgtacaatgttaagacagggaattttgtgttccattgacttttttttttttttttaatggagtttcactattttgcccaggctggagtgcgatggtgcgatcttggctcactgcaacctctgcctcctgggttcaagtgattctcttgcctcagtctcccgagtagtggaaattacaggtgtgtgctaccacatcttgctagttttgtatttttagcagagatgggggtttcaccatgttggccaggctagtctcgaactcctgacctcaggtgatccacctgccttggcctcccaaagcactgggattacaagcatgagccactgtgcccagcctgttccactgacatttcttagacattcagcaaaacccccaccttaacctcttttctttcttgagggttggtcctgtccccacctccaccctcccaccccctggaagaggaagggcccgggcatcagtggctagtccaaataaaatatgggcttggggatggaatgggtggtggtaagttcacagagtgtagttagatcccaactcccatgacctctggcttcagtggtgggtggggcagggcagatgaaagggcttcagtgggaacctctgagagcattttcctgttccccctatcaaccgcccccagtgataacatctgtgaagccagccattactcaataaactgcaaacttgtcta

SEQ ID NO: 327569 - DNA, 2171 bp, Homo sapiens
ttctattccggcacctcccttaggcgccagggacagccgagcgttacctggtcccgggcagcggagttctttacccaccccagttctggttctgacgccctagctcattccgcaaatttagggcttgggtctggcttgttcccctccggctcgaaccacctcttctctgagccgagccagctaccggggctcctggaattgccacccctccctgggcacccttgaggcctccgtggagggacgtcacggggcagagcgggacgtgagcctgagtttgctgcaggcgtgctctgtgtggtggctgggttctgccaatccccgtgcccaccgggtgggcgcggccgggaagctcctgcccctccctgctggtcggcgtcacgcgtgacgtcccgcgtgatggctgggagggcccggcggcgacagcggaggcagagaggaaggcggttctgagagcttcagagagcgatggaaagcaaaatgggtgaattgcctttagacatcaacatccaggaacctcgctgggaccaaagtactttcctgggcagagcccggcactttttcactgttactgatcctcgaaatctgctgctgtccggggcacagctggaagcttctcggaacatcgtgcagaactacagggccggcgtggtgaccccagggatcaccgaggaccagctgtggagggccaagtatgtgtatgactccgccttccatccggacacaggggagaaggtggtcctgattggccgcatgtcagcccaggtgcccatgaacatgaccatcactggctgcatgctcacattctacaggaagaccccaaccgtggtgttctggcagtgggtgaatcagtccttcaatgccattgttaactactccaaccgcagtggtgacactcccatcactgtgaggcagctggggacagcctatgtgagtgccaccactggagctgtggccacggccctgggactcaaatccctcaccaagcacctgccccccttggtcggcagatttgtgccctttgcagcagtggcagctgccaactgcatcaacatccccctgatgaggcagagagagctgcaggtgggcatcccggtggctgatgaggcaggtcagaggcttggctactcggtgactgcagccaagcagggaatcttccaggtggtgatttcaagaatctgcatggcgattcctgccatggccatcccaccactgatcatggacactctggagaagaaagacttcctgaagcctcgcctgattctctaagacttgccagcccttctcctgacccctgcaccgcctcctccaccttcgttcattcagcaagaatgaactgggctggggtgaaggaactctgcaggggcaggaggagaggacaaaggaaggaaaccaacttcatcagtgttactccagtggcttctgacacacagaaggggactgtcatagtcatgcttgatctcatgctcattcttttaccccctagtgcctccatactgagaggtacacacgggtgaacacgcacacacagacatgaacaggacacgaaagcaaagcacaggaacaagctctggctcattcacagaatcatttattcacaaatgtattgagtgccatgcaccaggcatgttttagggctgaggagatggcactgaacacaatggttatggcccctgtcctcatgaagtttatagtctgatgcagaaaccaataaacaaggaggcacccaataaatacattcttagaaagtgtaatatgtgctttgtaggaaagcaatgggggtagtgtaattgagattcatgggggagagctgtttagataggatgatcagagaaggggtctttaatgccgcaaaggatgaggagagagccaaataacgcagagaagagtgtttggggtacagaaaacagtcagtgcaagggcactgcagtaggaggggcttgcacatttgaggaacaggttggtggtccctgtggccagagcaaattgagaagagtgccgaggaagagatgtgcttggaaagggtcagattcatgccactgggatgggaagagggtaagtggaggttcacaggaggtttcctgaagaaatcagctcctggaggaagtgagggaagaaaaaaaagggccagggagtgccatggcaaccaattctgagaggtgagaggtcatggg

SEQ ID NO: 327570 - DNA, 387 bp, Homo sapiens
cctagtgagggggttccagtcttcatctataagaggaaaccatggaaatgtaccttttggtgccatccaggagattcatgcccatttaattcctgattctgccacttactggttgtggggctctctttcctcagaacctgatgtccaggttgggtttactattcctaaaaggtcctttcagcttttatcaatctccacccctagggcctatctccaaggatggggtggggtgcagggagggaacaccctaaggccaaagctttacaaacctttccaacacttgtctcccccagcctggtatttgcaacccccctgtgctgtgccctattcccccagaagaggtaagtgctgtccctgggctgggtgggggactctggattggactct

SEQ ID NO: 327571 - DNA, 427 bp, Homo sapiens
aagcgcagccaggcaggcaaggagggcttcctggaggaggactggcttcctgggctcaggaaaaacatccacattcactccgagtctgaggcttccaggtcaccccagtccccgcactgctgcaccagcggtccccctgtgcccctctctgttgtgtggctctgccccacccttcctccccgtcctgtgctggctcccaccctctgggctctctgccctcgtccacacctcggcggcaggagtcactgagtcagagatgcgaatccacccgagtggctccctacatacacctgcctagctccaggcccttcaacgcctccgggccattcaacgcctccgggccattcaacgcctccgggccattcaacgcctccgggccattcaacgcctccggccattcaacgcctccggccattcaacgcctccg

SEQ ID NO: 327572 - DNA, 172 bp, Homo sapiens
ctgggacgacagcagctccgtcagcagcggcatcagcgacaccatagacaacctcagcactgatgacatcaacaccagctcctccatcagctcttatgccaacacacctgcctcctctcgaaaaaacctggatgtgcaggtgaggaacacaggccctcccaggctcctccag

SEQ ID NO: 327573 - DNA, 369 bp, Homo sapiens
ccaaattgctggaattacgggcatgagccaccatgcctggccaaacaaaggcaattctatgccaggtcggtcttgttcccttatctcagtgagctggaggtttgtacaagtttttatccaaatgtgccagaggtttttctgtctgtgcagccatgggcaggtctccaagcacaacaccatgtgctagttaccttgttagtgtctgcagcttgattttttccaggattccttttatgttatgcagggatgagatactgacccaagggccagggactttccagggacccttctcttgctatctaactaaagcaagctaactaacttgtttcagaattaatgagtattcacttttaattttgtaagacaaaa

SEQ ID NO: 327574 - DNA, 222 bp, Homo sapiens
aaggctcccctggggtgggatagaagaaaagggacaacaggatgggatagagtagaatgacaaccagccatcagtaagcctggctcacacagattgtatttttataccaacatagtgacctgaaagataatggcttctgtgtgaggaagtatcctttgattttatgtgcggatatgaaacagagactaggaagttattcaggaaaacacacacacacacaca

SEQ ID NO: 327575 - DNA, 210 bp, Homo sapiens
ggcatatttggctttattgaattctacaaagtcaaatagaattgtattggaattattttacatgcaacattggtattagtgtggctgatcaaagaattgattgtacttaaatatgcaaatagtattaggataatacaatactgcaatttgatgtcctcttcaaaatagctctgaaaaatatgattggaatttctggagtctattttgaaa

SEQ ID NO: 327576 - DNA, 555 bp, Homo sapiens
tacaggggtgagctacagttcccggcccaagagttggttttgaggcagaaattaaccagcctcaatggatatgaggagtgagggagaaaggttccagggtgtctgcattttttcacttggtcaactgggtgaatgatgaacttaagtaagaaacataagaggagaagcagagtttgggttgtggatgagaatatcaaaggtacctgtagaacagagatcatgacataatatagccttacaaaatgtttcttcttctgccattaaaaataacatatgggggccaggtgtggtggctcgtgcctgtaatcccaacattttgggaggctgaggcaggaggattgcatgaggccaggagttggagaccagccttggcaacatggtgagacctatctctacaaaaaaaaaaaagctgagtagtgtggtgctgctcacttgtgatcccagctgctcgggaggctgaggcaggaggatcacttgagtctagcagtttgaagttttagtgagctgtcatcacatcattgcactccaacctgggtgacagagcaagactccgtc

SEQ ID NO: 327577 - DNA, 432 bp, Homo sapiens
tttttggacatggagcccactgactccaggaagagtccattttccctggaagagtaacccagcaagatcatggcaggtattgacataacattgtttaaataggacgtgcaaaggtggttagtgtgctggaaatcttgataagaaaatgagaggccaggtgcggtggctcacgcctctaatcccagcactttgggaagctgaggcgtgcagatcacgacgtcaagagattgagaccatcctggctaacacagtgaaaccccgtctctaataaaaatacaaaaaatcagctgggcatggtggcatgcgcctgtagtcccagctactccggaggctgaggcagcagaatcacttgaacctgggaggcagaggctgcagtgagccgagatcgcgccactgcactccagcctgggcgacagagcgagactctgtctc

SEQ ID NO: 327578 - DNA, 320 bp, Homo sapiens
gtaagggtagatgcatatgtgcacacagagcagctaacacgatactcagaaaatagtaacaacacaattcccatttagtctaagccaaaaactcttaactatagagagagaacgtgaatggaagggatgaatctttgagaatctgatgaaagcaatcaattctctcctccaaaaaagaatgcacatacacagaaactttacatataattttaggagggtctagaaaccctgaagcccatccagatatacactgtcccaaccagaaatccacgaaccctaagttaagaaatttttccgttttttttttttttttttttttt

SEQ ID NO: 327579 - DNA, 561 bp, Homo sapiens
tgagcagcaacagggccggggctgggcttatcagcctcccagcccagaccctggctgcagacataaataggccctgcaagagctggctgcttagagactgcgagaaggaggtcccccacggcccttcaggatgaaagctgcggtgctgaccttggccgtgctcttcctgacggggagccaggctcggcatttctggcagcaagatgaacccccccagagcccctgggatcgagtgaaggacctggccactgtgtacgtggatgtgctcaaagacagcggcagagactatgtgtcccagtttgaaggctccgccttgggaaaacagctaaacctaaagctccttgacaactgggacagcgtgacctccaccttcagcaagctgcgcgaacagctcggccctgtgacccaggagttctgggataacctggaaaaggagacagagggcctgaggcaggagatgagcaaggatctggaggagtacactaagaagctcaacacccagtgaggcgcccgccgccgccccccttcccggtgctcagaataaacgtttccaaagtggga

SEQ ID NO: 327580 - DNA, 1036 bp, Homo sapiens
tgagcagcaacagggccggggctgggcttatcagcctcccagcccagaccctggctgcagacataaataggccctgcaagagctggctgcttagagactgcgagaaggaggtgcgtcctgctgcctgccccggtcactctggctccccagctcaaggtcccccacggcccttcaggatgaaagctgcggtgctgaccttggccgtgctcttcctgacggggagccaggctcggcatttctggcagcaagatgaacccccccagagcccctgggatcgagtgaaggacctggccactgtgtacgtggatgtgctcaaagacagcggcagagactatgtgtcccagtttgaaggctccgccttgggaaaacagctaaacctaaagctccttgacaactgggacagcgtgacctccaccttcagcaagctgcgcgaacagctcggccctgtgacccaggagttctgggataacctggaaaaggagacagagggcctgaggcaggagatgagcaaggatctggaggaggtgaaggccaaggtgcagccctacctggacgacttccagaagaagtggcaggaggagatggagctctaccgccagaaggtggagccgctgcgcgcagagctccaagagggcgcgcgccagaagctgcacgagctgcaagagaagctgagcccactgggcgaggagatgcgcgaccgcgcgcgcgcccatgtggacgcgctgcgcacgcatctggccccctacagcgacgagctgcgccagcgcttggccgcgcgccttgaggctctcaaggagaacggcggcgccagactggccgagtaccacgccaaggccaccgagcatctgagcacgctcagcgagaaggccaagcccgcgctcgaggacctccgccaaggcctgctgcccgtgctggagagcttcaaggtcagcttcctgagcgctctcgaggagtacactaagaagctcaacacccagtgaggcgcccgccgccgccccccttcccggtgctcagaataaacgtttccaaagtggga

SEQ ID NO: 327581 - DNA, 1067 bp, Homo sapiens
tgagcagcaacagggccggggctgggcttatcagcctcccagcccagaccctggctgcagacataaataggccctgcaagagctggctgcttagagactgcgagaaggaggtgcgtcctgctgcctgccccggtcactctggctccccagctcaaggttcaggccttgccccaggccgggcctctgggtcccccacggcccttcaggatgaaagctgcggtgctgaccttggccgtgctcttcctgacggggagccaggctcggcatttctggcagcaagatgaacccccccagagcccctgggatcgagtgaaggacctggccactgtgtacgtggatgtgctcaaagacagcggcagagactatgtgtcccagtttgaaggctccgccttgggaaaacagctaaacctaaagctccttgacaactgggacagcgtgacctccaccttcagcaagctgcgcgaacagctcggccctgtgacccaggagttctgggataacctggaaaaggagacagagggcctgaggcaggagatgagcaaggatctggaggaggtgaaggccaaggtgcagccctacctggacgacttccagaagaagtggcaggaggagatggagctctaccgccagaaggtggagccgctgcgcgcagagctccaagagggcgcgcgccagaagctgcacgagctgcaagagaagctgagcccactgggcgaggagatgcgcgaccgcgcgcgcgcccatgtggacgcgctgcgcacgcatctggccccctacagcgacgagctgcgccagcgcttggccgcgcgccttgaggctctcaaggagaacggcggcgccagactggccgagtaccacgccaaggccaccgagcatctgagcacgctcagcgagaaggccaagcccgcgctcgaggacctccgccaaggcctgctgcccgtgctggagagcttcaaggtcagcttcctgagcgctctcgaggagtacactaagaagctcaacacccagtgaggcgcccgccgccgccccccttcccggtgctcagaataaacgtttccaaagtggga

SEQ ID NO: 327582 - DNA, 1289 bp, Homo sapiens
  misc_feature (1170)..(1170): n is a, c, g, or t
  misc_feature (1177)..(1177): n is a, c, g, or t
  misc_feature (1180)..(1180): n is a, c, g, or t
  misc_feature (1185)..(1185): n is a, c, g, or t
  misc_feature (1187)..(1187): n is a, c, g, or t
  misc_feature (1197)..(1197): n is a, c, g, or t
  misc_feature (1202)..(1202): n is a, c, g, or t
  misc_feature (1208)..(1208): n is a, c, g, or t
  misc_feature (1214)..(1214): n is a, c, g, or t
  misc_feature (1233)..(1233): n is a, c, g, or t
  misc_feature (1236)..(1237): n is a, c, g, or t
  misc_feature (1241)..(1241): n is a, c, g, or t
  misc_feature (1246)..(1246): n is a, c, g, or t
  misc_feature (1252)..(1252): n is a, c, g, or t
  misc_feature (1260)..(1261): n is a, c, g, or t
tgagcagcaacagggccggggctgggcttatcagcctcccagcccagaccctggctgcagacataaataggccctgcaagagctggctgcttagagactgcgagaaggaggtgcgtcctgctgcctgccccggtcactctggctccccagctcaaggtcccccacggcccttcaggatgaaagctgcggtgctgaccttggccgtgctcttcctgacggggagccaggctcggcatttctggcagcaagatgaacccccccagagcccctgggatcgagtgaaggacctggccactgtgtacgtggatgtgctcaaagacagcggcagagactatgtgtcccagtttgaaggctccgccttgggaaaacagctaaacctaaagctccttgacaactgggacagcgtgacctccaccttcagcaagctgcgcgaacagctcggccctgtgacccaggagttctgggataacctggaaaaggagacagagggcctgaggcaggagatgagcaaggatctggaggaggtgaaggccaaggtgcagccctacctggacgacttccagaagaagtggcaggaggagatggagctctaccgccagaaggtggagccgctgcgcgcagagctccaagagggcgcgcgccagaagctgcacgagctgcaagagaagctgagcccactgggcgaggagatgcgcgaccgcgcgcgcgcccatgtggacgcgctgcgcacgcatctggccccctacagcgacgagctgcgccagcgcttggccgcgcgccttgaggctctcaaggagaacggcggcgccagactggccgagtaccacgccaaggccaccgagcatctgagcacgctcagcgagaaggccaagcccgcgctcgaggacctccgccaaggcctgctgcccgtgctggagagcttcaaggtcagcttcctgagcgctctcgaggagtacactaagaagctcaacacccagtgaggcgcccgccgccgccccccttcccggtgctcagaataaacgtttccaaagtgggaaaaaaaaaaaaaaaaaaacaaaaaaaaaaaaaaaaaaaaaaaaaaaaaaaaaaaaaaaaaaaaaaaaaaaaaaaaaaaaaaaaaaaaaaaaaaaaaaaaaaaaaaaaaaaacctcggggggggccccggcccanattgccntanggggngncgattacaantcatnggccgnggtttnacaaggtgggactgggccntgnnggtnccaanttaatngccttggnngaatatccccctttggccgttggcgtcg

SEQ ID NO: 327583 - DNA, 1010 bp, Homo sapiens
tgagcagcaacagggccggggctgggcttatcagcctcccagcccagaccctggctgcagacataaataggccctgcaagagctggctgcttagagactgcgagaaggaggtgcgtcctgctgcctgccccggtcactctggctccccagctcaaggtcccccacggcccttcaggatgaaagctgcggtgctgaccttggccgtgctcttcctgacggggagccaggctcggcatttctggcagcaagatgaacccccccagagcccctgggatcgagtgaaggacctggccactgtgtacgtggatgtgctcaaagacagcggcagagactatgtgtcccagtttgaaggctccgccttgggaaaacagctaaacctaaagctccttgacaactgggacagcgtgacctccaccttcagcaagctgcgcgaacagctcggccctgtgacccaggagttctgggataacctggaaaaggagacagagggcctgaggcaggagatgagcaaggatctggaggaggtgaaggccaaggtgcagccctacctggacgacttccagaagaagtggcaggaggagatggagctctaccgccagaaggtggagccgctgcgcgcagagctccaagagggcgcgcgccagaagctgcacgagctgcaagagaagctgagcccagcgcgcccatgtggacgcgctgcgcacgcatctggccccctacagcgacgagctgcgccagcgcttggccgcgcgccttgaggctctcaaggagaacggcggcgccagactggccgagtaccacgccaaggccaccgagcatctgagcacgctcagcgagaaggccaagcccgcgctcgaggacctccgccaaggcctgctgcccgtgctggagagcttcaaggtcagcttcctgagcgctctcgaggagtacactaagaagctcaacacccagtgaggcgcccgccgccgccccccttcccggtgctcagaataaacgtttccaaagtggga

SEQ ID NO: 327584 - DNA, 789 bp, Homo sapiens
tgagcagcaacagggccggggctgggcttatcagcctcccagcccagaccctggctgcagacataaataggccctgcaagagctggctgcttagagactgcgagaaggaggtgcgtcctgctgcctgccccggtcactctggctccccagctcaaggtcccccacggcccttcaggatgaaagctgcggtgctgaccttggccgtgctcttcctgacggggagccaggctcggcatttctggcagcaagatgaacccccccagagcccctgggatcgagtgaaggacctggccactgtgtacgtggatgtgctcaaagacagcggcagagactatgtgtcccagtttgaaggctccgccttgggaaaacagctaaacctaaagctccttgacaactgggacagcgtgacctccaccttcagcaagctgcgcgaacagctcggccctgtgacccaggagttctgggataacctggaaaaggagacagagggcctgaggcaggagatgagcaaggatctggaggaggtgaaggccaaggtgcagccctacctggacgacttccagaagaagtggcaggaggagatggagctctaccgccagaaggtggagccgctgcgcgcagagctccaagagggcgcgcgccagaagctgccctgctgcccgtgctggagagcttcaaggtcagcttcctgagcgctctcgaggagtacactaagaagctcaacacccagtgaggcgcccgccgccgccccccttcccggtgctcagaataaacgtttccaaagtggga

SEQ ID NO: 327585 - DNA, 789 bp, Homo sapiens
gaattcaaaaaaaaaagaaaaaaaaaaaaaaaaaaaaaaaaaaaaaagagagactgcgagaaggaggtcccccacggcccttcaggatgaaagctgcggtgctgaccttggccgtgctcttcctgacggcctaaagctccttgacaactgggacagcgtgacctccaccttcagcaagctgcgcgaacagctcggccctgtgacccaggagttctgggataacctggaaaaggagacagagggcctgaggcaggagatgagcaaggatctggaggaggtgaaggccaaggtgcagccctacctggacgacttccagaagaagtggcaggaggagatggagctctaccgccagaaggtggagccgctgcgcgcagagctccaagagggcgcgcgccagaagctgcacgagctgcaagagaagctgagcccactgggcgaggagatgcgcgaccgcgcgcgcgcccatgtggacgcgctgcgcacgcatctggccccctacagcgacgagctgcgccagcgcttggccgcgcgccttgaggctctcaaggagaacggcggcgccagactggccgagtaccacgccaaggccaccgagcatctgagcacgctcagcgagaaggccaagcccgcgctcgaggacctccgccaaggcctgctgcccgtgctggagagcttcaaggtcagcttcctgagcgctctcgaggagtacactaagaagctcaacacccagtgaggcgcccgccgccgccccccttcccggtgctcagaataaacgtttccaaagtggga

SEQ ID NO: 327586 - DNA, 1000 bp, Homo sapiens
tgagcagcaacagggccggggctgggcttatcagcctcccagcccagaccctggctgcagacataaataggccctgcaagagctggctgcttagagactgcgagaaggaggtgcgtcctgctgcctgccccggtcactctggctccccagctcaaggtcccccacggcccttcaggatgaaagctgcggtgctgaccttggccgtgctcttcctgacggggagccaggctcggcatttctggcagcaagatgaacccccccagagcccctgggatcgagtgaaggacctggccactgtgtacgtggatgtgctcaaagacagcggcagagactatgtgtcccagtttgaaggctccgccttgggaaaacagctaaacaccttcagcaagctgcgcgaacagctcggccctgtgacccaggagttctgggataacctggaaaaggagacagagggcctgaggcaggagatgagcaaggatctggaggaggtgaaggccaaggtgcagccctacctggacgacttccagaagaagtggcaggaggagatggagctctaccgccagaaggtggagccgctgcgcgcagagctccaagagggcgcgcgccagaagctgcacgagctgcaagagaagctgagcccactgggcgaggagatgcgcgaccgcgcgcgcgcccatgtggacgcgctgcgcacgcatctggccccctacagcgacgagctgcgccagcgcttggccgcgcgccttgaggctctcaaggagaacggcggcgccagactggccgagtaccacgccaaggccaccgagcatctgagcacgctcagcgagaaggccaagcccgcgctcgaggacctccgccaaggcctgctgcccgtgctggagagcttcaaggtcagcttcctgagcgctctcgaggagtacactaagaagctcaacacccagtgaggcgcccgccgccgccccccttcccggtgctcagaataaacgtttccaaagtggga

SEQ ID NO: 327587 - DNA, 892 bp, Homo sapiens
tgagcagcaacagggccggggctgggcttatcagcctcccagcccagaccctggctgcagacataaataggccctgcaagagctggctgcttagagactgcgagaaggaggtgcgtcctgctgcctgccccggtcactctggctccccagctcaaggtcccccacggcccttcaggatgaaagctgcggtgctgaccttggccgtgctcttcctgacggggagccaggctcggcatttctggcagcaagatgaacccccccagagcccctgggatcgagtgaaggacctggccactgtgtacgtggatgtgctcaaagacagcaccttcagcaagctgcgcgaacagctcggccctgtgacccaggagttctgggataacgtgaaggccaaggtgcagccctacctggacgacttccagaagaagtggcaggaggagatggagctctaccgccagaaggtggagccgctgcgcgcagagctccaagagggcgcgcgccagaagctgcacgagctgcaagagaagctgagcccactgggcgaggagatgcgcgaccgcgcgcgcgcccatgtggacgcgctgcgcacgcatctggccccctacagcgacgagctgcgccagcgcttggccgcgcgccttgaggctctcaaggagaacggcggcgccagactggccgagtaccacgccaaggccaccgagcatctgagcacgctcagcgagaaggccaagcccgcgctcgaggacctccgccaaggcctgctgcccgtgctggagagcttcaaggtcagcttcctgagcgctctcgaggagtacactaagaagctcaacacccagtgaggcgcccgccgccgccccccttcccggtgctcagaataaacgtttccaaagtggga

SEQ ID NO: 327588 - DNA, 735 bp, Homo sapiens
gaattcaaaaaaaaaagaaaaaaaaaaaaaaaaaaaaaaaaaaaaaagagagactgcgagaaggaggtcccccacggcccttcaggatgaaagctgcggtgctgaccttggccgtgctcttcctgacggcctaaagctccttgacaactgggacagcgtgacctccaccttcagcaagctgcgcgaacagctcggccctgtgacccaggagttctgggataacgtgaaggccaaggtgcagccctacctggacgacttccagaagaagtggcaggaggagatggagctctaccgccagaaggtggagccgctgcgcgcagagctccaagagggcgcgcgccagaagctgcacgagctgcaagagaagctgagcccactgggcgaggagatgcgcgaccgcgcgcgcgcccatgtggacgcgctgcgcacgcatctggccccctacagcgacgagctgcgccagcgcttggccgcgcgccttgaggctctcaaggagaacggcggcgccagactggccgagtaccacgccaaggccaccgagcatctgagcacgctcagcgagaaggccaagcccgcgctcgaggacctccgccaaggcctgctgcccgtgctggagagcttcaaggtcagcttcctgagcgctctcgaggagtacactaagaagctcaacacccagtgaggcgcccgccgccgccccccttcccggtgctcagaataaacgtttccaaagtggga

SEQ ID NO: 327589 - DNA, 673 bp, Homo sapiens
  misc_feature (617)..(617): n is a, c, g, or t
  misc_feature (626)..(626): n is a, c, g, or t
  misc_feature (634)..(634): n is a, c, g, or t
tgagcagcaacagggccggggctgggcttatcagcctcccagcccagaccctggctgcagacataaataggccctgcaagagctggctgcttagagactgcgagaaggaggtgcgtcctgctgcctgccccggtcactctggctccccagctcaaggtcccccacggcccttcaggatgaaagctgcggtgctgaccttggccgtgctcttcctgacggggagccaggctcggcatttctggcagcaagatgaacccccccagagcccctgggatcgagtgaaggacctggccactgtgtacgtggatgtgctcaaagacagcggcagagactatgtgtcccagtttgaaggctccgccttgggaaaacagctaaacctaaagctccttgacaactgggacagcgtgacctccaccttcagcaagctgcgcgaacagctcggccctgtgacccaggagttctgggataacctggaaaaggagacagagggcctgaggcaggagatgagcaaggatctggaggagtacactaagaagctcaacacccagtgaggcgcccgccgccgccccccttcccggtgctcagaataaacgtttccaaagtgggacacaccacanacacacaancaaacaancacacaaccccccgcgacacacgcgggccgggaaaaagg

SEQ ID NO: 327590 - DNA, 1012 bp, Homo sapiens
tgagcagcaacagggccggggctgggcttatcagcctcccagcccagaccctggctgcagacataaataggccctgcaagagctggctgcttagagactgcgagaaggaggtgcgtcctgctgcctgccccggtcactctggctccccagctcaaggtcccccacggcccttcaggatgaaagctgcggtgctgaccttggccgtgctcttcctgacggggagccaggctcggcatttctggcagcaagatgaacccccccagagcccctgggatcgagtgaaggacctggccactgtgtacgtggatgtgctcaaagacagcggcagagactatgtgtcccagtttgaaggctccgccttgggaaaacagctaaacctaaagctccttgacaactgggacagcgtgacctcacgagctgcaagagaagctgagcccactgggcgaggagatgcgcgaccgcgcgcgcgcccatgtggacgcgctgcgcacgcatctggccccctacagcgacgagctgcgccagcgcttggccgcgcgccttgaggctctcaaggagaacggcggcgccagactggccgagtaccacgccaaggccaccgagcatctgagcacgctcagcgagaaggccaagcccgcgctcgaggacctccgccaaggcctgctgcccgtgctggagagcttcaaggtcagcttcctgagcgctctcgaggagtacactaagaagctcaacacccagtgaggcgcccgccgccgccccccttcccggtgctcagaataaacgtttccaaagtgggaaataaaagaaaatatgccatatgaagcaatgattataacacatgacttaagtattccataatttgaggaaatatataattcaaataatcaaaagattgctaaacatgaactcgaggggggccccgttccaatttcgccttaggagggttgatatgagtggccgcgtgttaaacgggggactgtgaaaccctgggtaccgtcgcctgggcgtgggg

SEQ ID NO: 327591 - DNA, 164 bp, Homo sapiens
ttgtggcccacatgccaccggagaagcctgctgcccgtgctggagagcttcaaggtcagcttcctgagcgctctcgaggagtacactaagaagctcaacacccagtgaggcgcccgccgccgccccccttcccggtgctcagaataaacgtttccaaagtggga

SEQ ID NO: 327592 - DNA, 743 bp, Homo sapiens
tgagcagcaacagggccggggctgggcttatcagcctcccagcccagaccctggctgcagacataaataggccctgcaagagctggctgcttagagactgcgagaaggaggtcccccacggcccttcaggatgaaagctgcggtgctgaccttggccgtgctcttcctgacggggagccaggctcggcatttctggcagcaagatgaacccccccagagcccctgggatcgagtgaaggacctggccactgtgtacgtggatgtgctcaaagacagcggcagagactatgtgtcccagtttgaaggctccgccttgggaaaacagctaaacctaaagctccttgacaactgggacagcgtgacctccaccttcagcaagctgcgcgaacagctcggccctgtgacccaggagttctgggataacctggaaaaggagacagagggcctgaggcaggagatgagcaaggatctggaggaggtgaaggccaaggtgcagccctacctggacgacttccagaagaagtggcaggaggagatggagctctaccgccagaaggtggagccgctgcgcgcagagctccaagagggcgcgcgccagaagctgccctgctgcccgtgctggagagcttcaaggtcagcttcctgagcgctctcgaggagtacactaagaagctcaacacccagtgaggcgcccgccgccgccccccttcccggtgctcagaataaacgtttccaaagtggga

SEQ ID NO: 327593 - DNA, 990 bp, Homo sapiens
tgagcagcaacagggccggggctgggcttatcagcctcccagcccagaccctggctgcagacataaataggccctgcaagagctggctgcttagagactgcgagaaggaggtcccccacggcccttcaggatgaaagctgcggtgctgaccttggccgtgctcttcctgacggggagccaggctcggcatttctggcagcaagatgaacccccccagagcccctgggatcgagtgaaggacctggccactgtgtacgtggatgtgctcaaagacagcggcagagactatgtgtcccagtttgaaggctccgccttgggaaaacagctaaacctaaagctccttgacaactgggacagcgtgacctccaccttcagcaagctgcgcgaacagctcggccctgtgacccaggagttctgggataacctggaaaaggagacagagggcctgaggcaggagatgagcaaggatctggaggaggtgaaggccaaggtgcagccctacctggacgacttccagaagaagtggcaggaggagatggagctctaccgccagaaggtggagccgctgcgcgcagagctccaagagggcgcgcgccagaagctgcacgagctgcaagagaagctgagcccactgggcgaggagatgcgcgaccgcgcgcgcgcccatgtggacgcgctgcgcacgcatctggccccctacagcgacgagctgcgccagcgcttggccgcgcgccttgaggctctcaaggagaacggcggcgccagactggccgagtaccacgccaaggccaccgagcatctgagcacgctcagcgagaaggccaagcccgcgctcgaggacctccgccaaggcctgctgcccgtgctggagagcttcaaggtcagcttcctgagcgctctcgaggagtacactaagaagctcaacacccagtgaggcgcccgccgccgccccccttcccggtgctcagaataaacgtttccaaagtggga

SEQ ID NO: 327594 - DNA, 1187 bp, Homo sapiens
tgagcagcaacagggccggggctgggcttatcagcctcccagcccagaccctggctgcagacataaataggccctgcaagagctggctgcttagagactgcgagaaggaggtgcgtcctgctgcctgccccggtcactctggctccccagctcaaggttcaggccttgccccaggccgggcctctgggtacctgaggtcttctcccgctctgtgcccttctcctcacctggctgcaatgagtgggggagcacggggcttctgcatgctgaaggcaccccactcagccaggcccttcttctcctccaggtcccccacggcccttcaggatgaaagctgcggtgctgaccttggccgtgctcttcctgacggggagccaggctcggcatttctggcagcaagatgaacccccccagagcccctgggatcgagtgaaggacctggccactgtgtacgtggatgtgctcaaagacagcggcagagactatgtgtcccagtttgaaggctccgccttgggaaaacagctaaacctaaagctccttgacaactgggacagcgtgacctccaccttcagcaagctgcgcgaacagctcggccctgtgacccaggagttctgggataacctggaaaaggagacagagggcctgaggcaggagatgagcaaggatctggaggaggtgaaggccaaggtgcagccctacctggacgacttccagaagaagtggcaggaggagatggagctctaccgccagaaggtggagccgctgcgcgcagagctccaagagggcgcgcgccagaagctgcacgagctgcaagagaagctgagcccactgggcgaggagatgcgcgaccgcgcgcgcgcccatgtggacgcgctgcgcacgcatctggccccctacagcgacgagctgcgccagcgcttggccgcgcgccttgaggctctcaaggagaacggcggcgccagactggccgagtaccacgccaaggccaccgagcatctgagcacgctcagcgagaaggccaagcccgcgctcgaggacctccgccaaggcctgctgcccgtgctggagagcttcaaggtcagcttcctgagcgctctcgaggagtacactaagaagctcaacacccagtgaggcgcccgccgccgccccccttcccggtgctcagaataaacgtttccaaagtggga

SEQ ID NO: 327595 - DNA, 982 bp, Homo sapiens
tgagcagcaacagggccggggctgggcttatcagcctcccagcccagaccctggctgcagacataaataggccctgcaagagctggctgcttagagactgcgagaaggaggtgcgtcctgctgcctgccccggtcactctggctccccagctcaaggtcccccacggcccttcaggatgaaagctgcggtgctgaccttggccgtgctcttcctgacggggagccaggctcggcatttctggcagcaagatgaacccccccagagcccctgggatcgagtgaaggacctggccactgtgtacgtggatgtgctcaaagacagcggcagagactatgtgtcccagtttgaaggctccgccttgggaaaacagctaaacctaaagctccttgacaactgggacagcgtgacctccaccttcagcaagctgcgcgaacagctcggccctgtgacccaggagttctgggataacgtgaaggccaaggtgcagccctacctggacgacttccagaagaagtggcaggaggagatggagctctaccgccagaaggtggagccgctgcgcgcagagctccaagagggcgcgcgccagaagctgcacgagctgcaagagaagctgagcccactgggcgaggagatgcgcgaccgcgcgcgcgcccatgtggacgcgctgcgcacgcatctggccccctacagcgacgagctgcgccagcgcttggccgcgcgccttgaggctctcaaggagaacggcggcgccagactggccgagtaccacgccaaggccaccgagcatctgagcacgctcagcgagaaggccaagcccgcgctcgaggacctccgccaaggcctgctgcccgtgctggagagcttcaaggtcagcttcctgagcgctctcgaggagtacactaagaagctcaacacccagtgaggcgcccgccgccgccccccttcccggtgctcagaataaacgtttccaaagtggga

SEQ ID NO: 327596 - DNA, 946 bp, Homo sapiens
tgagcagcaacagggccggggctgggcttatcagcctcccagcccagaccctggctgcagacataaataggccctgcaagagctggctgcttagagactgcgagaaggaggtgcgtcctgctgcctgccccggtcactctggctccccagctcaaggtcccccacggcccttcaggatgaaagctgcggtgctgaccttggccgtgctcttcctgacggggagccaggctcggcatttctggcagcaagatgaacccccccagagcccctgggatcgagtgaaggacctggccactgtgtacgtggatgtgctcaaagacagcaccttcagcaagctgcgcgaacagctcggccctgtgacccaggagttctgggataacctggaaaaggagacagagggcctgaggcaggagatgagcaaggatctggaggaggtgaaggccaaggtgcagccctacctggacgacttccagaagaagtggcaggaggagatggagctctaccgccagaaggtggagccgctgcgcgcagagctccaagagggcgcgcgccagaagctgcacgagctgcaagagaagctgagcccactgggcgaggagatgcgcgaccgcgcgcgcgcccatgtggacgcgctgcgcacgcatctggccccctacagcgacgagctgcgccagcgcttggccgcgcgccttgaggctctcaaggagaacggcggcgccagactggccgagtaccacgccaaggccaccgagcatctgagcacgctcagcgagaaggccaagcccgcgctcgaggacctccgccaaggcctgctgcccgtgctggagagcttcaaggtcagcttcctgagcgctctcgaggagtacactaagaagctcaacacccagtgaggcgcccgccgccgccccccttcccggtgctcagaataaacgtttccaaagtggga

SEQ ID NO: 327597 - DNA, 751 bp, Homo sapiens
tgagcagcaacagggccggggctgggcttatcagcctcccagcccagaccctggctgcagacataaataggccctgcaagagctggctgcttagagactgcgagaaggaggtcccccacggcccttcaggatgaaagctgcggtgctgaccttggccgtgctcttcctgacggggagccaggctcggcatttctggcagcaagatgaacccccccagagcccctgggatcgagtgaaggacctggccactgtgtacgtggatgtgctcaaagacagcggcagagactatgtgtcccagtttgaaggctccgccttgggaaaacagctaaacctaaagctccttgacaactgggacagcgtgacctcacgagctgcaagagaagctgagcccactgggcgaggagatgcgcgaccgcgcgcgcgcccatgtggacgcgctgcgcacgcatctggccccctacagcgacgagctgcgccagcgcttggccgcgcgccttgaggctctcaaggagaacggcggcgccagactggccgagtaccacgccaaggccaccgagcatctgagcacgctcagcgagaaggccaagcccgcgctcgaggacctccgccaaggcctgctgcccgtgctggagagcttcaaggtcagcttcctgagcgctctcgaggagtacactaagaagctcaacacccagtgaggcgcccgccgccgccccccttcccggtgctcagaataaacgtttccaaagtggga

SEQ ID NO: 327598 - DNA, 1102 bp, Homo sapiens
  misc_feature (1046)..(1046): n is a, c, g, or t
  misc_feature (1055)..(1055): n is a, c, g, or t
  misc_feature (1063)..(1063): n is a, c, g, or t
tgagcagcaacagggccggggctgggcttatcagcctcccagcccagaccctggctgcagacataaataggccctgcaagagctggctgcttagagactgcgagaaggaggtgcgtcctgctgcctgccccggtcactctggctccccagctcaaggtcccccacggcccttcaggatgaaagctgcggtgctgaccttggccgtgctcttcctgacggggagccaggctcggcatttctggcagcaagatgaacccccccagagcccctgggatcgagtgaaggacctggccactgtgtacgtggatgtgctcaaagacagcggcagagactatgtgtcccagtttgaaggctccgccttgggaaaacagctaaacctaaagctccttgacaactgggacagcgtgacctccaccttcagcaagctgcgcgaacagctcggccctgtgacccaggagttctgggataacctggaaaaggagacagagggcctgaggcaggagatgagcaaggatctggaggaggtgaaggccaaggtgcagccctacctggacgacttccagaagaagtggcaggaggagatggagctctaccgccagaaggtggagccgctgcgcgcagagctccaagagggcgcgcgccagaagctgcacgagctgcaagagaagctgagcccactgggcgaggagatgcgcgaccgcgcgcgcgcccatgtggacgcgctgcgcacgcatctggccccctacagcgacgagctgcgccagcgcttggccgcgcgccttgaggctctcaaggagaacggcggcgccagactggccgagtaccacgccaaggccaccgagcatctgagcacgctcagcgagaaggccaagcccgcgctcgaggacctccgccaaggcctgctgcccgtgctggagagcttcaaggtcagcttcctgagcgctctcgaggagtacactaagaagctcaacacccagtgaggcgcccgccgccgccccccttcccggtgctcagaataaacgtttccaaagtgggacacaccacanacacacaancaaacaancacacaaccccccgcgacacacgcgggccgggaaaaagg

SEQ ID NO: 327599 - DNA, 1199 bp, Homo sapiens
  misc_feature (1080)..(1080): n is a, c, g, or t
  misc_feature (1087)..(1087): n is a, c, g, or t
  misc_feature (1090)..(1090): n is a, c, g, or t
  misc_feature (1095)..(1095): n is a, c, g, or t
  misc_feature (1097)..(1097): n is a, c, g, or t
  misc_feature (1107)..(1107): n is a, c, g, or t
  misc_feature (1112)..(1112): n is a, c, g, or t
  misc_feature (1118)..(1118): n is a, c, g, or t
  misc_feature (1124)..(1124): n is a, c, g, or t
  misc_feature (1143)..(1143): n is a, c, g, or t
  misc_feature (1146)..(1147): n is a, c, g, or t
  misc_feature (1151)..(1151): n is a, c, g, or t
  misc_feature (1156)..(1156): n is a, c, g, or t
  misc_feature (1162)..(1162): n is a, c, g, or t
  misc_feature (1170)..(1171): n is a, c, g, or t
gaattcaaaaaaaaaagaaaaaaaaaaaaaaaaaaaaaaaaaaaaaagagagactgcgagaaggaggtcccccacggcccttcaggatgaaagctgcggtgctgaccttggccgtgctcttcctgacggggagccaggctcggcatttctggcagcaagatgaacccccccagagcccctgggatcgagtgaaggacctggccactgtgtacgtggatgtgctcaaagacagcggcagagactatgtgtcccagtttgaaggctccgccttgggaaaacagctaaacctaaagctccttgacaactgggacagcgtgacctccaccttcagcaagctgcgcgaacagctcggccctgtgacccaggagttctgggataacctggaaaaggagacagagggcctgaggcaggagatgagcaaggatctggaggaggtgaaggccaaggtgcagccctacctggacgacttccagaagaagtggcaggaggagatggagctctaccgccagaaggtggagccgctgcgcgcagagctccaagagggcgcgcgccagaagctgcacgagctgcaagagaagctgagcccactgggcgaggagatgcgcgaccgcgcgcgcgcccatgtggacgcgctgcgcacgcatctggccccctacagcgacgagctgcgccagcgcttggccgcgcgccttgaggctctcaaggagaacggcggcgccagactggccgagtaccacgccaaggccaccgagcatctgagcacgctcagcgagaaggccaagcccgcgctcgaggacctccgccaaggcctgctgcccgtgctggagagcttcaaggtcagcttcctgagcgctctcgaggagtacactaagaagctcaacacccagtgaggcgcccgccgccgccccccttcccggtgctcagaataaacgtttccaaagtgggaaaaaaaaaaaaaaaaaaacaaaaaaaaaaaaaaaaaaaaaaaaaaaaaaaaaaaaaaaaaaaaaaaaaaaaaaaaaaaaaaaaaaaaaaaaaaaaaaaaaaaaaaaaaaaacctcggggggggccccggcccanattgccntanggggngncgattacaantcatnggccgnggtttnacaaggtgggactgggccntgnnggtnccaanttaatngccttggnngaatatccccctttggccgttggcgtcg

SEQ ID NO: 327600 - DNA, 946 bp, Homo sapiens
gaattcaaaaaaaaaagaaaaaaaaaaaaaaaaaaaaaaaaaaaaaagagagactgcgagaaggaggtcccccacggcccttcaggatgaaagctgcggtgctgaccttggccgtgctcttcctgacggggagccaggctcggcatttctggcagcaagatgaacccccccagagcccctgggatcgagtgaaggacctggccactgtgtacgtggatgtgctcaaagacagcggcagagactatgtgtcccagtttgaaggctccgccttgggaaaacagctaaacctaaagctccttgacaactgggacagcgtgacctccaccttcagcaagctgcgcgaacagctcggccctgtgacccaggagttctgggataacctggaaaaggagacagagggcctgaggcaggagatgagcaaggatctggaggaggtgaaggccaaggtgcagccctacctggacgacttccagaagaagtggcaggaggagatggagctctaccgccagaaggtggagccgctgcgcgcagagctccaagagggcgcgcgccagaagctgcacgagctgcaagagaagctgagcccactgggcgaggagatgcgcgaccgcgcgcgcgcccatgtggacgcgctgcgcacgcatctggccccctacagcgacgagctgcgccagcgcttggccgcgcgccttgaggctctcaaggagaacggcggcgccagactggccgagtaccacgccaaggccaccgagcatctgagcacgctcagcgagaaggccaagcccgcgctcgaggacctccgccaaggcctgctgcccgtgctggagagcttcaaggtcagcttcctgagcgctctcgaggagtacactaagaagctcaacacccagtgaggcgcccgccgccgccccccttcccggtgctcagaataaacgtttccaaagtggga

SEQ ID NO: 327601 - DNA, 3024 bp, Homo sapiens
tgtgagtgtgtatacaagagaggagattactgggaagggtgacgtggtgaggcgggcttgccagtgcagggtgaccctgagggtgtgcccagtggcgtgggtgtgtctgtgattgtggccaggcggggcaccctcggaggggagggttcggaagtggaatgcgaccccccagcctctttcccctaggggctgtaatctgatccctggggactccccccctagcctcccgccctcgccctcactgctgactcctcttccagatcctggggcagagtccagggcagctcaaggctcctccacacacacacccgctgaaccctgagcaccctgagctgctgagatggggcgggccggggctgccgccgtgatcccgggcctggccctgctctgggcagtggggctggggagtgccgcccccagccccccacgccttcggctctccttccaagagctccaggcctggcatggtctccagactttcagcctggagcgaacctgctgctaccaggccttgctggtggatgaggagcgtggacgcctgtttgtgggtgccgagaaccatgtggcctccctcaacctggacaacatcagcaagcgggccaagaagctggcctggccggcccctgtggaatggcgagaggagtgcaactgggcagggaaggacattggtactgagtgcatgaacttcgtgaagttgctgcatgcctacaaccgcacccatttgctggcctgtggcacgggagccttccacccaacctgtgcctttgtggaagtgggccaccgggcagaggagcccgtcctccggctggacccaggaaggatagaggatggcaaggggaagagtccttatgaccccaggcatcgggctgcctccgtgctggtgggggaggagctatactcaggggtggcagcagacctcatgggacgagactttaccatctttcgcagcctagggcaacgtccaagtctccgaacagagccacacgactcccgctggctcaatgagcccaagtttgtcaaggtattttggatcccggagagcgagaacccagacgacgacaaaatctacttcttctttcgtgagacggcggtagaggcggcgccggcactgggacgcctgtccgtgtcccgcgttggccagatctgccggaacgacgtgggcggccagcgcagcctggtcaacaagtggacgacgttcctgaaggcgcggctggtgtgctcggtgcccggcgtcgagggcgacacccacttcgatcagctccaggatgtgtttctgttgtcctcgcgggaccaccggaccccgctgctctatgccgtcttctccacgtccagcagcatcttccagggctctgcggtgtgcgtgtacagcatgaacgacgtgcgccgggccttcttgggaccctttgcacacaaggaggggcccatgcaccagtgggtgtcataccagggtcgcgtcccctacccgcggccaggcatgtgccccagcaagacctttggcaccttcagttccaccaaggacttcccagacgatgtcatccagtttgcgcggaaccaccccctcatgtacaactctgtcctgcccactggggggcgccctcttttcctacaagttggagccaattacaccttcactcaaattgccgcggaccgggttgcagccgctgacggacactatgacgtcctcttcattggcacagacgttggcacggtgctgaaggtgatctcggtccccaagggcagtaggcccagcgcagaggggctgctcctggaggagctgcacgtgtttgaggactcggccgctgtcaccagcatgcaaatttcttccaagaggcaccagctgtacgtagcctcgcggagcgcggtggcccagatcgcgttgcaccgctgcgctgcccacggccgcgtctgcaccgaatgctgtctggcgcgtgacccctactgcgcctgggacggggtcgcgtgcacgcgcttccagcccagtgccaagaggcggttccggcggcaagacgtaaggaatggcgaccccagcacgttgtgctccggagactcgtctcgtcccgcgctgctggaacacaaggtgttcggcgtggagggcagcagcgcctttctggagtgtgagccccgctcgctgcaggcgcgcgtggagtggactttccagcgcgcaggggtgacagcccacacccaggtgctggcagaggagcgcaccgagcgcaccgcccggggactactgctgcgcaggctgcggcgccgggactcgggcgtgtacttgtgcgccgccgtcgagcagggctttacgcaaccgctgcgtcgcctgtcgctgcacgtgttgagtgctacgcaggccgaacgactggcgcgggccgaggaggctgcgcccgccgcgccgccgggccccaaactctggtaccgggactttctgcagctggtggagccgggcggaggtggcagcgcgaactccctgcgcatgtgccgcccgcagcctgcgctgcagtcactgcccctggagtcgcggagaaagggccgtaaccggaggacccacgcccctgagcctcgcgctgagcgggggccgcgcagcgcaacgcactggtgaccagactgtccccacgccgggaaccaagcaggagacgacaggcgagagaggagccagacagaccctgaaaagaaggacgggttggggccgggcacattgggggtcaccggccgatggagacaccaaccgacaggccctggctgagggcagctgcgcgggcttatttattaacaggataacccttgaatgtagcagccccgggagggcggcacaggtcgggcgcaggattcagccggagggaagggacggggaagccgagctccagagcaacgaccagggccgaggaggtgcctggagtgcccaccctgggagacagaccccacctccttgggtagtgagcagtgagcagaaagctgtgaacaggctgggctgctggaggtggggcgaggcaggccgactgtactaaagtaacgcaataaacgcattatcagcca

SEQ ID NO: 327602 - DNA, 2799 bp, Homo sapiens
gctaaaacagaggcctgcctgttctggctgggatgagggcagggaggtcgaggtggctgaggtctgggggtggtgagtcagggtgggggctcgtgtaattcttctggggtgcctctgagtcatgggaggctttgcaggcctgtgcttccccagacacccaccctcgtgaggcctgggctggtcagcaagggcccccaggtccctgtagcccatgttagtacttgcctgggctgatgccgaagagagggaggggtgaggatgccactggtgagctgggacctcttaaggctacgtccctgggggaagcctcacacctccaaccctactagactgagtgcatgaacttcgtgaagttgctgcatgcctacaaccgcacccatttgctggcctgtggcacgggagccttccacccaacctgtgcctttgtggaagtgggccaccgggcagaggagcccgtcctccggctggacccaggaaggatagaggatggcaaggggaagagtccttatgaccccaggcatcgggctgcctccgtgctggtgggggaggagctatactcaggggtggcagcagacctcatgggacgagactttaccatctttcgcagcctagggcaacgtccaagtctccgaacagagccacacgactcccgctggctcaatgagcccaagtttgtcaaggtattttggatcccggagagcgagaacccagacgacgacaaaatctacttcttctttcgtgagacggcggtagaggcggcgccggcactgggacgcctgtccgtgtcccgcgttggccagatctgccggaacgacgtgggcggccagcgcagcctggtcaacaagtggacgacgttcctgaaggcgcggctggtgtgctcggtgcccggcgtcgagggcgacacccacttcgatcagctccaggatgtgtttctgttgtcctcgcgggaccaccggaccccgctgctctatgccgtcttctccacgtccagcagcatcttccagggctctgcggtgtgcgtgtacagcatgaacgacgtgcgccgggccttcttgggaccctttgcacacaaggaggggcccatgcaccagtgggtgtcataccagggtcgcgtcccctacccgcggccaggcatgtgccccagcaagacctttggcaccttcagttccaccaaggacttcccagacgatgtcatccagtttgcgcggaaccaccccctcatgtacaactctgtcctgcccactggggggcgccctcttttcctacaagttggagccaattacaccttcactcaaattgccgcggaccgggttgcagccgctgacggacactatgacgtcctcttcattggcacagacgttggcacggtgctgaaggtgatctcggtccccaagggcagtaggcccagcgcagaggggctgctcctggaggagctgcacgtgtttgaggactcggccgctgtcaccagcatgcaaatttcttccaagaggcaccagctgtacgtagcctcgcggagcgcggtggcccagatcgcgttgcaccgctgcgctgcccacggccgcgtctgcaccgaatgctgtctggcgcgtgacccctactgcgcctgggacggggtcgcgtgcacgcgcttccagcccagtgccaagaggcggttccggcggcaagacgtaaggaatggcgaccccagcacgttgtgctccggagactcgtctcgtcccgcgctgctggaacacaaggtgttcggcgtggagggcagcagcgcctttctggagtgtgagccccgctcgctgcaggcgcgcgtggagtggactttccagcgcgcaggggtgacagcccacacccaggtgctggcagaggagcgcaccgagcgcaccgcccggggactactgctgcgcaggctgcggcgccgggactcgggcgtgtacttgtgcgccgccgtcgagcagggctttacgcaaccgctgcgtcgcctgtcgctgcacgtgttgagtgctacgcaggccgaacgactggcgcgggccgaggaggctgcgcccgccgcgccgccgggccccaaactctggtaccgggactttctgcagctggtggagccgggcggaggtggcagcgcgaactccctgcgcatgtgccgcccgcagcctgcgctgcagtcactgcccctggagtcgcggagaaagggccgtaaccggaggacccacgcccctgagcctcgcgctgagcgggggccgcgcagcgcaacgcactggtgaccagactgtccccacgccgggaaccaagcaggagacgacaggcgagagaggagccagacagaccctgaaaagaaggacgggttggggccgggcacattgggggtcaccggccgatggagacaccaaccgacaggccctggctgagggcagctgcgcgggcttatttattaacaggataacccttgaatgtagcagccccgggagggcggcacaggtcgggcgcaggattcagccggagggaagggacggggaagccgagctccagagcaacgaccagggccgaggaggtgcctggagtgcccaccctgggagacagaccccacctccttgggtagtgagcagtgagcagaaagctgtgaacaggctgggctgctggaggtggggcgaggcaggccgactgtactaaagtaacgcaataaacgcattatcagccaaagctggaatggccccagcaggcggaacaaaaagaaaacagacaaacgccccaccgcaccaaagacaaaacacgaagcccaaccaacgacacaaaagggggggcacaaagaccccg

SEQ ID NO: 327603 - DNA, 3197 bp, Homo sapiens
acggcacggcgggcggtgcgtggggcggtggctggcctggtgggggcgggggctgcttcttaaaggagccgtcagagggtccccagcggccccagggtgggaaggggccagagtggagagatgctgctgcggaagtcctcggtggagtgtgagaaggcagccagtgttggcctggaagacctctagaacctgagaagaggcagcgatcctggggcagagtccagggcagctcaaggctcctccacacacacacccgctgaaccctgagcaccctgagctgctgagatggggcgggccggggctgccgccgtgatcccgggcctggccctgctctgggcagtggggctggggagtgccgcccccagccccccacgccttcggctctccttccaagagctccaggcctggcatggtctccagactttcagcctggagcgaacctgctgctaccaggccttgctggtggatgaggagcgtggacgcctgtttgtgggtgccgagaaccatgtggcctccctcaacctggacaacatcagcaagcgggccaagaagctggcctggccggcccctgtggaatggcgagaggagtgcaactgggcagggaaggacattggtactgagtgcatgaacttcgtgaagttgctgcatgcctacaaccgcacccatttgctggcctgtggcacgggagccttccacccaacctgtgcctttgtggaagtgggccaccgggcagaggagcccgtcctccggctggacccaggaaggatagaggatggcaaggggaagagtccttatgaccccaggcatcgggctgcctccgtgctggtgggggaggagctatactcaggggtggcagcagacctcatgggacgagactttaccatctttcgcagcctagggcaacgtccaagtctccgaacagagccacacgactcccgctggctcaatgagcccaagtttgtcaaggtattttggatcccggagagcgagaacccagacgacgacaaaatctacttcttctttcgtgagacggcggtagaggcggcgccggcactgggacgcctgtccgtgtcccgcgttggccagatctgccggaacgacgtgggcggccagcgcagcctggtcaacaagtggacgacgttcctgaaggcgcggctggtgtgctcggtgcccggcgtcgagggcgacacccacttcgatcagctccgtgagtgcgggagtgggtatggggttggggaggggggcagcggcgcagactccgggagcccccgccgcagcggggctgtgcgccctaccccagctaggccccttccccgcagaggatgtgtttctgttgtcctcgcgggaccaccggaccccgctgctctatgccgtcttctccacgtccagcagcatcttccagggctctgcggtgtgcgtgtacagcatgaacgacgtgcgccgggccttcttgggaccctttgcacacaaggaggggcccatgcaccagtgggtgtcataccagggtcgcgtcccctacccgcggccaggcatgtgccccagcaagacctttggcaccttcagttccaccaaggacttcccagacgatgtcatccagtttgcgcggaaccaccccctcatgtacaactctgtcctgcccactggggggcgccctcttttcctacaagttggagccaattacaccttcactcaaattgccgcggaccgggttgcagccgctgacggacactatgacgtcctcttcattggcacagacgttggcacggtgctgaaggtgatctcggtccccaagggcagtaggcccagcgcagaggggctgctcctggaggagctgcacgtgtttgaggactcggccgctgtcaccagcatgcaaatttcttccaagaggcaccagctgtacgtagcctcgcggagcgcggtggcccagatcgcgttgcaccgctgcgctgcccacggccgcgtctgcaccgaatgctgtctggcgcgtgacccctactgcgcctgggacggggtcgcgtgcacgcgcttccagcccagtgccaagaggcggttccggcggcaagacgtaaggaatggcgaccccagcacgttgtgctccggagactcgtctcgtcccgcgctgctggaacacaaggtgttcggcgtggagggcagcagcgcctttctggagtgtgagccccgctcgctgcaggcgcgcgtggagtggactttccagcgcgcaggggtgacagcccacacccaggtgctggcagaggagcgcaccgagcgcaccgcccggggactactgctgcgcaggctgcggcgccgggactcgggcgtgtacttgtgcgccgccgtcgagcagggctttacgcaaccgctgcgtcgcctgtcgctgcacgtgttgagtgctacgcaggccgaacgactggcgcgggccgaggaggctgcgcccgccgcgccgccgggccccaaactctggtaccgggactttctgcagctggtggagccgggcggaggtggcagcgcgaactccctgcgcatgtgccgcccgcagcctgcgctgcagtcactgcccctggagtcgcggagaaagggccgtaaccggaggacccacgcccctgagcctcgcgctgagcgggggccgcgcagcgcaacgcactggtgaccagactgtccccacgccgggaaccaagcaggagacgacaggcgagagaggagccagacagaccctgaaaagaaggacgggttggggccgggcacattgggggtcaccggccgatggagacaccaaccgacaggccctggctgagggcagctgcgcgggcttatttattaacaggataacccttgaatgtagcagccccgggagggcggcacaggtcgggcgcaggattcagccggagggaagggacggggaagccgagctccagagcaacgaccagggccgaggaggtgcctggagtgcccaccctgggagacagaccccacctccttgggtagtgagcagtgagcagaaagctgtgaacaggctgggctgctggaggtggggcgaggcaggccgactgtactaaagtaacgcaataaacgcattatcagccaaagctggaatggccccagcaggcggaacaaaaagaaaacagacaaacgccccaccgcaccaaagacaaaacacgaagcccaaccaacgacacaaaagggggggcacaaagaccccg

SEQ ID NO: 327604 - DNA, 2282 bp, Homo sapiens
aactggacatggtgctagaggttgggtggtcagacactgtgatcccgggtgctgtgcccgcactacgggaaggggaagcagcgcgtgggtctcgcatcaggaggcaaggccaggacccgctgacccatgcctcctgccgcggtcagagcccaagtttgtcaaggtattttggatcccggagagcgagaacccagacgacgacaaaatctacttcttctttcgtgagacggcggtagaggcggcgccggcactgggacgcctgtccgtgtcccgcgttggccagatctgccggaacgacgtgggcggccagcgcagcctggtcaacaagtggacgacgttcctgaaggcgcggctggtgtgctcggtgcccggcgtcgagggcgacacccacttcgatcagctccaggatgtgtttctgttgtcctcgcgggaccaccggaccccgctgctctatgccgtcttctccacgtccagcagcatcttccagggctctgcggtgtgcgtgtacagcatgaacgacgtgcgccgggccttcttgggaccctttgcacacaaggaggggcccatgcaccagtgggtgtcataccagggtcgcgtcccctacccgcggccaggcatgtgccccagcaagacctttggcaccttcagttccaccaaggacttcccagacgatgtcatccagtttgcgcggaaccaccccctcatgtacaactctgtcctgcccactggggggcgccctcttttcctacaagttggagccaattacaccttcactcaaattgccgcggaccgggttgcagccgctgacggacactatgacgtcctcttcattggcacagacgttggcacggtgctgaaggtgatctcggtccccaagggcagtaggcccagcgcagaggggctgctcctggaggagctgcacgtgtttgaggactcggccgctgtcaccagcatgcaaatttcttccaagaggcaccagctgtacgtagcctcgcggagcgcggtggcccagatcgcgttgcaccgctgcgctgcccacggccgcgtctgcaccgaatgctgtctggcgcgtgacccctactgcgcctgggacggggtcgcgtgcacgcgcttccagcccagtgccaagaggcggttccggcggcaagacgtaaggaatggcgaccccagcacgttgtgctccggagactcgtctcgtcccgcgctgctggaacacaaggtgttcggcgtggagggcagcagcgcctttctggagtgtgagccccgctcgctgcaggcgcgcgtggagtggactttccagcgcgcaggggtgacagcccacacccaggtgctggcagaggagcgcaccgagcgcaccgcccggggactactgctgcgcaggctgcggcgccgggactcgggcgtgtacttgtgcgccgccgtcgagcagggctttacgcaaccgctgcgtcgcctgtcgctgcacgtgttgagtgctacgcaggccgaacgactggcgcgggccgaggaggctgcgcccgccgcgccgccgggccccaaactctggtaccgggactttctgcagctggtggagccgggcggaggtggcagcgcgaactccctgcgcatgtgccgcccgcagcctgcgctgcagtcactgcccctggagtcgcggagaaagggccgtaaccggaggacccacgcccctgagcctcgcgctgagcgggggccgcgcagcgcaacgcactggtgaccagactgtccccacgccgggaaccaagcaggagacgacaggcgagagaggagccagacagaccctgaaaagaaggacgggttggggccgggcacattgggggtcaccggccgatggagacaccaaccgacaggccctggctgagggcagctgcgcgggcttatttattaacaggataacccttgaatgtagcagccccgggagggcggcacaggtcgggcgcaggattcagccggagggaagggacggggaagccgagctccagagcaacgaccagggccgaggaggtgcctggagtgcccaccctgggagacagaccccacctccttgggtagtgagcagtgagcagaaagctgtgaacaggctgggctgctggaggtggggcgaggcaggccgactgtactaaagtaacgcaataaacgcattatcagccaaagctggaatggccccagcaggcggaacaaaaagaaaacagacaaacgccccaccgcaccaaagacaaaacacgaagcccaaccaacgacacaaaagggggggcacaaagaccccg

SEQ ID NO: 327605 - DNA, 2870 bp, Homo sapiens
acggcacggcgggcggtgcgtggggcggtggctggcctggtgggggcgggggctgcttcttaaaggagccgtcagagggtccccagcggccccagggtgggaaggggccagagtggagagatgctgctgcggaagtcctcggtggagtgtgagaaggcagccagtgttggcctggaagacctctagaacctgagaagaggcagcgatcctggggcagagtccagggcagctcaaggctcctccacacacacacccgctgaaccctgagcaccctgagctgctgagatggggcgggccggggctgccgccgtgatcccgggcctggccctgctctgggcagtggggctggggagtgccgcccccagccccccacgccttcggctctccttccaagagctccaggcctggcatggtctccagactttcagcctggagcgaacctgctgctaccaggccttgctggtggatgaggagcgtggacgcctgtttgtgggtgccgagaaccatgtggcctccctcaacctggacaacatcagcaagcgggccaagaagctggcctggccggcccctgtggaatggcgagaggagtgcaactgggcagggaaggacattggtactgagtgcatgaacttcgtgaagttgctgcatgcctacaaccgcacccatttgctggcctgtggcacgggagccttccacccaacctgtgcctttgtggaagtgggccaccgggcagaggagcccgtcctccggctggacccaggaaggatagaggatggcaaggggaagagtccttatgaccccaggcatcgggctgcctccgtgctggtgggggaggagctatactcaggggtggcagcagacctcatgggacgagactttaccatctttcgcagcctagggcaacgtccaagtctccgaacagagccacacgactcccgctggctcaatgagcccaagtttgtcaaggtattttggatcccggagagcgagaacccagacgacgacaaaatctacttcttctttcgtgagacggcggtagaggcggcgccggcactgggacgcctgtccgtgtcccgcgttggccagatctgccggaacgacgtgggcggccagcgcagcctggtcaacaagtggacgacgttcctgaaggcgcggctggtgtgctcggtgcccggcgtcgagggcgacacccacttcgatcagctcctgccccagcaagacctttggcaccttcagttccaccaaggacttcccagacgatgtcatccagtttgcgcggaaccaccccctcatgtacaactctgtcctgcccactggggggcgccctcttttcctacaagttggagccaattacaccttcactcaaattgccgcggaccgggttgcagccgctgacggacactatgacgtcctcttcattggcacagacgttggcacggtgctgaaggtgatctcggtccccaagggcagtaggcccagcgcagaggggctgctcctggaggagctgcacgtgtttgaggactcggccgctgtcaccagcatgcaaatttcttccaagaggcaccagctgtacgtagcctcgcggagcgcggtggcccagatcgcgttgcaccgctgcgctgcccacggccgcgtctgcaccgaatgctgtctggcgcgtgacccctactgcgcctgggacggggtcgcgtgcacgcgcttccagcccagtgccaagaggcggttccggcggcaagacgtaaggaatggcgaccccagcacgttgtgctccggagactcgtctcgtcccgcgctgctggaacacaaggtgttcggcgtggagggcagcagcgcctttctggagtgtgagccccgctcgctgcaggcgcgcgtggagtggactttccagcgcgcaggggtgacagcccacacccaggtgctggcagaggagcgcaccgagcgcaccgcccggggactactgctgcgcaggctgcggcgccgggactcgggcgtgtacttgtgcgccgccgtcgagcagggctttacgcaaccgctgcgtcgcctgtcgctgcacgtgttgagtgctacgcaggccgaacgactggcgcgggccgaggaggctgcgcccgccgcgccgccgggccccaaactctggtaccgggactttctgcagctggtggagccgggcggaggtggcagcgcgaactccctgcgcatgtgccgcccgcagcctgcgctgcagtcactgcccctggagtcgcggagaaagggccgtaaccggaggacccacgcccctgagcctcgcgctgagcgggggccgcgcagcgcaacgcactggtgaccagactgtccccacgccgggaaccaagcaggagacgacaggcgagagaggagccagacagaccctgaaaagaaggacgggttggggccgggcacattgggggtcaccggccgatggagacaccaaccgacaggccctggctgagggcagctgcgcgggcttatttattaacaggataacccttgaatgtagcagccccgggagggcggcacaggtcgggcgcaggattcagccggagggaagggacggggaagccgagctccagagcaacgaccagggccgaggaggtgcctggagtgcccaccctgggagacagaccccacctccttgggtagtgagcagtgagcagaaagctgtgaacaggctgggctgctggaggtggggcgaggcaggccgactgtactaaagtaacgcaataaacgcattatcagccaaagctggaatggccccagcaggcggaacaaaaagaaaacagacaaacgccccaccgcaccaaagacaaaacacgaagcccaaccaacgacacaaaagggggggcacaaagaccccg

SEQ ID NO: 327606 - DNA, 1896 bp, Homo sapiens
tgctctaaggatcccggtgggttctgcagaggatgtgtcgtgtcctgcgggacgcggacccgctgctctatgccgtcttctccacgtccagcatcttccagggctctgcggtgtgcgtgtacagcatgaacgacgtgcgccgggccttcttgggaccctttgcacacaaggaggggcccatgcaccagtgggtgtcataccagggtcgcgtcccctacccgcggccaggcatgtgccccagcaagacctttggcaccttcagttccaccaaggacttcccagacgatgtcatccagtttgcgcggaaccaccccctcatgtacaactctgtcctgcccactggggggcgccctcttttcctacaagttggagccaattacaccttcactcaaattgccgcggaccgggttgcagccgctgacggacactatgacgtcctcttcattggcacagacgttggcacggtgctgaaggtgatctcggtccccaagggcagtaggcccagcgcagaggggctgctcctggaggagctgcacgtgtttgaggactcggccgctgtcaccagcatgcaaatttcttccaagaggcaccagctgtacgtagcctcgcggagcgcggtggcccagatcgcgttgcaccgctgcgctgcccacggccgcgtctgcaccgaatgctgtctggcgcgtgacccctactgcgcctgggacggggtcgcgtgcacgcgcttccagcccagtgccaagaggcggttccggcggcaagacgtaaggaatggcgaccccagcacgttgtgctccggagactcgtctcgtcccgcgctgctggaacacaaggtgttcggcgtggagggcagcagcgcctttctggagtgtgagccccgctcgctgcaggcgcgcgtggagtggactttccagcgcgcaggggtgacagcccacacccaggtgctggcagaggagcgcaccgagcgcaccgcccggggactactgctgcgcaggctgcggcgccgggactcgggcgtgtacttgtgcgccgccgtcgagcagggctttacgcaaccgctgcgtcgcctgtcgctgcacgtgttgagtgctacgcaggccgaacgactggcgcgggccgaggaggctgcgcccgccgcgccgccgggccccaaactctggtaccgggactttctgcagctggtggagccgggcggaggtggcagcgcgaactccctgcgcatgtgccgcccgcagcctgcgctgcagtcactgcccctggagtcgcggagaaagggccgtaaccggaggacccacgcccctgagcctcgcgctgagcgggggccgcgcagcgcaacgcactggtgaccagactgtccccacgccgggaaccaagcaggagacgacaggcgagagaggagccagacagaccctgaaaagaaggacgggttggggccgggcacattgggggtcaccggccgatggagacaccaaccgacaggccctggctgagggcagctgcgcgggcttatttattaacaggataacccttgaatgtagcagccccgggagggcggcacaggtcgggcgcaggattcagccggagggaagggacggggaagccgagctccagagcaacgaccagggccgaggaggtgcctggagtgcccaccctgggagacagaccccacctccttgggtagtgagcagtgagcagaaagctgtgaacaggctgggctgctggaggtggggcgaggcaggccgactgtactaaagtaacgcaataaacgcattatcagccaaagctggaatggccccagcaggcggaacaaaaagaaaacagacaaacgccccaccgcaccaaagacaaaacacgaagcccaaccaacgacacaaaagggggggcacaaagaccccg

SEQ ID NO: 327607 - DNA, 2994 bp, Homo sapiens
acggcacggcgggcggtgcgtggggcggtggctggcctggtgggggcgggggctgcttcttaaaggagccgtcagagggtccccagcggccccagggtgggaaggggccagagtggagagatgctgctgcggaagtcctcggtggagtgtgagaaggcagccagtgttggcctggaagacctctagaacctgagaagaggcagcgatcctggggcagagtccagggcagctcaaggctcctccacacacacacccgctgaaccctgagcaccctgagctgctgagatggggcgggccggggctgccgccgtgatcccgggcctggccctgctctgggcagtggggctggggagtgccgcccccagccccccacgccttcggctctccttccaagagctccaggcctggcatggtctccagactttcagcctggagcgaacctgctgctaccaggccttgctggtggatgaggagcgtggacgcctgtttgtgggtgccgagaaccatgtggcctccctcaacctggacaacatcagcaagcgggccaagaagctggcctggccggcccctgtggaatggcgagaggagtgcaactgggcagggaaggacattggtactgagtgcatgaacttcgtgaagttgctgcatgcctacaaccgcacccatttgctggcctgtggcacgggagccttccacccaacctgtgcctttgtggaagtgggccaccgggcagaggagcccgtcctccggctggacccaggaaggatagaggatggcaaggggaagagtccttatgaccccaggcatcgggctgcctccgtgctggtgggggaggagctatactcaggggtggcagcagacctcatgggacgagactttaccatctttcgcagcctagggcaacgtccaagtctccgaacagagccacacgactcccgctggctcaatgagcccaagtttgtcaaggtattttggatcccggagagcgagaacccagacgacgacaaaatctacttcttctttcgtgagacggcggtagaggcggcgccggcactgggacgcctgtccgtgtcccgcgttggccagatctgccggaacgacgtgggcggccagcgcagcctggtcaacaagtggacgacgttcctgaaggcgcggctggtgtgctcggtgcccggcgtcgagggcgacacccacttcgatcagctccaggatgtgtttctgttgtcctcgcgggaccaccggaccccgctgctctatgccgtcttctccacgtccagcagcatcttccagggctctgcggtgtgcgtgtacagcatgaacgacgtgcgccgggccttcttgggaccctttgcacacaaggaggggcccatgcaccagtgggtgtcataccagggtcgcgtcccctacccgcggccaggcatgtgccccagcaagacctttggcaccttcagttccaccaaggacttcccagacgatgtcatccagtttgcgcggaaccaccccctcatgtacaactctgtcctgcccactggggggcgccctcttttcctacaagttggagccaattacaccttcactcaaattgccgcggaccgggttgcagccgctgacggacactatgacgtcctcttcattggcacagacgttggcacggtgctgaaggtgatctcggtccccaagggcagtaggcccagcgcagaggggctgctcctggaggagctgcacgtgtttgaggactcggccgctgtcaccagcatgcaaatttcttccaagaggcaccagctgtacgtagcctcgcggagcgcggtggcccagatcgcgttgcaccgctgcgctgcccacggccgcgtctgcaccgaatgctgtctggcgcgtgacccctactgcgcctgggacggggtcgcgtgcacgcgcttccagcccagtgccaagaggcggttccggcggcaagacgtaaggaatggcgaccccagcacgttgtgctccggagactcgtctcgtcccgcgctgctggaacacaaggtgttcggcgtggagggcagcagcgcctttctggagtgtgagccccgctcgctgcaggcgcgcgtggagtggactttccagcgcgcaggggtgacagcccacacccaggtgctggcagaggagcgcaccgagcgcaccgcccggggactactgctgcgcaggctgcggcgccgggactcgggcgtgtacttgtgcgccgccgtcgagcagggctttacgcaaccgctgcgtcgcctgtcgctgcacgtgttgagtgctacgcaggccgaacgactggcgcgggccgaggaggctgcgcccgccgcgccgccgggccccaaactctggtaccgggactttctgcagctggtggagccgggcggaggtggcagcgcgaactccctgcgcatgtgccgcccgcagcctgcgctgcagtcactgcccctggagtcgcggagaaagggccgtaaccggaggacccacgcccctgagcctcgcgctgagcgggggccgcgcagcgcaacgcactggtgaccagactgtccccacgccgggaaccaagcaggagacgacaggcgagagaggagccagacagaccctgaaaagaaggacgggttggggccgggcacattgggggtcaccggccgatggagacaccaaccgacaggccctggctgagggcagctgcgcgggcttatttattaacaggataacccttgaatgtagcagccccgggagggcggcacaggtcgggcgcaggattcagccggagggaagggacggggaagccgagctccagagcaacgaccagggccgaggaggtgcctggagtgcccaccctgggagacagaccccacctccttgggtagtgagcagtgagcagaaagctgtgaacaggctgggctgctggaggtggggcgaggcaggccgactgtactaaagtaacgcaataaacgcattatcagccagaataaaaaaaaaaagtcgtatcga

SEQ ID NO: 327608 - DNA, 2915 bp, Homo sapiens
acggcacggcgggcggtgcgtggggcggtggctggcctggtgggggcgggggctgcttcttaaaggagccgtcagagggtccccagcggccccagggtgggaaggggccagagtggagagatgctgctgcggaagtcctcggtggagtgtgagaaggcagccagtgttggcctggaagacctctagaacctgagaagaggcagcgatcctggggcagagtccagggcagctcaaggctcctccacacacacacccgctgaaccctgagcaccctgagctgctgagatggggcgggccggggctgccgccgtgatcccgggcctggccctgctctgggcagtggggctggggagtgccgcccccagccccccacgccttcggctctccttccaagagctccaggcctggcatggtctccagactttcagcctggagcgaacctgctgctaccaggccttgctggtggatgaggagcgtggacgcctgtttgtgggtgccgagaaccatgtggcctccctcaacctggacaacatcagcaagcgggccaagaagctggcctggccggcccctgtggaatggcgagaggagtgcaactgggcagggaaggacattggtactgagtgcatgaacttcgtgaagttgctgcatgcctacaaccgcacccatttgctggcctgtggcacgggagccttccacccaacctgtgcctttgtggaagtgggccaccgggcagaggagcccgtcctccggctggacccaggaaggatagaggatggcaaggggaagagtccttatgaccccaggcatcgggctgcctccgtgctggtgggggaggagctatactcaggggtggcagcagacctcatgggacgagactttaccatctttcgcagcctagggcaacgtccaagtctccgaacagagccacacgactcccgctggctcaatgagcccaagtttgtcaaggtattttggatcccggagagcgagaacccagacgacgacaaaatctacttcttctttcgtgagacggcggtagaggcggcgccggcactgggacgcctgtccgtgtcccgcgttggccagatctgccggaacgacgtgggcggccagcgcagcctggtcaacaagtggacgacgttcctgaaggcgcggctggtgtgctcggtgcccggcgtcgagggcgacacccacttcgatcagctccaggatgtgtttctgttgtcctcgcgggaccaccggaccccgctgctctatgccgtcttctccacgtccagcagcatcttccagggctctgcggtgtgcgtgtacagcatgaacgacgtgcgccgggccttcttgggaccctttgcacacaaggaggggcccatgcaccagtgggtgtcataccagggtcgcgtcccctacccgcggccaggcatgtgccccagcaagacctttggcaccttcagttccaccaaggacttcccagacgatgtcatccagtttgcgcggaaccaccccctcatgtacaactctgtcctgcccactggggggcgccctcttttcctacaagttggagccaattacaccttcactcaaattgccgcggaccgggttgcagccgctgacggacactatgacgtcctcttcattggcacagacgttggcacggtgctgaaggtgatctcggtccccaagggcagtaggcccagcgcagaggggctgctcctggaggagctgcacgtgtttgaggactcggccgctgtcaccagcatgcaaatttcttccaagaggcaccagctgtacgtagcctcgcggagcgcggtggcccagatcgcgttgcaccgctgcgctgcccacggccgcgtctgcaccgaatgctgtctggcgcgtgacccctactgcgcctgggacggggtcgcgtgcacgcgcttccagcccagtgccaagaggcggttccggcggcaagacgtaaggaatggcgaccccagcacgttgtgctccggagactcgtctcgtcccgcgctgctggaacacaaggtgttcggcgtggagggcagcagcgcctttctggagtgtgagccccgctcgctgcaggcgcgcgtggagtggactttccagcgcgcaggggtgacagcccacacccaggtgctggcagaggagcgcaccgagcgcaccgcccggggactactgctgcgcaggctgcggcgccgggactcgggcgtgtacttgtgcgccgccgtcgagcagggctttacgcaaccgctgcgtcgcctgtcgctgcacgtgttgagtgctacgcaggccgaacgactggcgcgggccgaggaggctgcgcccgccgcgccgccgggccccaaactctggtaccgggactttctgcagctggtggagccgggcggaggtggcagcgcgaactccctgcgcatgtgccgcccgcagcctgcgctgcagtcactgcccctggagtcgcggagaaagggccgtaaccggaggacccacgcccctgagcctcgcgctgagcgggggccgcgcagcgcaacgcactggtgaccagactgtccccacgccgggaaccaagcaggagacgacaggcgagagaggagccagacagaccctgaccaaccgacaggccctggctgagggcagctgcgcgggcttatttattaacaggataacccttgaatgtagcagccccgggagggcggcacaggtcgggcgcaggattcagccggagggaagggacggggaagccgagctccagagcaacgaccagggccgaggaggtgcctggagtgcccaccctgggagacagaccccacctccttgggtagtgagcagtgagcagaaagctgtgaacaggctgggctgctggaggtggggcgaggcaggccgactgtactaaagtaacgcaataaacgcattatcagcca

SEQ ID NO: 327609 - DNA, 1793 bp, Homo sapiens
acggcacggcgggcggtgcgtggggcggtggctggcctggtgggggcgggggctgcttcttaaaggagccgtcagagggtccccagcggccccagggtgggaaggggccagagtggagagatgctgctgcggaagtcctcggtggagtgtgagaaggcagccagtgttggcctggaagacctctagaacctgagaagaggcagcgatcctggggcagagtccagggcagctcaaggctcctccacacacacacccgctgaaccctgagcaccctgagctgctgagatggggcgggccggggctgccgccgtgatcccgggcctggccctgctctgggcagtggggctggggagtgccgcccccagccccccacgccttcggctctccttccaagagctccaggcctggcatggtctccagactttcagcctggagcgaacctgctgctaccaggccttgctggtggatgaggagcgtggacgcctgtttgtgggtgccgagaaccatgtggcctccctcaacctggacaacatcagcaagcgggccaagaagctggcctggccggcccctgtggaatggcgagaggagtgcaactgggcagggaaggacattggtactgagtgcatgaacttcgtgaagttgctgcatgcctacaaccgcacccatttgctggcctgtggcacgggagccttccacccaacctgtgcctttgtggaagtgggccaccgggcagaggagcccgtcctccggctggacccaggaaggatagaggatggcaaggggaagagtccttatgaccccaggcatcgggctgcctccgtgctggtgggggaggagctatactcaggggtggcagcagacctcatgggacgagactttaccatctttcgcagcctagggcaacgtccaagtctccgaacagagccacacgactcccgctggctcaatgagcccaagtttgtcaaggtattttggatcccggagagcgagaacccagacgacgacaaaatctacttcttctttcgtgagacggcggtagaggcggcgccggcactgggacgcctgtccgtgtcccgcgttggccagatctgccggaacgacgtgggcggccagcgcagcctggtcaacaagtggacgacgttcctgaaggcgcggctggtgtgctcggtgcccggcgtcgagggcgacacccacttcgatcagctccaggatgtgtttctgttgtcctcgcgggaccaccggaccccgctgctctatgccgtcttctccacgtccagcagcatcttccagggctctgcggtgtgcgtgtacagcatgaacgacgtgcgccgggccttcttgggaccctttgcacacaaggaggggcccatgcaccagtgggtgtcataccagggtcgcgtcccctacccgcggccaggcatgtgccccagcaagacctttggcaccttcagttccaccaaggacttcccagacgatgtcatccagtttgcgcggaaccaccccctcatgtacaactctgtcctgcccactggggggcgccctcttttcctacaagttggagccaattacaccttcactcaaattgccgcggaccgggttgcagccgctgacggacactatgacgtcctcttcattggcacagacgttggcacggtgctgaaggtgatctcggtccccaagggcagtaggcccagcgcagaggggctgctcctggaggagctgcacgtgtttgaggtgaggcctcacccccagtcgcccgggacccccccaccccactaagccctgaccccgtc

SEQ ID NO: 327610 - DNA, 2109 bp, Homo sapiens
acggcacggcgggcggtgcgtggggcggtggctggcctggtgggggcgggggctgcttcttaaaggagccgtcagagggtccccagcggccccagggtgggaaggggccagagtggagagatgctgctgcggaagtcctcggtggagtgtgagaaggcagccagtgttggcctggaagacctctagaacctgagaagaggcagcgatcctggggcagagtccagggcagctcaaggctcctccacacacacacccgctgaaccctgagcaccctgagctgctgagatggggcgggccggggctgccgccgtgatcccgggcctggccctgctctgggcagtggggctggggagtgccgcccccagccccccacgccttcggctctccttccaagagctccaggcctggcatggtctccagactttcagcctggagcgaacctgctgctaccaggccttgctggtggatgaggagcgtggacgcctgtttgtgggtgccgagaaccatgtggcctccctcaacctggacaacatcagcaagcgggccaagaagctggcctggccggcccctgtggaatggcgagaggagtgcaactgggcagggaaggacattggtactgagtgcatgaacttcgtgaagttgctgcatgcctacaaccgcacccatttgctggcctgtggcacgggagccttccacccaacctgtgcctttgtggaagtgggccaccgggcagaggagcccgtcctccggctggacccaggaaggatagaggatggcaaggggaagagtccttatgaccccaggcatcgggctgcctccgtgctggtgggggaggagctatactcaggggtggcagcagacctcatgggacgagactttaccatctttcgcagcctagggcaacgtccaagtctccgaacagagccacacgactcccgctggctcaatgagcccaagtttgtcaaggtattttggatcccggagagcgagaacccagacgacgacaaaatctacttcttctttcgtgagacggcggtagaggcggcgccggcactgggacgcctgtccgtgtcccgcgttggccagatctgccggaacgacgtgggcggccagcgcagcctggtcaacaagtggacgacgttcctgaaggcgcggctggtgtgctcggtgcccggcgtcgagggcgacacccacttcgatcagctccaggatgtgtttctgttgtcctcgcgggaccaccggaccccgctgctctatgccgtcttctccacgtccagcagcatcttccagggctctgcggtgtgcgtgtacagcatgaacgacgtgcgccgggccttcttgggaccctttgcacacaaggaggggcccatgcaccagtgggtgtcataccagggtcgcgtcccctacccgcggccaggcatggttcgtagcccagggacttctgctacaacccacttcaaagcctcaagggtttgagaacttggcctggggtcttcttggtgaatgtggtttcttcctttagttatgggtgggaaaacgtttccatcataagacaaggcttgtttcccgcctctgacttcctagggcaaggctgatctcctctctaattctcagggcagggttctgtccccatccccctccatgttcccagaggctgggcatggagggctgcctatcaagcccccatatctatatccctgctgtgcctccctttcccccacccccagtgccccagcaagacctttggcaccttcagttccaccaaggacttcccagacgatgtcatccagtttgcgcggaaccaccccctcatgtacaactctgtcctgcccactggggggcgccctcttttcctacaagttggagccaattacaccttcactcaaattgccgcggaccgggttgcagccgctgacggacactatgacgtcctcttcattggcacagacgttggcacggtgctgaaggtgatctcggtccccaagggcagtaggcccagcgcagaggggctgctcctggaggagctgcacgtgtttgagactcgccgctgtcacccgcatgctattttcttccaagaggcaccaagcttacctcatgccgtggtcccca

SEQ ID NO: 327611 - DNA, 1579 bp, Homo sapiens
acggcacggcgggcggtgcgtggggcggtggctggcctggtgggggcgggggctgcttcttaaaggagccgtcagagggtccccagcggccccagggtgggaaggggccagagtggagagatgctgctgcggaagtcctcggtggagtgtgagaaggcagccagtgttggcctggaagacctctagaacctgagaagaggcagcgatcctggggcagagtccagggcagctcaaggctcctccacacacacacccgctgaaccctgagcaccctgagctgctgagatggggcgggccggggctgccgccgtgatcccgggcctggccctgctctgggcagtggggctggggagtgccgcccccagccccccacgccttcggctctccttccaagagctccaggcctggcatggtctccagactttcagcctggagcgaacctgctgctaccaggccttgctggtggatgaggagcgtggacgcctgtttgtgggtgccgagaaccatgtggcctccctcaacctggacaacatcagcaagcgggccaagaagctggcctggccggcccctgtggaatggcgagaggagtgcaactgggcagggaaggacattggtactgagtgcatgaacttcgtgaagttgctgcatgcctacaaccgcacccatttgctggcctgtggcacgggagccttccacccaacctgtgcctttgtggaagtgggccaccgggcagaggagcccgtcctccggctggacccaggaaggatagaggatggcaaggggaagagtccttatgaccccaggcatcgggctgcctccgtgctggtgggggaggagctatactcaggggtggcagcagacctcatgggacgagactttaccatctttcgcagcctagggcaacgtccaagtctccgaacagagccacacgactcccgctggctcaatggtgagaggctggtggggttggtgggtagaggtcgtcaccctcccacagggcaggtgccaagcaaggcccataaagtaagtgagcagtgggtgtggccaggtcttaccaaataccctccttaatcaggcactggcgtcacagagacagacaagacaggtatgaccgtgacctctttgagttcacagatcacatacatgataagatcaagtccaatggccttgaggccagagagagacaagggaggaagggaaaaggagactgggtggctggagggggttgggtaaaggaagccgctgtgctgaggggagtatgagctaattcccaagcacaagacagctagccagcaaaatttagggatgagcattccaggcagagggagcattccaggcagagggagcaactagtgcaaaggcctggatgcaagaacaagcaaaggaatagacttgcagagctagcaatgaaaagggggcctggactgtcaggggccagagtcatttattctaagagtcatgggggctgggcacaatggcttgcacctgtaatcccagcactttgggaggctgaggcgggtggatcacttgagcccagcagttcaagatcagtttgggcaacatgatgagaccctatgtc

SEQ ID NO: 327612 - DNA, 567 bp, Homo sapiens
acggcacggcgggcggtgcgtggggcggtggctggcctggtgggggcgggggctgcttcttaaaggagccgtcagagggtccccagcggccccagggtgggaaggggccagagtggagagatgctgctgcggaagtcctcggtggagtgtgagaaggcagccagtgttggcctggaagacctctagaacctgagaagaggcagcgatcctggggcagagtccagggcagctcaaggctcctccacacacacacccgctgaaccctgagcaccctgagctgctgagatggggcggggccgaggaggtgcctggagtgcccaccctgggagacagaccccacctccttgggtagtgagcagtgagcagaaagctgtgaacaggctgggctgctggaggtggggcgaggcaggccgactgtactaaagtaacgcaataaacgcattatcagccaaagctggaatggccccagcaggcggaacaaaaagaaaacagacaaacgccccaccgcaccaaagacaaaacacgaagcccaaccaacgacacaaaagggggggcacaaagaccccg

SEQ ID NO: 327613 - DNA, 2969 bp, Homo sapiens
acggcacggcgggcggtgcgtggggcggtggctggcctggtgggggcgggggctgcttcttaaaggagccgtcagagggtccccagcggccccagggtgggaaggggccagagtggagagatgctgctgcggaagtcctcggtggagtgtgagaaggcagccagtgttggcctggaagacctctagaacctgagaagaggcagcgatcctggggcagagtccagggcagctcaaggctcctccacacacacacccgctgaaccctgagcaccctgagctgctgagatggggcgggccggggctgccgccgtgatcccgggcctggccctgctctgggcagtggggctggggagtgccgcccccagccccccacgccttcggctctccttccaagagctccaggcctggcatggtctccagactttcagcctggagcgaacctgctgctaccaggccttgctggtggatgaggagcgtggacgcctgtttgtgggtgccgagaaccatgtggcctccctcaacctggacaacatcagcaagcgggccaagaagctggcctggccggcccctgtggaatggcgagaggagtgcaactgggcagggaaggacattggtactgagtgcatgaacttcgtgaagttgctgcatgcctacaaccgcacccatttgctggcctgtggcacgggagccttccacccaacctgtgcctttgtggaagtgggccaccgggcagaggagcccgtcctccggctggacccaggaaggatagaggatggcaaggggaagagtccttatgaccccaggcatcgggctgcctccgtgctggtgggggaggagctatactcaggggtggcagcagacctcatgggacgagactttaccatctttcgcagcctagggcaacgtccaagtctccgaacagagccacacgactcccgctggctcaatgagcccaagtttgtcaaggtattttggatcccggagagcgagaacccagacgacgacaaaatctacttcttctttcgtgagacggcggtagaggcggcgccggcactgggacgcctgtccgtgtcccgcgttggccagatctgccggaacgacgtgggcggccagcgcagcctggtcaacaagtggacgacgttcctgaaggcgcggctggtgtgctcggtgcccggcgtcgagggcgacacccacttcgatcagctccaggatgtgtttctgttgtcctcgcgggaccaccggaccccgctgctctatgccgtcttctccacgtccagcagcatcttccagggctctgcggtgtgcgtgtacagcatgaacgacgtgcgccgggccttcttgggaccctttgcacacaaggaggggcccatgcaccagtgggtgtcataccagggtcgcgtcccctacccgcggccaggcatgtgccccagcaagacctttggcaccttcagttccaccaaggacttcccagacgatgtcatccagtttgcgcggaaccaccccctcatgtacaactctgtcctgcccactggggggcgccctcttttcctacaagttggagccaattacaccttcactcaaattgccgcggaccgggttgcagccgctgacggacactatgacgtcctcttcattggcacagacgttggcacggtgctgaaggtgatctcggtccccaagggcagtaggcccagcgcagaggggctgctcctggaggagctgcacgtgtttgaggactcggccgctgtcaccagcatgcaaatttcttccaagaggcaccagctgtacgtagcctcgcggagcgcggtggcccagatcgcgttgcaccgctgcgctgcccacggccgcgtctgcaccgaatgctgtctggcgcgtgacccctactgcgcctgggacggggtcgcgtgcacgcgcttccagcccagtgccaagaggcggttccggcggcaagacgtaaggaatggcgaccccagcacgttgtgctccggagactcgtctcgtcccgcgctgctggaacacaaggtgttcggcgtggagggcagcagcgcctttctggagtgtgagccccgctcgctgcaggcgcgcgtggagtggactttccagcgcgcaggggtgacagcccacacccaggtgctggcagaggagcgcaccgagcgcaccgcccggggactactgctgcgcaggctgcggcgccgggactcgggcgtgtacttgtgcgccgccgtcgagcagggctttacgcaaccgctgcgtcgcctgtcgctgcacgtgttgagtgctacgcaggccgaacgactggcgcgggccgaggaggctgcgcccgccgcgccgccgggccccaaactctggtaccgggactttctgcagctggtggagccgggcggaggtggcagcgcgaactccctgcgcatgtgccgcccgcagcctgcgctgcagtcactgcccctggagtcgcggagaaagggccgtaaccggaggacccacgcccctgagcctcgcgctgagcgggggccgcgcagcgcaacgcactggtgaccagactgtccccacgccgggaaccaagcaggagacgacaggcgagagaggagccagacagaccctgaaaagaaggacgggttggggccgggcacattgggggtcaccggccgatggagacaccaaccgacaggccctggctgagggcagctgcgcgggcttatttattaacaggataacccttgaatgtagcagccccgggagggcggcacaggtcgggcgcaggattcagccggagggaagggacggggaagccgagctccagagcaacgaccagggccgaggaggtgcctggagtgcccaccctgggagacagaccccacctccttgggtagtgagcagtgagcagaaagctgtgaacaggctgggctgctggaggtggggcgaggcaggccgactgtactaaagtaacgcaataaacgcattatcagcca

SEQ ID NO: 327614 - DNA, 3390 bp, Homo sapiens
acggcacggcgggcggtgcgtggggcggtggctggcctggtgggggcgggggctgcttcttaaaggagccgtcagagggtccccagcggccccagggtgggaaggggccagagtggagagatgctgctgcggaagtcctcggtggagtgtgagaaggcagccagtgttggcctggaagacctctagaacctgagaagaggcagcgatcctggggcagagtccagggcagctcaaggctcctccacacacacacccgctgaaccctgagcaccctgagctgctgagatggggcgggccggggctgccgccgtgatcccgggcctggccctgctctgggcagtggggctggggagtgccgcccccagccccccacgccttcggctctccttccaagagctccaggcctggcatggtctccagactttcagcctggagcgaacctgctgctaccaggccttgctggtggatgaggagcgtggacgcctgtttgtgggtgccgagaaccatgtggcctccctcaacctggacaacatcagcaagcgggccaagaagctggcctggccggcccctgtggaatggcgagaggagtgcaactgggcagggaaggacattggtactgagtgcatgaacttcgtgaagttgctgcatgcctacaaccgcacccatttgctggcctgtggcacgggagccttccacccaacctgtgcctttgtggaagtgggccaccgggcagaggagcccgtcctccggctggacccaggaaggatagaggatggcaaggggaagagtccttatgaccccaggcatcgggctgcctccgtgctggtgggggaggagctatactcaggggtggcagcagacctcatgggacgagactttaccatctttcgcagcctagggcaacgtccaagtctccgaacagagccacacgactcccgctggctcaatgagcccaagtttgtcaaggtattttggatcccggagagcgagaacccagacgacgacaaaatctacttcttctttcgtgagacggcggtagaggcggcgccggcactgggacgcctgtccgtgtcccgcgttggccagatctgccggaacgacgtgggcggccagcgcagcctggtcaacaagtggacgacgttcctgaaggcgcggctggtgtgctcggtgcccggcgtcgagggcgacacccacttcgatcagctccaggatgtgtttctgttgtcctcgcgggaccaccggaccccgctgctctatgccgtcttctccacgtccagcagcatcttccagggctctgcggtgtgcgtgtacagcatgaacgacgtgcgccgggccttcttgggaccctttgcacacaaggaggggcccatgcaccagtgggtgtcataccagggtcgcgtcccctacccgcggccaggcatggttcgtagcccagggacttctgctacaacccacttcaaagcctcaagggtttgagaacttggcctggggtcttcttggtgaatgtggtttcttcctttagttatgggtgggaaaacgtttccatcataagacaaggcttgtttcccgcctctgacttcctagggcaaggctgatctcctctctaattctcagggcagggttctgtccccatccccctccatgttcccagaggctgggcatggagggctgcctatcaagcccccatatctatatccctgctgtgcctccctttcccccacccccagtgccccagcaagacctttggcaccttcagttccaccaaggacttcccagacgatgtcatccagtttgcgcggaaccaccccctcatgtacaactctgtcctgcccactggggggcgccctcttttcctacaagttggagccaattacaccttcactcaaattgccgcggaccgggttgcagccgctgacggacactatgacgtcctcttcattggcacagacgttggcacggtgctgaaggtgatctcggtccccaagggcagtaggcccagcgcagaggggctgctcctggaggagctgcacgtgtttgaggactcggccgctgtcaccagcatgcaaatttcttccaagaggcaccagctgtacgtagcctcgcggagcgcggtggcccagatcgcgttgcaccgctgcgctgcccacggccgcgtctgcaccgaatgctgtctggcgcgtgacccctactgcgcctgggacggggtcgcgtgcacgcgcttccagcccagtgccaagaggcggttccggcggcaagacgtaaggaatggcgaccccagcacgttgtgctccggagactcgtctcgtcccgcgctgctggaacacaaggtgttcggcgtggagggcagcagcgcctttctggagtgtgagccccgctcgctgcaggcgcgcgtggagtggactttccagcgcgcaggggtgacagcccacacccaggtgctggcagaggagcgcaccgagcgcaccgcccggggactactgctgcgcaggctgcggcgccgggactcgggcgtgtacttgtgcgccgccgtcgagcagggctttacgcaaccgctgcgtcgcctgtcgctgcacgtgttgagtgctacgcaggccgaacgactggcgcgggccgaggaggctgcgcccgccgcgccgccgggccccaaactctggtaccgggactttctgcagctggtggagccgggcggaggtggcagcgcgaactccctgcgcatgtgccgcccgcagcctgcgctgcagtcactgcccctggagtcgcggagaaagggccgtaaccggaggacccacgcccctgagcctcgcgctgagcgggggccgcgcagcgcaacgcactggtgaccagactgtccccacgccgggaaccaagcaggagacgacaggcgagagaggagccagacagaccctgaaaagaaggacgggttggggccgggcacattgggggtcaccggccgatggagacaccaaccgacaggccctggctgagggcagctgcgcgggcttatttattaacaggataacccttgaatgtagcagccccgggagggcggcacaggtcgggcgcaggattcagccggagggaagggacggggaagccgagctccagagcaacgaccagggccgaggaggtgcctggagtgcccaccctgggagacagaccccacctccttgggtagtgagcagtgagcagaaagctgtgaacaggctgggctgctggaggtggggcgaggcaggccgactgtactaaagtaacgcaataaacgcattatcagccaaagctggaatggccccagcaggcggaacaaaaagaaaacagacaaacgccccaccgcaccaaagacaaaacacgaagcccaaccaacgacacaaaagggggggcacaaagaccccg

SEQ ID NO: 327615 - DNA, 2331 bp, Homo sapiens
tgaactgcattttgcaagtcgacatactagaggctccccaactcagggcgagctgcaggcctcggtcatcaccctactacaccatgtttgtcacctggtcagccctatccagtataccctgaacagaaatgcaacccccatttgccaacccagctgggcaacgagacagttgtggcaggccccgctggctcaatgagcccaagtttgtcaaggtattttggatcccggagagcgagaacccagacgacgacaaaatctacttcttctttcgtgagacggcggtagaggcggcgccggcactgggacgcctgtccgtgtcccgcgttggccagatctgccggaacgacgtgggcggccagcgcagcctggtcaacaagtggacgacgttcctgaaggcgcggctggtgtgctcggtgcccggcgtcgagggcgacacccacttcgatcagctccaggatgtgtttctgttgtcctcgcgggaccaccggaccccgctgctctatgccgtcttctccacgtccagcagcatcttccagggctctgcggtgtgcgtgtacagcatgaacgacgtgcgccgggccttcttgggaccctttgcacacaaggaggggcccatgcaccagtgggtgtcataccagggtcgcgtcccctacccgcggccaggcatgtgccccagcaagacctttggcaccttcagttccaccaaggacttcccagacgatgtcatccagtttgcgcggaaccaccccctcatgtacaactctgtcctgcccactggggggcgccctcttttcctacaagttggagccaattacaccttcactcaaattgccgcggaccgggttgcagccgctgacggacactatgacgtcctcttcattggcacagacgttggcacggtgctgaaggtgatctcggtccccaagggcagtaggcccagcgcagaggggctgctcctggaggagctgcacgtgtttgaggactcggccgctgtcaccagcatgcaaatttcttccaagaggcaccagctgtacgtagcctcgcggagcgcggtggcccagatcgcgttgcaccgctgcgctgcccacggccgcgtctgcaccgaatgctgtctggcgcgtgacccctactgcgcctgggacggggtcgcgtgcacgcgcttccagcccagtgccaagaggcggttccggcggcaagacgtaaggaatggcgaccccagcacgttgtgctccggagactcgtctcgtcccgcgctgctggaacacaaggtgttcggcgtggagggcagcagcgcctttctggagtgtgagccccgctcgctgcaggcgcgcgtggagtggactttccagcgcgcaggggtgacagcccacacccaggtgctggcagaggagcgcaccgagcgcaccgcccggggactactgctgcgcaggctgcggcgccgggactcgggcgtgtacttgtgcgccgccgtcgagcagggctttacgcaaccgctgcgtcgcctgtcgctgcacgtgttgagtgctacgcaggccgaacgactggcgcgggccgaggaggctgcgcccgccgcgccgccgggccccaaactctggtaccgggactttctgcagctggtggagccgggcggaggtggcagcgcgaactccctgcgcatgtgccgcccgcagcctgcgctgcagtcactgcccctggagtcgcggagaaagggccgtaaccggaggacccacgcccctgagcctcgcgctgagcgggggccgcgcagcgcaacgcactggtgaccagactgtccccacgccgggaaccaagcaggagacgacaggcgagagaggagccagacagaccctgaaaagaaggacgggttggggccgggcacattgggggtcaccggccgatggagacaccaaccgacaggccctggctgagggcagctgcgcgggcttatttattaacaggataacccttgaatgtagcagccccgggagggcggcacaggtcgggcgcaggattcagccggagggaagggacggggaagccgagctccagagcaacgaccagggccgaggaggtgcctggagtgcccaccctgggagacagaccccacctccttgggtagtgagcagtgagcagaaagctgtgaacaggctgggctgctggaggtggggcgaggcaggccgactgtactaaagtaacgcaataaacgcattatcagccaaagctggaatggccccagcaggcggaacaaaaagaaaacagacaaacgccccaccgcaccaaagacaaaacacgaagcccaaccaacgacacaaaagggggggcacaaagaccccg

SEQ ID NO: 327616 - DNA, 2394 bp, Homo sapiens
aactggacatggtgctagaggttgggtggtcagacactgtgatcccgggtgctgtgcccgcactacgggaaggggaagcagcgcgtgggtctcgcatcaggaggcaaggccaggacccgctgacccatgcctcctgccgcggtcagagcccaagtttgtcaaggtattttggatcccggagagcgagaacccagacgacgacaaaatctacttcttctttcgtgagacggcggtagaggcggcgccggcactgggacgcctgtccgtgtcccgcgttggccagatctgccggaacgacgtgggcggccagcgcagcctggtcaacaagtggacgacgttcctgaaggcgcggctggtgtgctcggtgcccggcgtcgagggcgacacccacttcgatcagctccgtgagtgcgggagtgggtatggggttggggaggggggcagcggcgcagactccgggagcccccgccgcagcggggctgtgcgccctaccccagctaggccccttccccgcagaggatgtgtttctgttgtcctcgcgggaccaccggaccccgctgctctatgccgtcttctccacgtccagcagcatcttccagggctctgcggtgtgcgtgtacagcatgaacgacgtgcgccgggccttcttgggaccctttgcacacaaggaggggcccatgcaccagtgggtgtcataccagggtcgcgtcccctacccgcggccaggcatgtgccccagcaagacctttggcaccttcagttccaccaaggacttcccagacgatgtcatccagtttgcgcggaaccaccccctcatgtacaactctgtcctgcccactggggggcgccctcttttcctacaagttggagccaattacaccttcactcaaattgccgcggaccgggttgcagccgctgacggacactatgacgtcctcttcattggcacagacgttggcacggtgctgaaggtgatctcggtccccaagggcagtaggcccagcgcagaggggctgctcctggaggagctgcacgtgtttgaggactcggccgctgtcaccagcatgcaaatttcttccaagaggcaccagctgtacgtagcctcgcggagcgcggtggcccagatcgcgttgcaccgctgcgctgcccacggccgcgtctgcaccgaatgctgtctggcgcgtgacccctactgcgcctgggacggggtcgcgtgcacgcgcttccagcccagtgccaagaggcggttccggcggcaagacgtaaggaatggcgaccccagcacgttgtgctccggagactcgtctcgtcccgcgctgctggaacacaaggtgttcggcgtggagggcagcagcgcctttctggagtgtgagccccgctcgctgcaggcgcgcgtggagtggactttccagcgcgcaggggtgacagcccacacccaggtgctggcagaggagcgcaccgagcgcaccgcccggggactactgctgcgcaggctgcggcgccgggactcgggcgtgtacttgtgcgccgccgtcgagcagggctttacgcaaccgctgcgtcgcctgtcgctgcacgtgttgagtgctacgcaggccgaacgactggcgcgggccgaggaggctgcgcccgccgcgccgccgggccccaaactctggtaccgggactttctgcagctggtggagccgggcggaggtggcagcgcgaactccctgcgcatgtgccgcccgcagcctgcgctgcagtcactgcccctggagtcgcggagaaagggccgtaaccggaggacccacgcccctgagcctcgcgctgagcgggggccgcgcagcgcaacgcactggtgaccagactgtccccacgccgggaaccaagcaggagacgacaggcgagagaggagccagacagaccctgaaaagaaggacgggttggggccgggcacattgggggtcaccggccgatggagacaccaaccgacaggccctggctgagggcagctgcgcgggcttatttattaacaggataacccttgaatgtagcagccccgggagggcggcacaggtcgggcgcaggattcagccggagggaagggacggggaagccgagctccagagcaacgaccagggccgaggaggtgcctggagtgcccaccctgggagacagaccccacctccttgggtagtgagcagtgagcagaaagctgtgaacaggctgggctgctggaggtggggcgaggcaggccgactgtactaaagtaacgcaataaacgcattatcagccaaagctggaatggccccagcaggcggaacaaaaagaaaacagacaaacgccccaccgcaccaaagacaaaacacgaagcccaaccaacgacacaaaagggggggcacaaagaccccg

SEQ ID NO: 327617 - DNA, 1700 bp, Homo sapiens
gttaccattctgatgttggagcggccgcatatctatatcccgtgctgtgcctcccgtttcccccacttccaccaaggacttcccagacgatgtcatccagtttgcgcggaaccaccccctcatgtacaactctgtcctgcccactggggggcgccctcttttcctacaagttggagccaattacaccttcactcaaattgccgcggaccgggttgcagccgctgacggacactatgacgtcctcttcattggcacagacgttggcacggtgctgaaggtgatctcggtccccaagggcagtaggcccagcgcagaggggctgctcctggaggagctgcacgtgtttgaggactcggccgctgtcaccagcatgcaaatttcttccaagaggcaccagctgtacgtagcctcgcggagcgcggtggcccagatcgcgttgcaccgctgcgctgcccacggccgcgtctgcaccgaatgctgtctggcgcgtgacccctactgcgcctgggacggggtcgcgtgcacgcgcttccagcccagtgccaagaggcggttccggcggcaagacgtaaggaatggcgaccccagcacgttgtgctccggagactcgtctcgtcccgcgctgctggaacacaaggtgttcggcgtggagggcagcagcgcctttctggagtgtgagccccgctcgctgcaggcgcgcgtggagtggactttccagcgcgcaggggtgacagcccacacccaggtgctggcagaggagcgcaccgagcgcaccgcccggggactactgctgcgcaggctgcggcgccgggactcgggcgtgtacttgtgcgccgccgtcgagcagggctttacgcaaccgctgcgtcgcctgtcgctgcacgtgttgagtgctacgcaggccgaacgactggcgcgggccgaggaggctgcgcccgccgcgccgccgggccccaaactctggtaccgggactttctgcagctggtggagccgggcggaggtggcagcgcgaactccctgcgcatgtgccgcccgcagcctgcgctgcagtcactgcccctggagtcgcggagaaagggccgtaaccggaggacccacgcccctgagcctcgcgctgagcgggggccgcgcagcgcaacgcactggtgaccagactgtccccacgccgggaaccaagcaggagacgacaggcgagagaggagccagacagaccctgaaaagaaggacgggttggggccgggcacattgggggtcaccggccgatggagacaccaaccgacaggccctggctgagggcagctgcgcgggcttatttattaacaggataacccttgaatgtagcagccccgggagggcggcacaggtcgggcgcaggattcagccggagggaagggacggggaagccgagctccagagcaacgaccagggccgaggaggtgcctggagtgcccaccctgggagacagaccccacctccttgggtagtgagcagtgagcagaaagctgtgaacaggctgggctgctggaggtggggcgaggcaggccgactgtactaaagtaacgcaataaacgcattatcagccaaagctggaatggccccagcaggcggaacaaaaagaaaacagacaaacgccccaccgcaccaaagacaaaacacgaagcccaaccaacgacacaaaagggggggcacaaagaccccg

SEQ ID NO: 327618 - DNA, 1900 bp, Homo sapiens
tgctgatggaagctctccctgttcagtcccatctccacatcctttcctgggctgtgtctccaccctgtggatgctgcccaacccacactcttccagtccacactcttcacaacccaaacatgctgagggtagacgcctcaaaggcgaggagacactagccccagctgtccgggagcaccaatggtcattaccccttctcatccctgcagacgttggcacggtgctgaaggtgatctcggtccccaagggcagtaggcccagcgcagaggggctgctcctggaggagctgcacgtgtttgaggactcggccgctgtcaccagcatgcaaatttcttccaagagggtgagtgaccaggatgggggtcggggtgggatggactgagcttgtgcctggcgcgtcccaagcctctggccccttttggtagtttgcagtcccgggtttgagtacaggctctggctttgttagactgtgtgacctgaggcgtaagacctcagtgttcccatctgtcgagtggaagaagggatccctgaccgatgggaggcaggcgtggggtcgccctcggtcagcccagagcccctcgtgccccctagcaccagctgtacgtagcctcgcggagcgcggtggcccagatcgcgttgcaccgctgcgctgcccacggccgcgtctgcaccgaatgctgtctggcgcgtgacccctactgcgcctgggacggggtcgcgtgcacgcgcttccagcccagtgccaagaggcggttccggcggcaagacgtaaggaatggcgaccccagcacgttgtgctccggagactcgtctcgtcccgcgctgctggaacacaaggtgttcggcgtggagggcagcagcgcctttctggagtgtgagccccgctcgctgcaggcgcgcgtggagtggactttccagcgcgcaggggtgacagcccacacccaggtgctggcagaggagcgcaccgagcgcaccgcccggggactactgctgcgcaggctgcggcgccgggactcgggcgtgtacttgtgcgccgccgtcgagcagggctttacgcaaccgctgcgtcgcctgtcgctgcacgtgttgagtgctacgcaggccgaacgactggcgcgggccgaggaggctgcgcccgccgcgccgccgggccccaaactctggtaccgggactttctgcagctggtggagccgggcggaggtggcagcgcgaactccctgcgcatgtgccgcccgcagcctgcgctgcagtcactgcccctggagtcgcggagaaagggccgtaaccggaggacccacgcccctgagcctcgcgctgagcgggggccgcgcagcgcaacgcactggtgaccagactgtccccacgccgggaaccaagcaggagacgacaggcgagagaggagccagacagaccctgaaaagaaggacgggttggggccgggcacattgggggtcaccggccgatggagacaccaaccgacaggccctggctgagggcagctgcgcgggcttatttattaacaggataacccttgaatgtagcagccccgggagggcggcacaggtcgggcgcaggattcagccggagggaagggacggggaagccgagctccagagcaacgaccagggccgaggaggtgcctggagtgcccaccctgggagacagaccccacctccttgggtagtgagcagtgagcagaaagctgtgaacaggctgggctgctggaggtggggcgaggcaggccgactgtactaaagtaacgcaataaacgcattatcagccaaagctggaatggccccagcaggcggaacaaaaagaaaacagacaaacgccccaccgcaccaaagacaaaacacgaagcccaaccaacgacacaaaagggggggcacaaagaccccg

SEQ ID NO: 327619 - DNA, 1623 bp, Homo sapiens
  misc_feature (1567)..(1567): n is a, c, g, or t
  misc_feature (1603)..(1603): n is a, c, g, or t
  misc_feature (1617)..(1617): n is a, c, g, or t
acggcacggcgggcggtgcgtggggcggtggctggcctggtgggggcgggggctgcttcttaaaggagccgtcagagggtccccagcggccccagggtgggaaggggccagagtggagagatgctgctgcggaagtcctcggtggagtgtgagaaggcagccagtgttggcctggaagacctctagaacctgagaagaggcagcgatcctggggcagagtccagggcagctcaaggctcctccacacacacacccgctgaaccctgagcaccctgagctgctgagatggggcgggccggggctgccgccgtgatcccgggcctggccctgctctgggcagtggggctggggagtgccgcccccagccccccacgccttcggctctccttccaagagctccaggcctggcatggtctccagactttcagcctggagcgaacctgctgctaccaggccttgctggtggatgaggagcgtggacgcctgtttgtgggtgccgagaaccatgtggcctccctcaacctggacaacatcagcaagcgggccaagaagctggcctggccggcccctgtggaatggcgagaggagtgcaactgggcagggaaggacattggtactgagtgcatgaacttcgtgaagttgctgcatgcctacaaccgcacccatttgctggcctgtggcacgggagccttccacccaacctgtgcctttgtggaagtgggccaccgggcagaggagcccgtcctccggctggacccaggaaggatagaggatggcaaggggaagagtccttatgaccccaggcatcgggctgcctccgtgctggtgggggaggagctatactcaggggtggcagcagacctcatgggacgagactttaccatctttcgcagcctagggcaacgtccaagtctccgaacagagccacacgactcccgctggctcaatgagcccaagtttgtcaaggtattttggatcccggagagcgagaacccagacgacgacaaaatctacttcttctttcgtgagacggcggtagaggcggcgccggcactgggacgcctgtccgtgtcccgcgttggccagatctgccggaacgacgtgggcggccagcgcagcctggtcaacaagtggacgacgttcctgaaggcgcggctggtgtgctcggtgcccggcgtcgagggcgacacccacttcgatcagctccaggatgtgtttctgttgtcctcgcgggaccaccggaccccgctgctctatgccgtcttctccacgtccagcagcatcttccagggctctgcggtgtgcgtgtacagcatgaacgacgtgcgccgggccttcttgggaccctttgcacacaaggaggggcccatgcaccagtgggtgtcataccagggtcgcgtcccctacccgcggccaggcatgtgccccagcaagacctttggcaccttcagttccaccaaggacttcccagacgatgtcatccagtttgcgcggaaccaccccctcatgtacaactctgtcctgcccactggggggggggcggcccctcctttttccctaacaaaanttttgggaggcccaaaattttacaaccctttcaacntccaaaaattttgncccgcc

SEQ ID NO: 327620 - DNA, 1116 bp, Homo sapiens
acggcacggcgggcggtgcgtggggcggtggctggcctggtgggggcgggggctgcttcttaaaggagccgtcagagggtccccagcggccccagggtgggaaggggccagagtggagagatgctgctgcggaagtcctcggtggagtgtgagaaggcagccagtgttggcctggaagacctctagaacctgagaagaggcagcgatcctggggcagagtccagggcagctcaaggctcctccacacacacacccgctgaaccctgagcaccctgagctgctgagatggggcgggccggggctgccgccgtgatcccgggcctggccctgctctgggcagtggggctggggagtgccgcccccagccccccacgccttcggctctccttccaagagctccaggcctggcatggtctccagactttcagcctggagcgaacctgctgctaccaggccttgctggtggatgaggagcgtggacgcctgtttgtgggtgccgagaaccatgtggcctccctcaacctggacaacatcagcaagcgggccaagaagctggcctggccggcccctgtggaatggcgagaggagtgcaactgggcagggaaggacattggtactgagtgcatgaacttcgtgaagttgctgcatgcctacaaccgcacccatttgctggcctgtggcacgggagccttccacccaacctgtgcctttgtggaagtgggccaccgggcagaggagcccgtcctccggctggacccaggaaggatagaggatggcaaggggaagagtccttatgaccccaggcatcgggctgcctccgtgctggtgggggaggagctatactcaggggtggcagcagacctcatgggacgagactttaccatctttcgcagcctagggcaacgtccaagtctccgaacagagccacacgactcccgctggctcaatgagcccaagtttgtcaaggtattttggatcccggagagcgagaacccagacgacgacaaaatctacttcttctttcgtgagacggcggtagaggcggcgccggcactgggacgcctgtccgtgtcccgcgttggccagatctgccgggtgaggagtccctgggccaca

SEQ ID NO: 327621 - DNA, 2038 bp, Homo sapiens
acggcacggcgggcggtgcgtggggcggtggctggcctggtgggggcgggggctgcttcttaaaggagccgtcagagggtccccagcggccccagggtgggaaggggccagagtggagagatgctgctgcggaagtcctcggtggagtgtgagaaggcagccagtgttggcctggaagacctctagaacctgagaagaggcagcgatcctggggcagagtccagggcagctcaaggctcctccacacacacacccgctgaaccctgagcaccctgagctgctgagatggggcgggccggggctgccgccgtgatcccgggcctggccctgctctgggcagtggggctggggagtgccgcccccagccccccacgccttcggctctccttccaagagctccaggcctggcatggtctccagactttcagcctggagcgaacctgctgctaccaggccttgctggtggatgaggagcgtggacgcctgtttgtgggtgccgagaaccatgtggcctccctcaacctggacaacatcagcaagcgggccaagaagctggcctggccggcccctgtggaatggcgagaggagtgcaactgggcagggaaggacattggtactgagtgcatgaacttcgtgaagttgctgcatgcctacaaccgcacccatttgctggcctgtggcacgggagccttccacccaacctgtgcctttgtggaagtgggccaccgggcagaggagcccgtcctccggctggacccaggaaggatagaggatggcaaggggaagagtccttatgaccccaggcatcgggctgcctccgtgctggtgggggaggagctatactcaggggtggcagcagacctcatgggacgagactttaccatctttcgcagcctagggcaacgtccaagtctccgaacagagccacacgactcccgctggctcaatggtgagaggctggtggggttggtgggtagaggtcgtcaccctcccacagggcaggtgccaagcaaggcccataaagtaagtgagcagtgggtgtggccaggtcttaccaaataccctccttaatcaggcactggcgtcacagagacagacaagacaggtatgaccgtgacctctttgagttcacagatcacatacatgataagatcaagtccaatggccttgaggccagagagagacaagggaggaagggaaaaggagactgggtggctggagggggttgggtaaaggaagccgctgtgctgaggggagtatgagctaattcccaagcacaagacagctagccagcaaaatttagggatgagcattccaggcagagggagcattccaggcagagggagcaactagtgcaaaggcctggatgcaagaacaagcaaaggaatagacttgcagagctagcaatgaaaagggggcctggactgtcaggggccagagtcatttattctaagagtcatgggggctgggcacaatggcttgcacctgtaatcccagcactttgggaggctgaggcagacagattgcttgaagacaggagtttcataccagcctgggctacaaagcaagacaaaaaataaaataaaattagctgggggcagtggcatgcacacacctgtagtcctggctagtcaggaggctgagatggaaggatcacttgagcccaggagttggaggctgcagtgagccatgatgctgccactgcaggacagagcagaccctgtctctaaatcaaataaaaattaaataagggctatgggctggtgggcacagtggctcacacctgtaatctcagcactttgggaggcggaggcaggcaaatcgcttgaggccaggagtttgagactagcctggccaacatggtgaaaccctgtctctactaaaaaatacaaaaattggccgggtgcagtggtgtgcacctgtaatcccagcactttgggaggctgaggcgggcggatcacctgagttcaggcatttgagaccagcctggccaacatggtgtaaccccgtctctactaaatatacaaaaattagtccg

SEQ ID NO: 327622 - DNA, 3973 bp, Homo sapiens
cagaaccacagcgggtcctctgcccgggggaacctgtctgggaagccggatgactggccccaggacatgaaagagtatgtggagcgctgcttcaccgcctgtgagtcggaggaggacaaggaccgcacggaaaagctgctcaaggaggtgctgcaggcgcggctgcaggacggctcggcctataccattgactggagccgggagcccttgccggggctgacccgggagcctgtggctgagagccctaagaagaagcggtgggaggccgctagcagccttcaccctcctagaggggcaggctcggcgacaaggggcgggggtgccccgtcccagcgagggacgcccggggctgggggtgccggtcgagcccggggcaacagcttcaccaagtttggcaaccgcaacgtcttcatgaaggacaacagctcttcttccagcacagactcccgctcccgctcctcctccaggtccccgacgcgccacttccgcagaagtgactcccactcagactccgacagctcctactcagggaatgagtgtcaccctgtgggccgcaggaacccgccccctaagggccggggcggtcgaggggcccatatggatcggggccgaggcagggcgcagcgtgggaagaggcacgatctggcgcccaccaagcgcagtcgaaagaagatggcggcgctggagtgtgaggacccggagcgagagctgaagaagcagaagcgggcagcccgcttccagcacggacactcccgccgcctgcgcctcgagcccctggtgctgcagatgagcagcctggagagcagtggggctgaccctgactggcaggagctgcagatcgtgggcacctgccctgacatcaccaagcactacctgcgcctcacctgtgcccccgacccgtccaccgtgcgccctgtggcagttttgaaaaagtcgctgtgcatggtcaagtgccactggaaagagaagcaggactacgcgtttgcctgcgagcagatgaagtcgatccggcaggatctgacggtgcagggcatccgcaccgagttcacggtggaggtgtacgagacccatgcccggatcgccttggagaagggtgaccatgaagagtttaaccagtgccagacgcagctcaagtcgctgtacgccgagaacttgcctggcaatgtgggcgagtttactgcctaccgaatcctctactacatcttcaccaagaactcgggagacatcaccacggagctggcatacctcacacgagaactgaaggcagatccttgcgtggcccacgccttggcattaagggagccagccgggtggcacagcggtgtcgtggccgtgttgctgatcgcctgggtggttgttggcgtgtccctgcagcgaaggatcctgtgacagtgaaaaagcagtctggctcccgaggtccaccccttataccccaaggtccagatggcggccaacgtgggtgatcaacgtagcacagattggtcttctcagtacagcatggtggctggggcaggccgagagaatggcatggagacgccgatgcacgagaacccggagtgggagaaggcccgtcaggccctggccagcatcagcaagtcaggagctgccggcggctctgccaagtccagcagcaatgggcctgtggccagtgcacagtacgtgtcccaggcagaagcctcagctttgcagcagcagcagtactaccagtggtaccagcagtacaactatgcctacccctacagctactactatcccatgcccccagtccccggcatggatgagagcatgtcctaccaggctccccctcagcagctgccgtcggctcagccccctcagccctcaaatcccccacatggggctcacacgctgaacagtggccctcagcctgggacagctccagccacacagcacagccaggcggggcccgccacgggccaggcctatgggccacacacctacaccgaacctgccaagcccaagaagggccaacagctgtggaaccgcatgaaacccgcccctgggactggaggtctcaagttcaacatccagaagcgaccctttgctgttaccacccagagctttggctccaacgcagagggccagcacagtggttttggcccccagcccaaccctgagaaagttcagaaccacagcgggtcctctgcccgggggaacctgtctgggaagccggatgactggccccaggacatgaaagagtatgtggagcgctgcttcaccgcctgtgagtcggaggaggacaaggaccgcacggaaaagctgctcaaggaggtgctgcaggcgcggctgcaggacggctcggcctataccattgactggagccgggagcccttgccggggctgacccgggagcctgtggctgagagccctaagaagaagcggtgggaggccgctagcagccttcaccctcctagaggggcaggctcggcgacaaggggcgggggtgccccgtcccagcgagggacgcccggggctgggggtgccggtcgagcccggggcaacagcttcaccaagtttggcaaccgcaacgtcttcatgaaggacaacagctcttcttccagcacagactcccgctcccgctcctcctccaggtccccgacgcgccacttccgcagaagtgactcccactcagactccgacagctcctactcagggaatgagtgtcaccctgtgggccgcaggaacccgccccctaagggccggggcggtcgaggggcccatatggatcggggccgaggcagggcgcagcgtgggaagaggcacgatctggcgcccaccaagcgcagtcgaaagaagatggcggcgctggagtgtgaggacccggagcgagagctgaagaagcagaagcgggcagcccgcttccagcacggacactcccgccgcctgcgcctcgagcccctggtgctgcagatgagcagcctggagagcagtggggctgaccctgactggcaggagctgcagatcgtgggcacctgccctgacatcaccaagcactacctgcgcctcacctgtgcccccgacccgtccaccgtgcgccctgtggcagttttgaaaaagtcgctgtgcatggtcaagtgccactggaaagagaagcaggactacgcgtttgcctgcgagcagatgaagtcgatccggcaggatctgacggtgcagggcatccgcaccgagttcacggtggaggtgtacgagacccatgcccggatcgccttggagaagggtgaccatgaagagtttaaccagtgccagacgcagctcaagtcgctgtacgccgagaacttgcctggcaatgtgggcgagtttactgcctaccgaatcctctactacatcttcaccaagaactcgggagacatcaccacggagctggcatacctcacacgagaactgaaggcagatccttgcgtggcccacgccttggcattaaggacagcctgggccctgggcaactaccaccgctttttccggctctactgccatgcaccctgcatgtctggctacctcgtggacaagtttgcagatcgggagcgcaaggtcgccctcaaggccatgatcaaaacgtatgtggtgccaagctcccttctgcctttgctcttcccatccttccgcctcgtctcaagttgtataaagttgtctccgtgtcccctcctccctctgcccccagtgtttcttctgatttttttttcccctttccctccctccctctccgcattcttcccttggttcagcacaggtaaaacggttcccctccctccctcttctgccatgtaactggaggatgtgctatgagtttgcaaacagctggactgtcaggctgctttttttccagatgttcctcctctgcctccccttcccctcctctcccctccttttccttccttccttcctttccttggagcactgagcaccatttggaagcttgagagaaaccaaaattaaagagagaaagagagagcgtgca

SEQ ID NO: 327623 - DNA, 8007 bp, Homo sapiens
  misc_feature (4820)..(4820): n is a, c, g, or t
ttttttgagatggagtctttctctgttgcccactgtactctatcgtgggcgacgacagagcaagagcaagactccgtctccgagaacaacaacaacagcaacaagaaaacaacaataaaaaaaataaggctgcgtgggaggcagaaagagctaatgcggccacgcttgtcccctcggggccaccgtccccacccagacttccggtctgccttaaaatgttcatgcgtaagtgcgtgggcaggaaggcgggctcaagcgcagctcgtggcgttcattggctgtgcagggccgagggaggcggtgcaaggccgccgcgtgacgtcaggacgccgcggtcaggacgtcgaagccaaagaagaccagagccagccgggtggcacagcggtgtcgtggccgtgttgctgatcgcctgggtggttgttggcgtgtccctgcagcgaaggatcctgtgacagtgaaaaagcagtctggctcccgaggtccaccccttataccccaaggtccagatggcggccaacgtgggtgatcaacgtagcacagattggtcttctcagtacagcatggtggctggggcaggccgagagaatggcatggagacgccgatgcacgagaacccggagtgggagaaggcccgtcaggccctggccagcatcagcaagtcaggagctgccggcggctctgccaagtccagcagcaatgggcctgtggccagtgcacagtacgtgtcccaggcagaagcctcagctttgcagcagcagcagtactaccagtggtaccagcagtacaactatgcctacccctacagctactactatcccatgagcatgtaccagagctatggctccccttcccagtatgggatggccggctcctatggctcagccacaccccagcagccatccgcaccccaacaccaagggactctgaaccagcccccagtccccggcatggatgagagcatgtcctaccaggctccccctcagcagctgccgtcggctcagccccctcagccctcaaatcccccacatggggctcacacgctgaacagtggccctcagcctgggacagctccagccacacagcacagccaggcggggcccgccacgggccaggcctatgggccacacacctacaccgaacctgccaagcccaagaagggccaacagctgtggaaccgcatgaaacccgcccctgggactggaggtctcaagttcaacatccagaagcgaccctttgctgttaccacccagagctttggctccaacgcagagggccagcacagtggttttggcccccagcccaaccctgagaaagttcagaaccacagcgggtcctctgcccgggggaacctgtctgggaagccggatgactggccccaggacatgaaagagtatgtggagcgctgcttcaccgcctgtgagtcggaggaggacaaggaccgcacggaaaagctgctcaaggaggtgctgcaggcgcggctgcaggacggctcggcctataccattgactggagccgggagcccttgccggggctgacccgggagcctgtggctgagagccctaagaagaagcggtgggaggccgctagcagccttcaccctcctagaggggcaggctcggcgacaaggggcgggggtgccccgtcccagcgagggacgcccggggctgggggtgccggtcgagcccggggcaacagcttcaccaagtttggcaaccgcaacgtcttcatgaaggacaacagctcttcttccagcacagactcccgctcccgctcctcctccaggtccccgacgcgccacttccgcagaagtgactcccactcagactccgacagctcctactcagggaatgagtgtcaccctgtgggccgcaggaacccgccccctaagggccggggcggtcgaggggcccatatggatcggggccgaggcagggcgcagcgtgggaagaggcacgatctggcgcccaccaagcgcagtcgaaagaagatggcggcgctggagtgtgaggacccggagcgagagctgaagaagcagaagcgggcagcccgcttccagcacggacactcccgccgcctgcgcctcgagcccctggtgctgcagatgagcagcctggagagcagtggggctgaccctgactggcaggagctgcagatcgtgggcacctgccctgacatcaccaagcactacctgcgcctcacctgtgcccccgacccgtccaccgtgcgccctgtggcagttttgaaaaagtcgctgtgcatggtcaagtgccactggaaagagaagcaggactacgcgtttgcctgcgagcagatgaagtcgatccggcaggatctgacggtgcagggcatccgcaccgagttcacggtggaggtgtacgagacccatgcccggatcgccttggagaagggtgaccatgaagagtttaaccagtgccagacgcagctcaagtcgctgtacgccgagaacttgcctggcaatgtgggcgagtttactgcctaccgaatcctctactacatcttcaccaagaactcgggagacatcaccacggagctggcatacctcacacgagaactgaaggcagatccttgcgtggcccacgccttggcattaaggacagcctgggccctgggcaactaccaccgctttttccggctctactgccatgcaccctgcatgtctggctacctcgtggacaagtttgcagatcgggagcgcaaggtcgccctcaaggccatgatcaaaacgtatgtggtgccaagctcccttctgcctttgctcttcccatccttccgcctcgcaccgcccctcagaccagctcctggccgcaggcctcccccagcccccaacccttgtcctggtccttgcttccccatcatctttctccattcagccctcccctctccagttcctcttgctctccttgttggtcacctctgtgttccgggtcactcctctccctctccccactgttcccagctcactgcctctggggcctcttctccaccccatctgtgtgtctcttcctcctgttctctcctgcctggaccccctagttcactccttgccctgggcttcctcagaaccctgaggtctctgctttctcagcttgtcgctgtgctcccaccatagagaccatctagacagcctctggtctaccaggacaaggcccagtcccactcagctcctttgagagcaccagaaacgcttagggagacacctgtgttgaggccacactgggcgcggtgccagaggcccctggtcaggccatgcccctgcagtgtccttcgttcactagacattgcgcctggcttgctgtgggtggggatgagttgcttgactcatgtttagacgcatggttctgtctggtgattgaggtgcccaggcgacgctgggcaatgtcaagagaggttttcgcttgtcacagcaaggggatgctcttggcatctagtgagtggaggccagggatgctgccctgccactgccattgggcctcagagctcagtcttgccaaggtggagaaattctggtcgaagaggttgaccggtagactgaagaggccttgagagcctggccaggtggctgtccacgtgaggtcatagtcacagcatggaggccttgagagcctggccaggtggccctccacgtgaggtcatggtcacagcatgggggccttgagtgcctggccaggtggccctccacgtgaggtcatggtcacagcatggaggccttgagagcctggccaggtggccctccacgtgaggttgtggtcacagcatgggggccttgagagcctggccaggtggccctccacgtgaggtcatggtcacagcatggaggccttgagagcctggccaggtggccctccgtgtgaggtcatggtcacagcatagtttggagctagggagggactgtcagcctggaggtttggagactcattctggaatctagtgtgggtcaagccaacttcagggagaggctgagccagggtaggagtcacaggagcagacgaggatgtggggtgccgtgcacagagctccatgaccagcttgggaagttagaaggaaggggaggcaggaggctgcttagtctgctgccatgatgggccccatgaatggtggctctcaagcttctgtgctacacaggggtgtgtggttgggcgagtgtccttgttaattgatacctaattggccttggttgggaacatagccatgagtgcccctcgtgggtggggcgccagtctgtcattgacctcattgtgtcagcaccttccccccaaggaggctgaccctgccctgccagctgagactgggagacggagtgggctctgatcccagggcttccaggaaagctctggctttggagcagaagcgggttctaggacttagtgcccctcactcggtgcctgggttcctgtgtgtgtggaaagggtagggctgcaccctgtggaagagggttcagggagctctgaggacctggctcgtgctagatgctcagtcagtagtgtgttttagcagcagccggaagtgactgctttcagtgtgtagtggtgagtgctagctggcacccctgcgcctggcttcccagacactgtaacgcagggcaggggaggcagcgagggctgggtccccacggtggccctggcagccccgccatccccatcccctgccacgtgctgctccctccatctggtccctgcccctcagccagcggaggagcccgctgggcccttccctgcccgtccccgctcctccctggcccccgcacaggtaagtgagggtgaggggggcacaggggactggggtcactaaccccccccgngccccccccgagcccctgaggtggggaggctgggaggcgggtggggagccagcaggcactgtgctgaggaaatcctgtgggcacccgaatgggggggcctccccgctcgtggggccctcccctgccctcccgcccgcccgcctcatcaccttctcctcttgtctccatagcttccgccctgcgctgccagtctcctacctgcaggccgagctggccttcgagggcgaggccgcctgccgggccttcctagagcccctgggcctggcctacacgggcccggacaactccagcatcgactgccgcctcagcctggcgcagctgtcagccttctgagcacccagcgaggaggggcgggggcaggggctgcagcccccagcgctgcctttgcggattctgtttttgagccgtggacttgggttgtaaatttatttgtggggagtgcgctccaggaagagccaccatccctgcccccgttttcccaccggggagtctgtacagagatttttctacgtttttattttttgcctcagagggatgggattggggaggaggggatgggcagcggagggttgggggcatggtctgcaggctcatctgtgtccgcctttcactccactaatgctgtctcagtgttttctctctctctctttcgagcttgcactccggtacccgacccggcgccctggcccatcccatgccggggggccagtggaaagaagacaggccgtccagcccgtgcccgcctgcggcgggggcacccagcaagcccgcccaccgcccgctgcctcacctgcttcgccacagactcttgttcccagccccttggggcctccgtgtttggggtgggggagctgcttagagactgtgcccgtcctcggccccccaccctgaagtgccagcaccaccagcaccagatcctccgccgccacaccgcactgaggacacgccggccgggccgcctcgtctcaagttgtataaagttgtctccgtgtcccctcctccctctgcccccagtgtttcttctgatttttttttcccctttccctccctccctctccgcattcttcccttggttcagcacaggtaaaacggttcccctccctccctgccttcatggatcaccagctcacgtcatgttgccttctcttttctttgtgtgtgtgtttatttaagttatttttcttcctcctctcccttttctttttggccctccctccctccctcttctgccatgtaactggaggatgtgctatgagtttgcaaacagctggactgtcaggctgctttttttccagatgttcctcctctgcctccccttcccctcctctcccctccttttccttccttccttcctttccttggagcactgagcaccatttggaagcttgagagaaaccaaaattaaagagagaaagagagagcgtgcacgctcctgctttgtctttcctgtgtgggctgtttgcatccattgtctcctccagaggtctgggggtgtcactccagggggatctcagccaggggctggaaaggcccccctgtcctccctatacggcacagccagagtgtctgcaggggctggcaccccacttcctggctgagggtgaactccagcttggggaggtggacctgggaaccatggggcaccttggccacggtgaggtgggggtgcagctgccctggagactgtagtgtactcagcccctcggcttccagcctctggctcagcacttgtgccatgctttccagtgtgggagagggtggggcacacagcacatgcgggcccaggaggaccagctttctaaagctcagccgagggggtgcatttagccccggggccaagagggcccgtctcagagctccaatggcagcggcctcctccccagcgcctgccagtcgcagcagggccagggtcaggtgtaggttctgagagggcactaggaagttggcgcagtgtggggccacgtggaccaggtattcctgggccttggtcacttctgcttgtagcccaggctcggtcaccatgagggccacaaaatgtgtggggcgcggttggcaaggggctgcaacactaaggcgggcccttttgtcctcgggccaggccgcaggaccccactcggcttctgtcgtctcagcggagccccccgggactcccagggcctgtgcttccttgccccccagcaatgtggtcctggtggctgctgttggcttcagtgcctcctcagtcactccggcgaggcgtcctcttggggccagtgttcccaaatcagcagctgtgcccagcgccctctcctgggccgcctccagctctccgggttcctccacgcctggttcctggtgccctgtgcagagcggccttgtgctccctcgcttgggggcagcctgggcctcctgacctgtccccgccagtgtccactcggcaccctctgccccgtgggcgccctcggtgttcggtgcgtccaggatggtgggcccgcgtcccgccgccgagccagagccaaagacgaggtcggtgcgcgaggcgcggtcccacacaaggcggccacggaagcggaagaagcgcacgcggtgctggggcactgccagcacgcccggcccgagcgccgccagcggctggtcccagcaaaaggcgctgaagggctcctcgcgcacacccagaaagcggtcgacgtagcccaccgagaagtcggcggggtcgaggcgcgggtcccagcggatgcgctggatgacgtccgcggctgtgcgcagcggcggcttcttggccccggcctccggctgcgcctcgcggccaggcggcgccggcgccccagggtggggctggcggcagcgggcgccgaagcggcagcggccttccaggaagaagcggcaggccggcgggggcgcgggttccgtggcgggggcttcctgcggcaactccggctctctggccgctgccatgggtgcggggaactggcacgcccgccgcgcagacgaggtcgccccgcacggagggcggctccccatggatgcaccgagcctcacccgacagtggcgtcagcggcccgcgctccggcctagctctggggaccacgccgcgtgccctcgcgaggactctggcccagtccctccttggtggagagcctgacaccgctgctctgggacttccgccggcgccctcccccagcgccaggaaagcaagctgcgtaaaggc

SEQ ID NO: 327624 - DNA, 6247 bp, Homo sapiens
  misc_feature (4820)..(4820): n is a, c, g, or t
ttttttgagatggagtctttctctgttgcccactgtactctatcgtgggcgacgacagagcaagagcaagactccgtctccgagaacaacaacaacagcaacaagaaaacaacaataaaaaaaataaggctgcgtgggaggcagaaagagctaatgcggccacgcttgtcccctcggggccaccgtccccacccagacttccggtctgccttaaaatgttcatgcgtaagtgcgtgggcaggaaggcgggctcaagcgcagctcgtggcgttcattggctgtgcagggccgagggaggcggtgcaaggccgccgcgtgacgtcaggacgccgcggtcaggacgtcgaagccaaagaagaccagagccagccgggtggcacagcggtgtcgtggccgtgttgctgatcgcctgggtggttgttggcgtgtccctgcagcgaaggatcctgtgacagtgaaaaagcagtctggctcccgaggtccaccccttataccccaaggtccagatggcggccaacgtgggtgatcaacgtagcacagattggtcttctcagtacagcatggtggctggggcaggccgagagaatggcatggagacgccgatgcacgagaacccggagtgggagaaggcccgtcaggccctggccagcatcagcaagtcaggagctgccggcggctctgccaagtccagcagcaatgggcctgtggccagtgcacagtacgtgtcccaggcagaagcctcagctttgcagcagcagcagtactaccagtggtaccagcagtacaactatgcctacccctacagctactactatcccatgagcatgtaccagagctatggctccccttcccagtatgggatggccggctcctatggctcagccacaccccagcagccatccgcaccccaacaccaagggactctgaaccagcccccagtccccggcatggatgagagcatgtcctaccaggctccccctcagcagctgccgtcggctcagccccctcagccctcaaatcccccacatggggctcacacgctgaacagtggccctcagcctgggacagctccagccacacagcacagccaggcggggcccgccacgggccaggcctatgggccacacacctacaccgaacctgccaagcccaagaagggccaacagctgtggaaccgcatgaaacccgcccctgggactggaggtctcaagttcaacatccagaagcgaccctttgctgttaccacccagagctttggctccaacgcagagggccagcacagtggttttggcccccagcccaaccctgagaaagttcagaaccacagcgggtcctctgcccgggggaacctgtctgggaagccggatgactggccccaggacatgaaagagtatgtggagcgctgcttcaccgcctgtgagtcggaggaggacaaggaccgcacggaaaagctgctcaaggaggtgctgcaggcgcggctgcaggacggctcggcctataccattgactggagccgggagcccttgccggggctgacccgggagcctgtggctgagagccctaagaagaagcggtgggaggccgctagcagccttcaccctcctagaggggcaggctcggcgacaaggggcgggggtgccccgtcccagcgagggacgcccggggctgggggtgccggtcgagcccggggcaacagcttcaccaagtttggcaaccgcaacgtcttcatgaaggacaacagctcttcttccagcacagactcccgctcccgctcctcctccaggtccccgacgcgccacttccgcagaagtgactcccactcagactccgacagctcctactcagggaatgagtgtcaccctgtgggccgcaggaacccgccccctaagggccggggcggtcgaggggcccatatggatcggggccgaggcagggcgcagcgtgggaagaggcacgatctggcgcccaccaagcgcagtcgaaagaagatggcggcgctggagtgtgaggacccggagcgagagctgaagaagcagaagcgggcagcccgcttccagcacggacactcccgccgcctgcgcctcgagcccctggtgctgcagatgagcagcctggagagcagtggggctgaccctgactggcaggagctgcagatcgtgggcacctgccctgacatcaccaagcactacctgcgcctcacctgtgcccccgacccgtccaccgtgcgccctgtggcagttttgaaaaagtcgctgtgcatggtcaagtgccactggaaagagaagcaggactacgcgtttgcctgcgagcagatgaagtcgatccggcaggatctgacggtgcagggcatccgcaccgagttcacggtggaggtgtacgagacccatgcccggatcgccttggagaagggtgaccatgaagagtttaaccagtgccagacgcagctcaagtcgctgtacgccgagaacttgcctggcaatgtgggcgagtttactgcctaccgaatcctctactacatcttcaccaagaactcgggagacatcaccacggagctggcatacctcacacgagaactgaaggcagatccttgcgtggcccacgccttggcattaaggacagcctgggccctgggcaactaccaccgctttttccggctctactgccatgcaccctgcatgtctggctacctcgtggacaagtttgcagatcgggagcgcaaggtcgccctcaaggccatgatcaaaacgtatgtggtgccaagctcccttctgcctttgctcttcccatccttccgcctcgcaccgcccctcagaccagctcctggccgcaggcctcccccagcccccaacccttgtcctggtccttgcttccccatcatctttctccattcagccctcccctctccagttcctcttgctctccttgttggtcacctctgtgttccgggtcactcctctccctctccccactgttcccagctcactgcctctggggcctcttctccaccccatctgtgtgtctcttcctcctgttctctcctgcctggaccccctagttcactccttgccctgggcttcctcagaaccctgaggtctctgctttctcagcttgtcgctgtgctcccaccatagagaccatctagacagcctctggtctaccaggacaaggcccagtcccactcagctcctttgagagcaccagaaacgcttagggagacacctgtgttgaggccacactgggcgcggtgccagaggcccctggtcaggccatgcccctgcagtgtccttcgttcactagacattgcgcctggcttgctgtgggtggggatgagttgcttgactcatgtttagacgcatggttctgtctggtgattgaggtgcccaggcgacgctgggcaatgtcaagagaggttttcgcttgtcacagcaaggggatgctcttggcatctagtgagtggaggccagggatgctgccctgccactgccattgggcctcagagctcagtcttgccaaggtggagaaattctggtcgaagaggttgaccggtagactgaagaggccttgagagcctggccaggtggctgtccacgtgaggtcatagtcacagcatggaggccttgagagcctggccaggtggccctccacgtgaggtcatggtcacagcatgggggccttgagtgcctggccaggtggccctccacgtgaggtcatggtcacagcatggaggccttgagagcctggccaggtggccctccacgtgaggttgtggtcacagcatgggggccttgagagcctggccaggtggccctccacgtgaggtcatggtcacagcatggaggccttgagagcctggccaggtggccctccgtgtgaggtcatggtcacagcatagtttggagctagggagggactgtcagcctggaggtttggagactcattctggaatctagtgtgggtcaagccaacttcagggagaggctgagccagggtaggagtcacaggagcagacgaggatgtggggtgccgtgcacagagctccatgaccagcttgggaagttagaaggaaggggaggcaggaggctgcttagtctgctgccatgatgggccccatgaatggtggctctcaagcttctgtgctacacaggggtgtgtggttgggcgagtgtccttgttaattgatacctaattggccttggttgggaacatagccatgagtgcccctcgtgggtggggcgccagtctgtcattgacctcattgtgtcagcaccttccccccaaggaggctgaccctgccctgccagctgagactgggagacggagtgggctctgatcccagggcttccaggaaagctctggctttggagcagaagcgggttctaggacttagtgcccctcactcggtgcctgggttcctgtgtgtgtggaaagggtagggctgcaccctgtggaagagggttcagggagctctgaggacctggctcgtgctagatgctcagtcagtagtgtgttttagcagcagccggaagtgactgctttcagtgtgtagtggtgagtgctagctggcacccctgcgcctggcttcccagacactgtaacgcagggcaggggaggcagcgagggctgggtccccacggtggccctggcagccccgccatccccatcccctgccacgtgctgctccctccatctggtccctgcccctcagccagcggaggagcccgctgggcccttccctgcccgtccccgctcctccctggcccccgcacaggtaagtgagggtgaggggggcacaggggactggggtcactaaccccccccgngccccccccgagcccctgaggtggggaggctgggaggcgggtggggagccagcaggcactgtgctgaggaaatcctgtgggcacccgaatgggggggcctccccgctcgtggggccctcccctgccctcccgcccgcccgcctcatcaccttctcctcttgtctccatagcttccgccctgcgctgccagtctcctacctgcaggccgagctggccttcgagggcgaggccgcctgccgggccttcctagagcccctgggcctggcctacacgggcccggacaactccagcatcgactgccgcctcagcctggcgcagctgtcagccttctgagcacccagcgaggaggggcgggggcaggggctgcagcccccagcgctgcctttgcggattctgtttttgagccgtggacttgggttgtaaatttatttgtggggagtgcgctccaggaagagccaccatccctgcccccgttttcccaccggggagtctgtacagagatttttctacgtttttattttttgcctcagagggatgggattggggaggaggggatgggcagcggagggttgggggcatggtctgcaggctcatctgtgtccgcctttcactccactaatgctgtctcagtgttttctctctctctctttcgagcttgcactccggtacccgacccggcgccctggcccatcccatgccggggggccagtggaaagaagacaggccgtccagcccgtgcccgcctgcggcgggggcacccagcaagcccgcccaccgcccgctgcctcacctgcttcgccacagactcttgttcccagccccttggggcctccgtgtttggggtgggggagctgcttagagactgtgcccgtcctcggccccccaccctgaagtgccagcaccaccagcaccagatcctccgccgccacaccgcactgaggacacgccggccgggccgcctcgtctcaagttgtataaagttgtctccgtgtcccctcctccctctgcccccagtgtttcttctgatttttttttcccctttccctccctccctctccgcattcttcccttggttcagcacaggtaaaacggttcccctccctccctgccttcatggatcaccagctcacgtcatgttgccttctcttttctttgtgtgtgtgtttatttaagttatttttcttcctcctctcccttttctttttggccctccctccctccctcttctgccatgtaactggaggatgtgctatgagtttgcaaacagctggactgtcaggctgctttttttccagatgttcctcctctgcctccccttcccctcctctcccctccttttccttccttccttcctttccttggagcactgagcaccatttggaagcttgagagaaaccaaaattaaagagagaaagagagagcgtgca

SEQ ID NO: 327625 - DNA, 7619 bp, Homo sapiens
  misc_feature (4432)..(4432): n is a, c, g, or t
atccgagcggcctcctccacccggcgtcctcctttgccttcgcccagcctgcgggacggccagacagtgaaaaagcagtctggctcccgaggtccaccccttataccccaaggtccagatggcggccaacgtgggtgatcaacgtagcacagattggtcttctcagtacagcatggtggctggggcaggccgagagaatggcatggagacgccgatgcacgagaacccggagtgggagaaggcccgtcaggccctggccagcatcagcaagtcaggagctgccggcggctctgccaagtccagcagcaatgggcctgtggccagtgcacagtacgtgtcccaggcagaagcctcagctttgcagcagcagcagtactaccagtggtaccagcagtacaactatgcctacccctacagctactactatcccatgagcatgtaccagagctatggctccccttcccagtatgggatggccggctcctatggctcagccacaccccagcagccatccgcaccccaacaccaagggactctgaaccagcccccagtccccggcatggatgagagcatgtcctaccaggctccccctcagcagctgccgtcggctcagccccctcagccctcaaatcccccacatggggctcacacgctgaacagtggccctcagcctgggacagctccagccacacagcacagccaggcggggcccgccacgggccaggcctatgggccacacacctacaccgaacctgccaagcccaagaagggccaacagctgtggaaccgcatgaaacccgcccctgggactggaggtctcaagttcaacatccagaagcgaccctttgctgttaccacccagagctttggctccaacgcagagggccagcacagtggttttggcccccagcccaaccctgagaaagttcagaaccacagcgggtcctctgcccgggggaacctgtctgggaagccggatgactggccccaggacatgaaagagtatgtggagcgctgcttcaccgcctgtgagtcggaggaggacaaggaccgcacggaaaagctgctcaaggaggtgctgcaggcgcggctgcaggacggctcggcctataccattgactggagccgggagcccttgccggggctgacccgggagcctgtggctgagagccctaagaagaagcggtgggaggccgctagcagccttcaccctcctagaggggcaggctcggcgacaaggggcgggggtgccccgtcccagcgagggacgcccggggctgggggtgccggtcgagcccggggcaacagcttcaccaagtttggcaaccgcaacgtcttcatgaaggacaacagctcttcttccagcacagactcccgctcccgctcctcctccaggtccccgacgcgccacttccgcagaagtgactcccactcagactccgacagctcctactcagggaatgagtgtcaccctgtgggccgcaggaacccgccccctaagggccggggcggtcgaggggcccatatggatcggggccgaggcagggcgcagcgtgggaagaggcacgatctggcgcccaccaagcgcagtcgaaagaagatggcggcgctggagtgtgaggacccggagcgagagctgaagaagcagaagcgggcagcccgcttccagcacggacactcccgccgcctgcgcctcgagcccctggtgctgcagatgagcagcctggagagcagtggggctgaccctgactggcaggagctgcagatcgtgggcacctgccctgacatcaccaagcactacctgcgcctcacctgtgcccccgacccgtccaccgtgcgccctgtggcagttttgaaaaagtcgctgtgcatggtcaagtgccactggaaagagaagcaggactacgcgtttgcctgcgagcagatgaagtcgatccggcaggatctgacggtgcagggcatccgcaccgagttcacggtggaggtgtacgagacccatgcccggatcgccttggagaagggtgaccatgaagagtttaaccagtgccagacgcagctcaagtcgctgtacgccgagaacttgcctggcaatgtgggcgagtttactgcctaccgaatcctctactacatcttcaccaagaactcgggagacatcaccacggagctggcatacctcacacgagaactgaaggcagatccttgcgtggcccacgccttggcattaaggacagcctgggccctgggcaactaccaccgctttttccggctctactgccatgcaccctgcatgtctggctacctcgtggacaagtttgcagatcgggagcgcaaggtcgccctcaaggccatgatcaaaacgtatgtggtgccaagctcccttctgcctttgctcttcccatccttccgcctcgcaccgcccctcagaccagctcctggccgcaggcctcccccagcccccaacccttgtcctggtccttgcttccccatcatctttctccattcagccctcccctctccagttcctcttgctctccttgttggtcacctctgtgttccgggtcactcctctccctctccccactgttcccagctcactgcctctggggcctcttctccaccccatctgtgtgtctcttcctcctgttctctcctgcctggaccccctagttcactccttgccctgggcttcctcagaaccctgaggtctctgctttctcagcttgtcgctgtgctcccaccatagagaccatctagacagcctctggtctaccaggacaaggcccagtcccactcagctcctttgagagcaccagaaacgcttagggagacacctgtgttgaggccacactgggcgcggtgccagaggcccctggtcaggccatgcccctgcagtgtccttcgttcactagacattgcgcctggcttgctgtgggtggggatgagttgcttgactcatgtttagacgcatggttctgtctggtgattgaggtgcccaggcgacgctgggcaatgtcaagagaggttttcgcttgtcacagcaaggggatgctcttggcatctagtgagtggaggccagggatgctgccctgccactgccattgggcctcagagctcagtcttgccaaggtggagaaattctggtcgaagaggttgaccggtagactgaagaggccttgagagcctggccaggtggctgtccacgtgaggtcatagtcacagcatggaggccttgagagcctggccaggtggccctccacgtgaggtcatggtcacagcatgggggccttgagtgcctggccaggtggccctccacgtgaggtcatggtcacagcatggaggccttgagagcctggccaggtggccctccacgtgaggttgtggtcacagcatgggggccttgagagcctggccaggtggccctccacgtgaggtcatggtcacagcatggaggccttgagagcctggccaggtggccctccgtgtgaggtcatggtcacagcatagtttggagctagggagggactgtcagcctggaggtttggagactcattctggaatctagtgtgggtcaagccaacttcagggagaggctgagccagggtaggagtcacaggagcagacgaggatgtggggtgccgtgcacagagctccatgaccagcttgggaagttagaaggaaggggaggcaggaggctgcttagtctgctgccatgatgggccccatgaatggtggctctcaagcttctgtgctacacaggggtgtgtggttgggcgagtgtccttgttaattgatacctaattggccttggttgggaacatagccatgagtgcccctcgtgggtggggcgccagtctgtcattgacctcattgtgtcagcaccttccccccaaggaggctgaccctgccctgccagctgagactgggagacggagtgggctctgatcccagggcttccaggaaagctctggctttggagcagaagcgggttctaggacttagtgcccctcactcggtgcctgggttcctgtgtgtgtggaaagggtagggctgcaccctgtggaagagggttcagggagctctgaggacctggctcgtgctagatgctcagtcagtagtgtgttttagcagcagccggaagtgactgctttcagtgtgtagtggtgagtgctagctggcacccctgcgcctggcttcccagacactgtaacgcagggcaggggaggcagcgagggctgggtccccacggtggccctggcagccccgccatccccatcccctgccacgtgctgctccctccatctggtccctgcccctcagccagcggaggagcccgctgggcccttccctgcccgtccccgctcctccctggcccccgcacaggtaagtgagggtgaggggggcacaggggactggggtcactaaccccccccgngccccccccgagcccctgaggtggggaggctgggaggcgggtggggagccagcaggcactgtgctgaggaaatcctgtgggcacccgaatgggggggcctccccgctcgtggggccctcccctgccctcccgcccgcccgcctcatcaccttctcctcttgtctccatagcttccgccctgcgctgccagtctcctacctgcaggccgagctggccttcgagggcgaggccgcctgccgggccttcctagagcccctgggcctggcctacacgggcccggacaactccagcatcgactgccgcctcagcctggcgcagctgtcagccttctgagcacccagcgaggaggggcgggggcaggggctgcagcccccagcgctgcctttgcggattctgtttttgagccgtggacttgggttgtaaatttatttgtggggagtgcgctccaggaagagccaccatccctgcccccgttttcccaccggggagtctgtacagagatttttctacgtttttattttttgcctcagagggatgggattggggaggaggggatgggcagcggagggttgggggcatggtctgcaggctcatctgtgtccgcctttcactccactaatgctgtctcagtgttttctctctctctctttcgagcttgcactccggtacccgacccggcgccctggcccatcccatgccggggggccagtggaaagaagacaggccgtccagcccgtgcccgcctgcggcgggggcacccagcaagcccgcccaccgcccgctgcctcacctgcttcgccacagactcttgttcccagccccttggggcctccgtgtttggggtgggggagctgcttagagactgtgcccgtcctcggccccccaccctgaagtgccagcaccaccagcaccagatcctccgccgccacaccgcactgaggacacgccggccgggccgcctcgtctcaagttgtataaagttgtctccgtgtcccctcctccctctgcccccagtgtttcttctgatttttttttcccctttccctccctccctctccgcattcttcccttggttcagcacaggtaaaacggttcccctccctccctgccttcatggatcaccagctcacgtcatgttgccttctcttttctttgtgtgtgtgtttatttaagttatttttcttcctcctctcccttttctttttggccctccctccctccctcttctgccatgtaactggaggatgtgctatgagtttgcaaacagctggactgtcaggctgctttttttccagatgttcctcctctgcctccccttcccctcctctcccctccttttccttccttccttcctttccttggagcactgagcaccatttggaagcttgagagaaaccaaaattaaagagagaaagagagagcgtgcacgctcctgctttgtctttcctgtgtgggctgtttgcatccattgtctcctccagaggtctgggggtgtcactccagggggatctcagccaggggctggaaaggcccccctgtcctccctatacggcacagccagagtgtctgcaggggctggcaccccacttcctggctgagggtgaactccagcttggggaggtggacctgggaaccatggggcaccttggccacggtgaggtgggggtgcagctgccctggagactgtagtgtactcagcccctcggcttccagcctctggctcagcacttgtgccatgctttccagtgtgggagagggtggggcacacagcacatgcgggcccaggaggaccagctttctaaagctcagccgagggggtgcatttagccccggggccaagagggcccgtctcagagctccaatggcagcggcctcctccccagcgcctgccagtcgcagcagggccagggtcaggtgtaggttctgagagggcactaggaagttggcgcagtgtggggccacgtggaccaggtattcctgggccttggtcacttctgcttgtagcccaggctcggtcaccatgagggccacaaaatgtgtggggcgcggttggcaaggggctgcaacactaaggcgggcccttttgtcctcgggccaggccgcaggaccccactcggcttctgtcgtctcagcggagccccccgggactcccagggcctgtgcttccttgccccccagcaatgtggtcctggtggctgctgttggcttcagtgcctcctcagtcactccggcgaggcgtcctcttggggccagtgttcccaaatcagcagctgtgcccagcgccctctcctgggccgcctccagctctccgggttcctccacgcctggttcctggtgccctgtgcagagcggccttgtgctccctcgcttgggggcagcctgggcctcctgacctgtccccgccagtgtccactcggcaccctctgccccgtgggcgccctcggtgttcggtgcgtccaggatggtgggcccgcgtcccgccgccgagccagagccaaagacgaggtcggtgcgcgaggcgcggtcccacacaaggcggccacggaagcggaagaagcgcacgcggtgctggggcactgccagcacgcccggcccgagcgccgccagcggctggtcccagcaaaaggcgctgaagggctcctcgcgcacacccagaaagcggtcgacgtagcccaccgagaagtcggcggggtcgaggcgcgggtcccagcggatgcgctggatgacgtccgcggctgtgcgcagcggcggcttcttggccccggcctccggctgcgcctcgcggccaggcggcgccggcgccccagggtggggctggcggcagcgggcgccgaagcggcagcggccttccaggaagaagcggcaggccggcgggggcgcgggttccgtggcgggggcttcctgcggcaactccggctctctggccgctgccatgggtgcggggaactggcacgcccgccgcgcagacgaggtcgccccgcacggagggcggctccccatggatgcaccgagcctcacccgacagtggcgtcagcggcccgcgctccggcctagctctggggaccacgccgcgtgccctcgcgaggactctggcccagtccctccttggtggagagcctgacaccgctgctctgggacttccgccggcgccctcccccagcgccaggaaagcaagctgcgtaaaggc

SEQ ID NO: 327626 - DNA, 7588 bp, Homo sapiens
  misc_feature (4401)..(4401): n is a, c, g, or t
tgccgctagaggccttgggtactgtttggcctaaggatgggcgttgtgcctccagacaggggcagggacctctagtcagcaccacgcgccctccgtgtccttgatacgaaatacatacacatatagtcttctcagtacagcatggtggctggggcaggccgagagaatggcatggagacgccgatgcacgagaacccggagtgggagaaggcccgtcaggccctggccagcatcagcaagtcaggagctgccggcggctctgccaagtccagcagcaatgggcctgtggccagtgcacagtacgtgtcccaggcagaagcctcagctttgcagcagcagcagtactaccagtggtaccagcagtacaactatgcctacccctacagctactactatcccatgagcatgtaccagagctatggctccccttcccagtatgggatggccggctcctatggctcagccacaccccagcagccatccgcaccccaacaccaagggactctgaaccagcccccagtccccggcatggatgagagcatgtcctaccaggctccccctcagcagctgccgtcggctcagccccctcagccctcaaatcccccacatggggctcacacgctgaacagtggccctcagcctgggacagctccagccacacagcacagccaggcggggcccgccacgggccaggcctatgggccacacacctacaccgaacctgccaagcccaagaagggccaacagctgtggaaccgcatgaaacccgcccctgggactggaggtctcaagttcaacatccagaagcgaccctttgctgttaccacccagagctttggctccaacgcagagggccagcacagtggttttggcccccagcccaaccctgagaaagttcagaaccacagcgggtcctctgcccgggggaacctgtctgggaagccggatgactggccccaggacatgaaagagtatgtggagcgctgcttcaccgcctgtgagtcggaggaggacaaggaccgcacggaaaagctgctcaaggaggtgctgcaggcgcggctgcaggacggctcggcctataccattgactggagccgggagcccttgccggggctgacccgggagcctgtggctgagagccctaagaagaagcggtgggaggccgctagcagccttcaccctcctagaggggcaggctcggcgacaaggggcgggggtgccccgtcccagcgagggacgcccggggctgggggtgccggtcgagcccggggcaacagcttcaccaagtttggcaaccgcaacgtcttcatgaaggacaacagctcttcttccagcacagactcccgctcccgctcctcctccaggtccccgacgcgccacttccgcagaagtgactcccactcagactccgacagctcctactcagggaatgagtgtcaccctgtgggccgcaggaacccgccccctaagggccggggcggtcgaggggcccatatggatcggggccgaggcagggcgcagcgtgggaagaggcacgatctggcgcccaccaagcgcagtcgaaagaagatggcggcgctggagtgtgaggacccggagcgagagctgaagaagcagaagcgggcagcccgcttccagcacggacactcccgccgcctgcgcctcgagcccctggtgctgcagatgagcagcctggagagcagtggggctgaccctgactggcaggagctgcagatcgtgggcacctgccctgacatcaccaagcactacctgcgcctcacctgtgcccccgacccgtccaccgtgcgccctgtggcagttttgaaaaagtcgctgtgcatggtcaagtgccactggaaagagaagcaggactacgcgtttgcctgcgagcagatgaagtcgatccggcaggatctgacggtgcagggcatccgcaccgagttcacggtggaggtgtacgagacccatgcccggatcgccttggagaagggtgaccatgaagagtttaaccagtgccagacgcagctcaagtcgctgtacgccgagaacttgcctggcaatgtgggcgagtttactgcctaccgaatcctctactacatcttcaccaagaactcgggagacatcaccacggagctggcatacctcacacgagaactgaaggcagatccttgcgtggcccacgccttggcattaaggacagcctgggccctgggcaactaccaccgctttttccggctctactgccatgcaccctgcatgtctggctacctcgtggacaagtttgcagatcgggagcgcaaggtcgccctcaaggccatgatcaaaacgtatgtggtgccaagctcccttctgcctttgctcttcccatccttccgcctcgcaccgcccctcagaccagctcctggccgcaggcctcccccagcccccaacccttgtcctggtccttgcttccccatcatctttctccattcagccctcccctctccagttcctcttgctctccttgttggtcacctctgtgttccgggtcactcctctccctctccccactgttcccagctcactgcctctggggcctcttctccaccccatctgtgtgtctcttcctcctgttctctcctgcctggaccccctagttcactccttgccctgggcttcctcagaaccctgaggtctctgctttctcagcttgtcgctgtgctcccaccatagagaccatctagacagcctctggtctaccaggacaaggcccagtcccactcagctcctttgagagcaccagaaacgcttagggagacacctgtgttgaggccacactgggcgcggtgccagaggcccctggtcaggccatgcccctgcagtgtccttcgttcactagacattgcgcctggcttgctgtgggtggggatgagttgcttgactcatgtttagacgcatggttctgtctggtgattgaggtgcccaggcgacgctgggcaatgtcaagagaggttttcgcttgtcacagcaaggggatgctcttggcatctagtgagtggaggccagggatgctgccctgccactgccattgggcctcagagctcagtcttgccaaggtggagaaattctggtcgaagaggttgaccggtagactgaagaggccttgagagcctggccaggtggctgtccacgtgaggtcatagtcacagcatggaggccttgagagcctggccaggtggccctccacgtgaggtcatggtcacagcatgggggccttgagtgcctggccaggtggccctccacgtgaggtcatggtcacagcatggaggccttgagagcctggccaggtggccctccacgtgaggttgtggtcacagcatgggggccttgagagcctggccaggtggccctccacgtgaggtcatggtcacagcatggaggccttgagagcctggccaggtggccctccgtgtgaggtcatggtcacagcatagtttggagctagggagggactgtcagcctggaggtttggagactcattctggaatctagtgtgggtcaagccaacttcagggagaggctgagccagggtaggagtcacaggagcagacgaggatgtggggtgccgtgcacagagctccatgaccagcttgggaagttagaaggaaggggaggcaggaggctgcttagtctgctgccatgatgggccccatgaatggtggctctcaagcttctgtgctacacaggggtgtgtggttgggcgagtgtccttgttaattgatacctaattggccttggttgggaacatagccatgagtgcccctcgtgggtggggcgccagtctgtcattgacctcattgtgtcagcaccttccccccaaggaggctgaccctgccctgccagctgagactgggagacggagtgggctctgatcccagggcttccaggaaagctctggctttggagcagaagcgggttctaggacttagtgcccctcactcggtgcctgggttcctgtgtgtgtggaaagggtagggctgcaccctgtggaagagggttcagggagctctgaggacctggctcgtgctagatgctcagtcagtagtgtgttttagcagcagccggaagtgactgctttcagtgtgtagtggtgagtgctagctggcacccctgcgcctggcttcccagacactgtaacgcagggcaggggaggcagcgagggctgggtccccacggtggccctggcagccccgccatccccatcccctgccacgtgctgctccctccatctggtccctgcccctcagccagcggaggagcccgctgggcccttccctgcccgtccccgctcctccctggcccccgcacaggtaagtgagggtgaggggggcacaggggactggggtcactaaccccccccgngccccccccgagcccctgaggtggggaggctgggaggcgggtggggagccagcaggcactgtgctgaggaaatcctgtgggcacccgaatgggggggcctccccgctcgtggggccctcccctgccctcccgcccgcccgcctcatcaccttctcctcttgtctccatagcttccgccctgcgctgccagtctcctacctgcaggccgagctggccttcgagggcgaggccgcctgccgggccttcctagagcccctgggcctggcctacacgggcccggacaactccagcatcgactgccgcctcagcctggcgcagctgtcagccttctgagcacccagcgaggaggggcgggggcaggggctgcagcccccagcgctgcctttgcggattctgtttttgagccgtggacttgggttgtaaatttatttgtggggagtgcgctccaggaagagccaccatccctgcccccgttttcccaccggggagtctgtacagagatttttctacgtttttattttttgcctcagagggatgggattggggaggaggggatgggcagcggagggttgggggcatggtctgcaggctcatctgtgtccgcctttcactccactaatgctgtctcagtgttttctctctctctctttcgagcttgcactccggtacccgacccggcgccctggcccatcccatgccggggggccagtggaaagaagacaggccgtccagcccgtgcccgcctgcggcgggggcacccagcaagcccgcccaccgcccgctgcctcacctgcttcgccacagactcttgttcccagccccttggggcctccgtgtttggggtgggggagctgcttagagactgtgcccgtcctcggccccccaccctgaagtgccagcaccaccagcaccagatcctccgccgccacaccgcactgaggacacgccggccgggccgcctcgtctcaagttgtataaagttgtctccgtgtcccctcctccctctgcccccagtgtttcttctgatttttttttcccctttccctccctccctctccgcattcttcccttggttcagcacaggtaaaacggttcccctccctccctgccttcatggatcaccagctcacgtcatgttgccttctcttttctttgtgtgtgtgtttatttaagttatttttcttcctcctctcccttttctttttggccctccctccctccctcttctgccatgtaactggaggatgtgctatgagtttgcaaacagctggactgtcaggctgctttttttccagatgttcctcctctgcctccccttcccctcctctcccctccttttccttccttccttcctttccttggagcactgagcaccatttggaagcttgagagaaaccaaaattaaagagagaaagagagagcgtgcacgctcctgctttgtctttcctgtgtgggctgtttgcatccattgtctcctccagaggtctgggggtgtcactccagggggatctcagccaggggctggaaaggcccccctgtcctccctatacggcacagccagagtgtctgcaggggctggcaccccacttcctggctgagggtgaactccagcttggggaggtggacctgggaaccatggggcaccttggccacggtgaggtgggggtgcagctgccctggagactgtagtgtactcagcccctcggcttccagcctctggctcagcacttgtgccatgctttccagtgtgggagagggtggggcacacagcacatgcgggcccaggaggaccagctttctaaagctcagccgagggggtgcatttagccccggggccaagagggcccgtctcagagctccaatggcagcggcctcctccccagcgcctgccagtcgcagcagggccagggtcaggtgtaggttctgagagggcactaggaagttggcgcagtgtggggccacgtggaccaggtattcctgggccttggtcacttctgcttgtagcccaggctcggtcaccatgagggccacaaaatgtgtggggcgcggttggcaaggggctgcaacactaaggcgggcccttttgtcctcgggccaggccgcaggaccccactcggcttctgtcgtctcagcggagccccccgggactcccagggcctgtgcttccttgccccccagcaatgtggtcctggtggctgctgttggcttcagtgcctcctcagtcactccggcgaggcgtcctcttggggccagtgttcccaaatcagcagctgtgcccagcgccctctcctgggccgcctccagctctccgggttcctccacgcctggttcctggtgccctgtgcagagcggccttgtgctccctcgcttgggggcagcctgggcctcctgacctgtccccgccagtgtccactcggcaccctctgccccgtgggcgccctcggtgttcggtgcgtccaggatggtgggcccgcgtcccgccgccgagccagagccaaagacgaggtcggtgcgcgaggcgcggtcccacacaaggcggccacggaagcggaagaagcgcacgcggtgctggggcactgccagcacgcccggcccgagcgccgccagcggctggtcccagcaaaaggcgctgaagggctcctcgcgcacacccagaaagcggtcgacgtagcccaccgagaagtcggcggggtcgaggcgcgggtcccagcggatgcgctggatgacgtccgcggctgtgcgcagcggcggcttcttggccccggcctccggctgcgcctcgcggccaggcggcgccggcgccccagggtggggctggcggcagcgggcgccgaagcggcagcggccttccaggaagaagcggcaggccggcgggggcgcgggttccgtggcgggggcttcctgcggcaactccggctctctggccgctgccatgggtgcggggaactggcacgcccgccgcgcagacgaggtcgccccgcacggagggcggctccccatggatgcaccgagcctcacccgacagtggcgtcagcggcccgcgctccggcctagctctggggaccacgccgcgtgccctcgcgaggactctggcccagtccctccttggtggagagcctgacaccgctgctctgggacttccgccggcgccctcccccagcgccaggaaagcaagctgcgtaaaggc

SEQ ID NO: 327627 - DNA, 7896 bp, Homo sapiens
  misc_feature (4709)..(4709): n is a, c, g, or t
ttttttgagatggagtctttctctgttgcccactgtactctatcgtgggcgacgacagagcaagagcaagactccgtctccgagaacaacaacaacagcaacaagaaaacaacaataaaaaaaataaggctgcgtgggaggcagaaagagctaatgcggccacgcttgtcccctcggggccaccgtccccacccagacttccggtctgccttaaaatgttcatgcgtaagtgcgtgggcaggaaggcgggctcaagcgcagctcgtggcgttcattggctgtgcagggccgagggaggcggtgcaaggccgccgcgtgacgtcaggacgccgcggtcaggacgtcgaagccaaagaagaccagagccagccgggtggcacagcggtgtcgtggccgtgttgctgatcgcctgggtggttgttggcgtgtccctgcagcgaaggatcctgtgacagtgaaaaagcagtctggctcccgaggtccaccccttataccccaaggtccagatggcggccaacgtgggtgatcaacgtagcacagattggtcttctcagtacagcatggtggctggggcaggccgagagaatggcatggagacgccgatgcacgagaacccggagtgggagaaggcccgtcaggccctggccagcatcagcaagtcaggagctgccggcggctctgccaagtccagcagcaatgggcctgtggccagtgcacagtacgtgtcccaggcagaagcctcagctttgcagcagcagcagtactaccagtggtaccagcagtacaactatgcctacccctacagctactactatcccatgcccccagtccccggcatggatgagagcatgtcctaccaggctccccctcagcagctgccgtcggctcagccccctcagccctcaaatcccccacatggggctcacacgctgaacagtggccctcagcctgggacagctccagccacacagcacagccaggcggggcccgccacgggccaggcctatgggccacacacctacaccgaacctgccaagcccaagaagggccaacagctgtggaaccgcatgaaacccgcccctgggactggaggtctcaagttcaacatccagaagcgaccctttgctgttaccacccagagctttggctccaacgcagagggccagcacagtggttttggcccccagcccaaccctgagaaagttcagaaccacagcgggtcctctgcccgggggaacctgtctgggaagccggatgactggccccaggacatgaaagagtatgtggagcgctgcttcaccgcctgtgagtcggaggaggacaaggaccgcacggaaaagctgctcaaggaggtgctgcaggcgcggctgcaggacggctcggcctataccattgactggagccgggagcccttgccggggctgacccgggagcctgtggctgagagccctaagaagaagcggtgggaggccgctagcagccttcaccctcctagaggggcaggctcggcgacaaggggcgggggtgccccgtcccagcgagggacgcccggggctgggggtgccggtcgagcccggggcaacagcttcaccaagtttggcaaccgcaacgtcttcatgaaggacaacagctcttcttccagcacagactcccgctcccgctcctcctccaggtccccgacgcgccacttccgcagaagtgactcccactcagactccgacagctcctactcagggaatgagtgtcaccctgtgggccgcaggaacccgccccctaagggccggggcggtcgaggggcccatatggatcggggccgaggcagggcgcagcgtgggaagaggcacgatctggcgcccaccaagcgcagtcgaaagaagatggcggcgctggagtgtgaggacccggagcgagagctgaagaagcagaagcgggcagcccgcttccagcacggacactcccgccgcctgcgcctcgagcccctggtgctgcagatgagcagcctggagagcagtggggctgaccctgactggcaggagctgcagatcgtgggcacctgccctgacatcaccaagcactacctgcgcctcacctgtgcccccgacccgtccaccgtgcgccctgtggcagttttgaaaaagtcgctgtgcatggtcaagtgccactggaaagagaagcaggactacgcgtttgcctgcgagcagatgaagtcgatccggcaggatctgacggtgcagggcatccgcaccgagttcacggtggaggtgtacgagacccatgcccggatcgccttggagaagggtgaccatgaagagtttaaccagtgccagacgcagctcaagtcgctgtacgccgagaacttgcctggcaatgtgggcgagtttactgcctaccgaatcctctactacatcttcaccaagaactcgggagacatcaccacggagctggcatacctcacacgagaactgaaggcagatccttgcgtggcccacgccttggcattaaggacagcctgggccctgggcaactaccaccgctttttccggctctactgccatgcaccctgcatgtctggctacctcgtggacaagtttgcagatcgggagcgcaaggtcgccctcaaggccatgatcaaaacgtatgtggtgccaagctcccttctgcctttgctcttcccatccttccgcctcgcaccgcccctcagaccagctcctggccgcaggcctcccccagcccccaacccttgtcctggtccttgcttccccatcatctttctccattcagccctcccctctccagttcctcttgctctccttgttggtcacctctgtgttccgggtcactcctctccctctccccactgttcccagctcactgcctctggggcctcttctccaccccatctgtgtgtctcttcctcctgttctctcctgcctggaccccctagttcactccttgccctgggcttcctcagaaccctgaggtctctgctttctcagcttgtcgctgtgctcccaccatagagaccatctagacagcctctggtctaccaggacaaggcccagtcccactcagctcctttgagagcaccagaaacgcttagggagacacctgtgttgaggccacactgggcgcggtgccagaggcccctggtcaggccatgcccctgcagtgtccttcgttcactagacattgcgcctggcttgctgtgggtggggatgagttgcttgactcatgtttagacgcatggttctgtctggtgattgaggtgcccaggcgacgctgggcaatgtcaagagaggttttcgcttgtcacagcaaggggatgctcttggcatctagtgagtggaggccagggatgctgccctgccactgccattgggcctcagagctcagtcttgccaaggtggagaaattctggtcgaagaggttgaccggtagactgaagaggccttgagagcctggccaggtggctgtccacgtgaggtcatagtcacagcatggaggccttgagagcctggccaggtggccctccacgtgaggtcatggtcacagcatgggggccttgagtgcctggccaggtggccctccacgtgaggtcatggtcacagcatggaggccttgagagcctggccaggtggccctccacgtgaggttgtggtcacagcatgggggccttgagagcctggccaggtggccctccacgtgaggtcatggtcacagcatggaggccttgagagcctggccaggtggccctccgtgtgaggtcatggtcacagcatagtttggagctagggagggactgtcagcctggaggtttggagactcattctggaatctagtgtgggtcaagccaacttcagggagaggctgagccagggtaggagtcacaggagcagacgaggatgtggggtgccgtgcacagagctccatgaccagcttgggaagttagaaggaaggggaggcaggaggctgcttagtctgctgccatgatgggccccatgaatggtggctctcaagcttctgtgctacacaggggtgtgtggttgggcgagtgtccttgttaattgatacctaattggccttggttgggaacatagccatgagtgcccctcgtgggtggggcgccagtctgtcattgacctcattgtgtcagcaccttccccccaaggaggctgaccctgccctgccagctgagactgggagacggagtgggctctgatcccagggcttccaggaaagctctggctttggagcagaagcgggttctaggacttagtgcccctcactcggtgcctgggttcctgtgtgtgtggaaagggtagggctgcaccctgtggaagagggttcagggagctctgaggacctggctcgtgctagatgctcagtcagtagtgtgttttagcagcagccggaagtgactgctttcagtgtgtagtggtgagtgctagctggcacccctgcgcctggcttcccagacactgtaacgcagggcaggggaggcagcgagggctgggtccccacggtggccctggcagccccgccatccccatcccctgccacgtgctgctccctccatctggtccctgcccctcagccagcggaggagcccgctgggcccttccctgcccgtccccgctcctccctggcccccgcacaggtaagtgagggtgaggggggcacaggggactggggtcactaaccccccccgngccccccccgagcccctgaggtggggaggctgggaggcgggtggggagccagcaggcactgtgctgaggaaatcctgtgggcacccgaatgggggggcctccccgctcgtggggccctcccctgccctcccgcccgcccgcctcatcaccttctcctcttgtctccatagcttccgccctgcgctgccagtctcctacctgcaggccgagctggccttcgagggcgaggccgcctgccgggccttcctagagcccctgggcctggcctacacgggcccggacaactccagcatcgactgccgcctcagcctggcgcagctgtcagccttctgagcacccagcgaggaggggcgggggcaggggctgcagcccccagcgctgcctttgcggattctgtttttgagccgtggacttgggttgtaaatttatttgtggggagtgcgctccaggaagagccaccatccctgcccccgttttcccaccggggagtctgtacagagatttttctacgtttttattttttgcctcagagggatgggattggggaggaggggatgggcagcggagggttgggggcatggtctgcaggctcatctgtgtccgcctttcactccactaatgctgtctcagtgttttctctctctctctttcgagcttgcactccggtacccgacccggcgccctggcccatcccatgccggggggccagtggaaagaagacaggccgtccagcccgtgcccgcctgcggcgggggcacccagcaagcccgcccaccgcccgctgcctcacctgcttcgccacagactcttgttcccagccccttggggcctccgtgtttggggtgggggagctgcttagagactgtgcccgtcctcggccccccaccctgaagtgccagcaccaccagcaccagatcctccgccgccacaccgcactgaggacacgccggccgggccgcctcgtctcaagttgtataaagttgtctccgtgtcccctcctccctctgcccccagtgtttcttctgatttttttttcccctttccctccctccctctccgcattcttcccttggttcagcacaggtaaaacggttcccctccctccctgccttcatggatcaccagctcacgtcatgttgccttctcttttctttgtgtgtgtgtttatttaagttatttttcttcctcctctcccttttctttttggccctccctccctccctcttctgccatgtaactggaggatgtgctatgagtttgcaaacagctggactgtcaggctgctttttttccagatgttcctcctctgcctccccttcccctcctctcccctccttttccttccttccttcctttccttggagcactgagcaccatttggaagcttgagagaaaccaaaattaaagagagaaagagagagcgtgcacgctcctgctttgtctttcctgtgtgggctgtttgcatccattgtctcctccagaggtctgggggtgtcactccagggggatctcagccaggggctggaaaggcccccctgtcctccctatacggcacagccagagtgtctgcaggggctggcaccccacttcctggctgagggtgaactccagcttggggaggtggacctgggaaccatggggcaccttggccacggtgaggtgggggtgcagctgccctggagactgtagtgtactcagcccctcggcttccagcctctggctcagcacttgtgccatgctttccagtgtgggagagggtggggcacacagcacatgcgggcccaggaggaccagctttctaaagctcagccgagggggtgcatttagccccggggccaagagggcccgtctcagagctccaatggcagcggcctcctccccagcgcctgccagtcgcagcagggccagggtcaggtgtaggttctgagagggcactaggaagttggcgcagtgtggggccacgtggaccaggtattcctgggccttggtcacttctgcttgtagcccaggctcggtcaccatgagggccacaaaatgtgtggggcgcggttggcaaggggctgcaacactaaggcgggcccttttgtcctcgggccaggccgcaggaccccactcggcttctgtcgtctcagcggagccccccgggactcccagggcctgtgcttccttgccccccagcaatgtggtcctggtggctgctgttggcttcagtgcctcctcagtcactccggcgaggcgtcctcttggggccagtgttcccaaatcagcagctgtgcccagcgccctctcctgggccgcctccagctctccgggttcctccacgcctggttcctggtgccctgtgcagagcggccttgtgctccctcgcttgggggcagcctgggcctcctgacctgtccccgccagtgtccactcggcaccctctgccccgtgggcgccctcggtgttcggtgcgtccaggatggtgggcccgcgtcccgccgccgagccagagccaaagacgaggtcggtgcgcgaggcgcggtcccacacaaggcggccacggaagcggaagaagcgcacgcggtgctggggcactgccagcacgcccggcccgagcgccgccagcggctggtcccagcaaaaggcgctgaagggctcctcgcgcacacccagaaagcggtcgacgtagcccaccgagaagtcggcggggtcgaggcgcgggtcccagcggatgcgctggatgacgtccgcggctgtgcgcagcggcggcttcttggccccggcctccggctgcgcctcgcggccaggcggcgccggcgccccagggtggggctggcggcagcgggcgccgaagcggcagcggccttccaggaagaagcggcaggccggcgggggcgcgggttccgtggcgggggcttcctgcggcaactccggctctctggccgctgccatgggtgcggggaactggcacgcccgccgcgcagacgaggtcgccccgcacggagggcggctccccatggatgcaccgagcctcacccgacagtggcgtcagcggcccgcgctccggcctagctctggggaccacgccgcgtgccctcgcgaggactctggcccagtccctccttggtggagagcctgacaccgctgctctgggacttccgccggcgccctcccccagcgccaggaaagcaagctgcgtaaaggc

SEQ ID NO: 327628 - DNA, 7840 bp, Homo sapiens
  misc_feature (4653)..(4653): n is a, c, g, or t
ttttttgagatggagtctttctctgttgcccactgtactctatcgtgggcgacgacagagcaagagcaagactccgtctccgagaacaacaacaacagcaacaagaaaacaacaataaaaaaaataaggctgcgtgggaggcagaaagagctaatgcggccacgcttgtcccctcggggccaccgtccccacccagacttccggtctgccttaaaatgttcatgcgtaagtgcgtgggcaggaaggcgggctcaagcgcagctcgtggcgttcattggctgtgcagggccgagggaggcggtgcaaggccgccgcgtgacgtcaggacgccgcggtcaggacgtcgaagccaaagaagaccagagccagccgggtggcacagcggtgtcgtggccgtgttgctgatcgcctgggtggttgttggcgtgtccctgcagcgaaggatcctgtgacagtgaaaaagcagtctggctcccgaggtccaccccttataccccaaggtccagatggcggccaacgtgggtgatcaacgtagcacagattggtcttctcagtacagcatggtggctggggcaggccgagagaatggcatggagacgccgatgcacgagaacccggagtgggagaaggcccgtcaggccctggccagcatcagcaagtcaggagctgccggcggctctgccaagtccagcagcaatgggcctgtggccagtgcacagtacgtgtcccaggcagaagcctcagctttgcagcagcagcagtactaccagtggtaccagcagtacaactatgcctacccctacagctactactatcccatgagcatgtaccagagctatggctccccttcccagtatgggatggccggctcctatggctcagccacaccccagcagccatccgcaccccaacaccaagggactctgaaccagcccccagtccccggcatggatgagagcatgtcctaccaggctccccctcagcagctgccgtcggctcagccccctcagccctcaaatcccccacatggggctcacacgctgaacagtggccctcagcctgggacagctccagccacacagcacagccaggcggggcccgccacgggccaggcctatgggccacacacctacaccgaacctgccaagcccaagaagggccaacagctgtggaaccgcatgaaacccgcccctgggactggaggtctcaagttcaacatccagaagcgaccctttgctgttaccacccagagctttggctccaacgcagagggccagcacagtggttttggcccccagcccaaccctgagaaagttcagaaccacagcgggtcctctgcccgggggaacctgtctgggaagccggatgactggccccaggacatgaaagagtatgtggagcgctgcttcaccgcctgtgagtcggaggaggacaaggaccgcacggaaaagctgctcaaggaggtgctgcaggcgcggctgcaggacggctcggcctataccattgactggagccgggagcccttgccggggctgacccgggagcctgtggctgagagccctaagaagaagcggtgggaggccgctagcagccttcaccctcctagaggggcaggctcggcgacaaggggcgggggtgccccgtcccagcgagggacgcccggggctgggggtgccggtcgagcccggggcaacagcttcaccaagtttggcaaccgcaacgtcttcatgaaggacaacagctcttcttccagcacagactcccgctcccgctcctcctccaggtccccgacgcgccacttccgcagaagtgactcccactcagactccgacagctcctactcagggaatgagtgtcaccctgtgggccgcaggaacccgccccctaagggccggggcggtcgaggggcccatatggatcggggccgaggcagggcgcagcgtgggaagaggcacgatctggcgcccaccaagcgcagtcgaaagaagatggcggcgctggagtgtgaggacccggagcgagagctgaagaagcagaagcgggcagcccgcttccagcacggacactcccgccgcctgcgcctcgagcccctggtgctgcagatgagcagcctggagagcagtggggctgaccctgactggcaggagctgcagatcgtgggcacctgccctgacatcaccaagcactacctgcgcctcacctgtgcccccgacccgtccaccgtgcgccctgtggcagttttgaaaaagtcgctgtgcatggtcaagtgccactggaaagagaagcaggactacgcgtttgcctgcgagcagatgaagtcgatccggcaggatctgacggtgcagggcatccgcaccgagttcacggtggaggtgtacgagacccatgcccggatcgccttggagaagggtgaccatgaagagtttaaccagtgccagacgcagctcaagtcgctgtacgccgagaacttgcctggcaatgtgggcgagtttactgcctaccgaatcctctactacatcttcaccaagaactcgggagacatcaccacggagctggcatacctcacacgagaactgaaggcagatccttgcgtggcccacgccttggcattaaggacagcctgggccctgggcaactaccaccgctttttccggctctactgccatgcaccctgcatgtctggctacctcgtggacaagtttgcagatcgggagcgcaaggtcgccctcaaggccatgatcaaaacgtatgtggtgccaagctcccttctgcctttgctcttcccatccttccgcctcgcaccgcccctcagaccagctcctggccgcaggcctcccccagcccccaacccttgtcctggtccttgcttccccatcatctttctccattcagccctcccctctccagttcctcttgctctccttgttggtcacctctgtgttccgggtcactcctctccctctccccactgttcccagctcactgcctctggggcctcttctccaccccatctgtgtgtctcttcctcctgttctctcctgcctggaccccctagttcactccttgccctgggcttcctcagaaccctgaggtctctgctttctcagcttgtcgctgtgctcccaccatagagaccatctagacagcctctggtctaccaggacaaggcccagtcccactcagctcctttgagagcaccagaaacgcttagggagacacctgtgttgaggccacactgggcgcggtgccagaggcccctggtcaggccatgcccctgcagtgtccttcgttcactagacattgcgcctggcttgctgtgggtggggatgagttgcttgactcatgtttagacgcatggttctgtctggtgattgaggtgcccaggcgacgctgggcaatgtcaagagaggttttcgcttgtcacagcaaggggatgctcttggcatctagtgagtggaggccagggatgctgccctgccactgccattgggcctcagagctcagtcttgccaaggtggagaaattctggtcgaagaggttgaccggtagactgaagaggccttgagagcctggccaggtggctgtccacgtgaggtcatagtcacagcatggaggccttgagagcctggccaggtggccctccacgtgaggtcatggtcacagcatgggggccttgagtgcctggccaggtggccctccacgtgaggtcatggtcacagcatggaggccttgagagcctggccaggtggccctccacgtgaggttgtggtcacagcatgggggccttgagagcctggccaggtggccctccacgtgaggtcatggtcacagcatggaggccttgagagcctggccaggtggccctccgtgtgaggtcatggtcacagcatagtttggagctagggagggactgtcagcctggaggtttggagactcattctggaatctagtgtgggtcaagccaacttcagggagaggctgagccagggtaggagtcacaggagcagacgaggatgtggggtgccgtgcacagagctccatccatgagtgcccctcgtgggtggggcgccagtctgtcattgacctcattgtgtcagcaccttccccccaaggaggctgaccctgccctgccagctgagactgggagacggagtgggctctgatcccagggcttccaggaaagctctggctttggagcagaagcgggttctaggacttagtgcccctcactcggtgcctgggttcctgtgtgtgtggaaagggtagggctgcaccctgtggaagagggttcagggagctctgaggacctggctcgtgctagatgctcagtcagtagtgtgttttagcagcagccggaagtgactgctttcagtgtgtagtggtgagtgctagctggcacccctgcgcctggcttcccagacactgtaacgcagggcaggggaggcagcgagggctgggtccccacggtggccctggcagccccgccatccccatcccctgccacgtgctgctccctccatctggtccctgcccctcagccagcggaggagcccgctgggcccttccctgcccgtccccgctcctccctggcccccgcacaggtaagtgagggtgaggggggcacaggggactggggtcactaaccccccccgngccccccccgagcccctgaggtggggaggctgggaggcgggtggggagccagcaggcactgtgctgaggaaatcctgtgggcacccgaatgggggggcctccccgctcgtggggccctcccctgccctcccgcccgcccgcctcatcaccttctcctcttgtctccatagcttccgccctgcgctgccagtctcctacctgcaggccgagctggccttcgagggcgaggccgcctgccgggccttcctagagcccctgggcctggcctacacgggcccggacaactccagcatcgactgccgcctcagcctggcgcagctgtcagccttctgagcacccagcgaggaggggcgggggcaggggctgcagcccccagcgctgcctttgcggattctgtttttgagccgtggacttgggttgtaaatttatttgtggggagtgcgctccaggaagagccaccatccctgcccccgttttcccaccggggagtctgtacagagatttttctacgtttttattttttgcctcagagggatgggattggggaggaggggatgggcagcggagggttgggggcatggtctgcaggctcatctgtgtccgcctttcactccactaatgctgtctcagtgttttctctctctctctttcgagcttgcactccggtacccgacccggcgccctggcccatcccatgccggggggccagtggaaagaagacaggccgtccagcccgtgcccgcctgcggcgggggcacccagcaagcccgcccaccgcccgctgcctcacctgcttcgccacagactcttgttcccagccccttggggcctccgtgtttggggtgggggagctgcttagagactgtgcccgtcctcggccccccaccctgaagtgccagcaccaccagcaccagatcctccgccgccacaccgcactgaggacacgccggccgggccgcctcgtctcaagttgtataaagttgtctccgtgtcccctcctccctctgcccccagtgtttcttctgatttttttttcccctttccctccctccctctccgcattcttcccttggttcagcacaggtaaaacggttcccctccctccctgccttcatggatcaccagctcacgtcatgttgccttctcttttctttgtgtgtgtgtttatttaagttatttttcttcctcctctcccttttctttttggccctccctccctccctcttctgccatgtaactggaggatgtgctatgagtttgcaaacagctggactgtcaggctgctttttttccagatgttcctcctctgcctccccttcccctcctctcccctccttttccttccttccttcctttccttggagcactgagcaccatttggaagcttgagagaaaccaaaattaaagagagaaagagagagcgtgcacgctcctgctttgtctttcctgtgtgggctgtttgcatccattgtctcctccagaggtctgggggtgtcactccagggggatctcagccaggggctggaaaggcccccctgtcctccctatacggcacagccagagtgtctgcaggggctggcaccccacttcctggctgagggtgaactccagcttggggaggtggacctgggaaccatggggcaccttggccacggtgaggtgggggtgcagctgccctggagactgtagtgtactcagcccctcggcttccagcctctggctcagcacttgtgccatgctttccagtgtgggagagggtggggcacacagcacatgcgggcccaggaggaccagctttctaaagctcagccgagggggtgcatttagccccggggccaagagggcccgtctcagagctccaatggcagcggcctcctccccagcgcctgccagtcgcagcagggccagggtcaggtgtaggttctgagagggcactaggaagttggcgcagtgtggggccacgtggaccaggtattcctgggccttggtcacttctgcttgtagcccaggctcggtcaccatgagggccacaaaatgtgtggggcgcggttggcaaggggctgcaacactaaggcgggcccttttgtcctcgggccaggccgcaggaccccactcggcttctgtcgtctcagcggagccccccgggactcccagggcctgtgcttccttgccccccagcaatgtggtcctggtggctgctgttggcttcagtgcctcctcagtcactccggcgaggcgtcctcttggggccagtgttcccaaatcagcagctgtgcccagcgccctctcctgggccgcctccagctctccgggttcctccacgcctggttcctggtgccctgtgcagagcggccttgtgctccctcgcttgggggcagcctgggcctcctgacctgtccccgccagtgtccactcggcaccctctgccccgtgggcgccctcggtgttcggtgcgtccaggatggtgggcccgcgtcccgccgccgagccagagccaaagacgaggtcggtgcgcgaggcgcggtcccacacaaggcggccacggaagcggaagaagcgcacgcggtgctggggcactgccagcacgcccggcccgagcgccgccagcggctggtcccagcaaaaggcgctgaagggctcctcgcgcacacccagaaagcggtcgacgtagcccaccgagaagtcggcggggtcgaggcgcgggtcccagcggatgcgctggatgacgtccgcggctgtgcgcagcggcggcttcttggccccggcctccggctgcgcctcgcggccaggcggcgccggcgccccagggtggggctggcggcagcgggcgccgaagcggcagcggccttccaggaagaagcggcaggccggcgggggcgcgggttccgtggcgggggcttcctgcggcaactccggctctctggccgctgccatgggtgcggggaactggcacgcccgccgcgcagacgaggtcgccccgcacggagggcggctccccatggatgcaccgagcctcacccgacagtggcgtcagcggcccgcgctccggcctagctctggggaccacgccgcgtgccctcgcgaggactctggcccagtccctccttggtggagagcctgacaccgctgctctgggacttccgccggcgccctcccccagcgccaggaaagcaagctgcgtaaaggc

SEQ ID NO: 327629 - DNA, 6737 bp, Homo sapiens
  misc_feature (3550)..(3550): n is a, c, g, or t
tgaagtcctggttggagggaggccggtggggtggggtggggaccatgggtgctggagaggcgtgcattgctcagtggttaagcgcaccctctggagacggaaaacctgggttcgcgtctcatttctgcactgtagtagctgagccgcctggggtaagtgcctttcctttcggaggcgggtcggtaccttgagggaggtggtggcggctgtcctgccagtgtctggcggggttggtgacgccctgccctgctgtattctcaggctgacccgggagcctgtggctgagagccctaagaagaagcggtgggaggccgctagcagccttcaccctcctagaggggcaggctcggcgacaaggggcgggggtgccccgtcccagcgagggacgcccggggctgggggtgccggtcgagcccggggcaacagcttcaccaagtttggcaaccgcaacgtcttcatgaaggacaacagctcttcttccagcacagactcccgctcccgctcctcctccaggtccccgacgcgccacttccgcagaagtgactcccactcagactccgacagctcctactcagggaatgagtgtcaccctgtgggccgcaggaacccgccccctaagggccggggcggtcgaggggcccatatggatcggggccgaggcagggcgcagcgtgggaagaggcacgatctggcgcccaccaagcgcagtcgaaagaagatggcggcgctggagtgtgaggacccggagcgagagctgaagaagcagaagcgggcagcccgcttccagcacggacactcccgccgcctgcgcctcgagcccctggtgctgcagatgagcagcctggagagcagtggggctgaccctgactggcaggagctgcagatcgtgggcacctgccctgacatcaccaagcactacctgcgcctcacctgtgcccccgacccgtccaccgtgcgccctgtggcagttttgaaaaagtcgctgtgcatggtcaagtgccactggaaagagaagcaggactacgcgtttgcctgcgagcagatgaagtcgatccggcaggatctgacggtgcagggcatccgcaccgagttcacggtggaggtgtacgagacccatgcccggatcgccttggagaagggtgaccatgaagagtttaaccagtgccagacgcagctcaagtcgctgtacgccgagaacttgcctggcaatgtgggcgagtttactgcctaccgaatcctctactacatcttcaccaagaactcgggagacatcaccacggagctggcatacctcacacgagaactgaaggcagatccttgcgtggcccacgccttggcattaaggacagcctgggccctgggcaactaccaccgctttttccggctctactgccatgcaccctgcatgtctggctacctcgtggacaagtttgcagatcgggagcgcaaggtcgccctcaaggccatgatcaaaacgtatgtggtgccaagctcccttctgcctttgctcttcccatccttccgcctcgcaccgcccctcagaccagctcctggccgcaggcctcccccagcccccaacccttgtcctggtccttgcttccccatcatctttctccattcagccctcccctctccagttcctcttgctctccttgttggtcacctctgtgttccgggtcactcctctccctctccccactgttcccagctcactgcctctggggcctcttctccaccccatctgtgtgtctcttcctcctgttctctcctgcctggaccccctagttcactccttgccctgggcttcctcagaaccctgaggtctctgctttctcagcttgtcgctgtgctcccaccatagagaccatctagacagcctctggtctaccaggacaaggcccagtcccactcagctcctttgagagcaccagaaacgcttagggagacacctgtgttgaggccacactgggcgcggtgccagaggcccctggtcaggccatgcccctgcagtgtccttcgttcactagacattgcgcctggcttgctgtgggtggggatgagttgcttgactcatgtttagacgcatggttctgtctggtgattgaggtgcccaggcgacgctgggcaatgtcaagagaggttttcgcttgtcacagcaaggggatgctcttggcatctagtgagtggaggccagggatgctgccctgccactgccattgggcctcagagctcagtcttgccaaggtggagaaattctggtcgaagaggttgaccggtagactgaagaggccttgagagcctggccaggtggctgtccacgtgaggtcatagtcacagcatggaggccttgagagcctggccaggtggccctccacgtgaggtcatggtcacagcatgggggccttgagtgcctggccaggtggccctccacgtgaggtcatggtcacagcatggaggccttgagagcctggccaggtggccctccacgtgaggttgtggtcacagcatgggggccttgagagcctggccaggtggccctccacgtgaggtcatggtcacagcatggaggccttgagagcctggccaggtggccctccgtgtgaggtcatggtcacagcatagtttggagctagggagggactgtcagcctggaggtttggagactcattctggaatctagtgtgggtcaagccaacttcagggagaggctgagccagggtaggagtcacaggagcagacgaggatgtggggtgccgtgcacagagctccatgaccagcttgggaagttagaaggaaggggaggcaggaggctgcttagtctgctgccatgatgggccccatgaatggtggctctcaagcttctgtgctacacaggggtgtgtggttgggcgagtgtccttgttaattgatacctaattggccttggttgggaacatagccatgagtgcccctcgtgggtggggcgccagtctgtcattgacctcattgtgtcagcaccttccccccaaggaggctgaccctgccctgccagctgagactgggagacggagtgggctctgatcccagggcttccaggaaagctctggctttggagcagaagcgggttctaggacttagtgcccctcactcggtgcctgggttcctgtgtgtgtggaaagggtagggctgcaccctgtggaagagggttcagggagctctgaggacctggctcgtgctagatgctcagtcagtagtgtgttttagcagcagccggaagtgactgctttcagtgtgtagtggtgagtgctagctggcacccctgcgcctggcttcccagacactgtaacgcagggcaggggaggcagcgagggctgggtccccacggtggccctggcagccccgccatccccatcccctgccacgtgctgctccctccatctggtccctgcccctcagccagcggaggagcccgctgggcccttccctgcccgtccccgctcctccctggcccccgcacaggtaagtgagggtgaggggggcacaggggactggggtcactaaccccccccgngccccccccgagcccctgaggtggggaggctgggaggcgggtggggagccagcaggcactgtgctgaggaaatcctgtgggcacccgaatgggggggcctccccgctcgtggggccctcccctgccctcccgcccgcccgcctcatcaccttctcctcttgtctccatagcttccgccctgcgctgccagtctcctacctgcaggccgagctggccttcgagggcgaggccgcctgccgggccttcctagagcccctgggcctggcctacacgggcccggacaactccagcatcgactgccgcctcagcctggcgcagctgtcagccttctgagcacccagcgaggaggggcgggggcaggggctgcagcccccagcgctgcctttgcggattctgtttttgagccgtggacttgggttgtaaatttatttgtggggagtgcgctccaggaagagccaccatccctgcccccgttttcccaccggggagtctgtacagagatttttctacgtttttattttttgcctcagagggatgggattggggaggaggggatgggcagcggagggttgggggcatggtctgcaggctcatctgtgtccgcctttcactccactaatgctgtctcagtgttttctctctctctctttcgagcttgcactccggtacccgacccggcgccctggcccatcccatgccggggggccagtggaaagaagacaggccgtccagcccgtgcccgcctgcggcgggggcacccagcaagcccgcccaccgcccgctgcctcacctgcttcgccacagactcttgttcccagccccttggggcctccgtgtttggggtgggggagctgcttagagactgtgcccgtcctcggccccccaccctgaagtgccagcaccaccagcaccagatcctccgccgccacaccgcactgaggacacgccggccgggccgcctcgtctcaagttgtataaagttgtctccgtgtcccctcctccctctgcccccagtgtttcttctgatttttttttcccctttccctccctccctctccgcattcttcccttggttcagcacaggtaaaacggttcccctccctccctgccttcatggatcaccagctcacgtcatgttgccttctcttttctttgtgtgtgtgtttatttaagttatttttcttcctcctctcccttttctttttggccctccctccctccctcttctgccatgtaactggaggatgtgctatgagtttgcaaacagctggactgtcaggctgctttttttccagatgttcctcctctgcctccccttcccctcctctcccctccttttccttccttccttcctttccttggagcactgagcaccatttggaagcttgagagaaaccaaaattaaagagagaaagagagagcgtgcacgctcctgctttgtctttcctgtgtgggctgtttgcatccattgtctcctccagaggtctgggggtgtcactccagggggatctcagccaggggctggaaaggcccccctgtcctccctatacggcacagccagagtgtctgcaggggctggcaccccacttcctggctgagggtgaactccagcttggggaggtggacctgggaaccatggggcaccttggccacggtgaggtgggggtgcagctgccctggagactgtagtgtactcagcccctcggcttccagcctctggctcagcacttgtgccatgctttccagtgtgggagagggtggggcacacagcacatgcgggcccaggaggaccagctttctaaagctcagccgagggggtgcatttagccccggggccaagagggcccgtctcagagctccaatggcagcggcctcctccccagcgcctgccagtcgcagcagggccagggtcaggtgtaggttctgagagggcactaggaagttggcgcagtgtggggccacgtggaccaggtattcctgggccttggtcacttctgcttgtagcccaggctcggtcaccatgagggccacaaaatgtgtggggcgcggttggcaaggggctgcaacactaaggcgggcccttttgtcctcgggccaggccgcaggaccccactcggcttctgtcgtctcagcggagccccccgggactcccagggcctgtgcttccttgccccccagcaatgtggtcctggtggctgctgttggcttcagtgcctcctcagtcactccggcgaggcgtcctcttggggccagtgttcccaaatcagcagctgtgcccagcgccctctcctgggccgcctccagctctccgggttcctccacgcctggttcctggtgccctgtgcagagcggccttgtgctccctcgcttgggggcagcctgggcctcctgacctgtccccgccagtgtccactcggcaccctctgccccgtgggcgccctcggtgttcggtgcgtccaggatggtgggcccgcgtcccgccgccgagccagagccaaagacgaggtcggtgcgcgaggcgcggtcccacacaaggcggccacggaagcggaagaagcgcacgcggtgctggggcactgccagcacgcccggcccgagcgccgccagcggctggtcccagcaaaaggcgctgaagggctcctcgcgcacacccagaaagcggtcgacgtagcccaccgagaagtcggcggggtcgaggcgcgggtcccagcggatgcgctggatgacgtccgcggctgtgcgcagcggcggcttcttggccccggcctccggctgcgcctcgcggccaggcggcgccggcgccccagggtggggctggcggcagcgggcgccgaagcggcagcggccttccaggaagaagcggcaggccggcgggggcgcgggttccgtggcgggggcttcctgcggcaactccggctctctggccgctgccatgggtgcggggaactggcacgcccgccgcgcagacgaggtcgccccgcacggagggcggctccccatggatgcaccgagcctcacccgacagtggcgtcagcggcccgcgctccggcctagctctggggaccacgccgcgtgccctcgcgaggactctggcccagtccctccttggtggagagcctgacaccgctgctctgggacttccgccggcgccctcccccagcgccaggaaagcaagctgcgtaaaggc

SEQ ID NO: 327630 - DNA, 6691 bp, Homo sapiens
  misc_feature (3504)..(3504): n is a, c, g, or t
cagaaccacagcgggtcctctgcccgggggaacctgtctgggaagccggatgactggccccaggacatgaaagagtatgtggagcgctgcttcaccgcctgtgagtcggaggaggacaaggaccgcacggaaaagctgctcaaggaggtgctgcaggcgcggctgcaggacggctcggcctataccattgactggagccgggagcccttgccggggctgacccgggagcctgtggctgagagccctaagaagaagcggtgggaggccgctagcagccttcaccctcctagaggggcaggctcggcgacaaggggcgggggtgccccgtcccagcgagggacgcccggggctgggggtgccggtcgagcccggggcaacagcttcaccaagtttggcaaccgcaacgtcttcatgaaggacaacagctcttcttccagcacagactcccgctcccgctcctcctccaggtccccgacgcgccacttccgcagaagtgactcccactcagactccgacagctcctactcagggaatgagtgtcaccctgtgggccgcaggaacccgccccctaagggccggggcggtcgaggggcccatatggatcggggccgaggcagggcgcagcgtgggaagaggcacgatctggcgcccaccaagcgcagtcgaaagaagatggcggcgctggagtgtgaggacccggagcgagagctgaagaagcagaagcgggcagcccgcttccagcacggacactcccgccgcctgcgcctcgagcccctggtgctgcagatgagcagcctggagagcagtggggctgaccctgactggcaggagctgcagatcgtgggcacctgccctgacatcaccaagcactacctgcgcctcacctgtgcccccgacccgtccaccgtgcgccctgtggcagttttgaaaaagtcgctgtgcatggtcaagtgccactggaaagagaagcaggactacgcgtttgcctgcgagcagatgaagtcgatccggcaggatctgacggtgcagggcatccgcaccgagttcacggtggaggtgtacgagacccatgcccggatcgccttggagaagggtgaccatgaagagtttaaccagtgccagacgcagctcaagtcgctgtacgccgagaacttgcctggcaatgtgggcgagtttactgcctaccgaatcctctactacatcttcaccaagaactcgggagacatcaccacggagctggcatacctcacacgagaactgaaggcagatccttgcgtggcccacgccttggcattaaggacagcctgggccctgggcaactaccaccgctttttccggctctactgccatgcaccctgcatgtctggctacctcgtggacaagtttgcagatcgggagcgcaaggtcgccctcaaggccatgatcaaaacgtatgtggtgccaagctcccttctgcctttgctcttcccatccttccgcctcgcaccgcccctcagaccagctcctggccgcaggcctcccccagcccccaacccttgtcctggtccttgcttccccatcatctttctccattcagccctcccctctccagttcctcttgctctccttgttggtcacctctgtgttccgggtcactcctctccctctccccactgttcccagctcactgcctctggggcctcttctccaccccatctgtgtgtctcttcctcctgttctctcctgcctggaccccctagttcactccttgccctgggcttcctcagaaccctgaggtctctgctttctcagcttgtcgctgtgctcccaccatagagaccatctagacagcctctggtctaccaggacaaggcccagtcccactcagctcctttgagagcaccagaaacgcttagggagacacctgtgttgaggccacactgggcgcggtgccagaggcccctggtcaggccatgcccctgcagtgtccttcgttcactagacattgcgcctggcttgctgtgggtggggatgagttgcttgactcatgtttagacgcatggttctgtctggtgattgaggtgcccaggcgacgctgggcaatgtcaagagaggttttcgcttgtcacagcaaggggatgctcttggcatctagtgagtggaggccagggatgctgccctgccactgccattgggcctcagagctcagtcttgccaaggtggagaaattctggtcgaagaggttgaccggtagactgaagaggccttgagagcctggccaggtggctgtccacgtgaggtcatagtcacagcatggaggccttgagagcctggccaggtggccctccacgtgaggtcatggtcacagcatgggggccttgagtgcctggccaggtggccctccacgtgaggtcatggtcacagcatggaggccttgagagcctggccaggtggccctccacgtgaggttgtggtcacagcatgggggccttgagagcctggccaggtggccctccacgtgaggtcatggtcacagcatggaggccttgagagcctggccaggtggccctccgtgtgaggtcatggtcacagcatagtttggagctagggagggactgtcagcctggaggtttggagactcattctggaatctagtgtgggtcaagccaacttcagggagaggctgagccagggtaggagtcacaggagcagacgaggatgtggggtgccgtgcacagagctccatgaccagcttgggaagttagaaggaaggggaggcaggaggctgcttagtctgctgccatgatgggccccatgaatggtggctctcaagcttctgtgctacacaggggtgtgtggttgggcgagtgtccttgttaattgatacctaattggccttggttgggaacatagccatgagtgcccctcgtgggtggggcgccagtctgtcattgacctcattgtgtcagcaccttccccccaaggaggctgaccctgccctgccagctgagactgggagacggagtgggctctgatcccagggcttccaggaaagctctggctttggagcagaagcgggttctaggacttagtgcccctcactcggtgcctgggttcctgtgtgtgtggaaagggtagggctgcaccctgtggaagagggttcagggagctctgaggacctggctcgtgctagatgctcagtcagtagtgtgttttagcagcagccggaagtgactgctttcagtgtgtagtggtgagtgctagctggcacccctgcgcctggcttcccagacactgtaacgcagggcaggggaggcagcgagggctgggtccccacggtggccctggcagccccgccatccccatcccctgccacgtgctgctccctccatctggtccctgcccctcagccagcggaggagcccgctgggcccttccctgcccgtccccgctcctccctggcccccgcacaggtaagtgagggtgaggggggcacaggggactggggtcactaaccccccccgngccccccccgagcccctgaggtggggaggctgggaggcgggtggggagccagcaggcactgtgctgaggaaatcctgtgggcacccgaatgggggggcctccccgctcgtggggccctcccctgccctcccgcccgcccgcctcatcaccttctcctcttgtctccatagcttccgccctgcgctgccagtctcctacctgcaggccgagctggccttcgagggcgaggccgcctgccgggccttcctagagcccctgggcctggcctacacgggcccggacaactccagcatcgactgccgcctcagcctggcgcagctgtcagccttctgagcacccagcgaggaggggcgggggcaggggctgcagcccccagcgctgcctttgcggattctgtttttgagccgtggacttgggttgtaaatttatttgtggggagtgcgctccaggaagagccaccatccctgcccccgttttcccaccggggagtctgtacagagatttttctacgtttttattttttgcctcagagggatgggattggggaggaggggatgggcagcggagggttgggggcatggtctgcaggctcatctgtgtccgcctttcactccactaatgctgtctcagtgttttctctctctctctttcgagcttgcactccggtacccgacccggcgccctggcccatcccatgccggggggccagtggaaagaagacaggccgtccagcccgtgcccgcctgcggcgggggcacccagcaagcccgcccaccgcccgctgcctcacctgcttcgccacagactcttgttcccagccccttggggcctccgtgtttggggtgggggagctgcttagagactgtgcccgtcctcggccccccaccctgaagtgccagcaccaccagcaccagatcctccgccgccacaccgcactgaggacacgccggccgggccgcctcgtctcaagttgtataaagttgtctccgtgtcccctcctccctctgcccccagtgtttcttctgatttttttttcccctttccctccctccctctccgcattcttcccttggttcagcacaggtaaaacggttcccctccctccctgccttcatggatcaccagctcacgtcatgttgccttctcttttctttgtgtgtgtgtttatttaagttatttttcttcctcctctcccttttctttttggccctccctccctccctcttctgccatgtaactggaggatgtgctatgagtttgcaaacagctggactgtcaggctgctttttttccagatgttcctcctctgcctccccttcccctcctctcccctccttttccttccttccttcctttccttggagcactgagcaccatttggaagcttgagagaaaccaaaattaaagagagaaagagagagcgtgcacgctcctgctttgtctttcctgtgtgggctgtttgcatccattgtctcctccagaggtctgggggtgtcactccagggggatctcagccaggggctggaaaggcccccctgtcctccctatacggcacagccagagtgtctgcaggggctggcaccccacttcctggctgagggtgaactccagcttggggaggtggacctgggaaccatggggcaccttggccacggtgaggtgggggtgcagctgccctggagactgtagtgtactcagcccctcggcttccagcctctggctcagcacttgtgccatgctttccagtgtgggagagggtggggcacacagcacatgcgggcccaggaggaccagctttctaaagctcagccgagggggtgcatttagccccggggccaagagggcccgtctcagagctccaatggcagcggcctcctccccagcgcctgccagtcgcagcagggccagggtcaggtgtaggttctgagagggcactaggaagttggcgcagtgtggggccacgtggaccaggtattcctgggccttggtcacttctgcttgtagcccaggctcggtcaccatgagggccacaaaatgtgtggggcgcggttggcaaggggctgcaacactaaggcgggcccttttgtcctcgggccaggccgcaggaccccactcggcttctgtcgtctcagcggagccccccgggactcccagggcctgtgcttccttgccccccagcaatgtggtcctggtggctgctgttggcttcagtgcctcctcagtcactccggcgaggcgtcctcttggggccagtgttcccaaatcagcagctgtgcccagcgccctctcctgggccgcctccagctctccgggttcctccacgcctggttcctggtgccctgtgcagagcggccttgtgctccctcgcttgggggcagcctgggcctcctgacctgtccccgccagtgtccactcggcaccctctgccccgtgggcgccctcggtgttcggtgcgtccaggatggtgggcccgcgtcccgccgccgagccagagccaaagacgaggtcggtgcgcgaggcgcggtcccacacaaggcggccacggaagcggaagaagcgcacgcggtgctggggcactgccagcacgcccggcccgagcgccgccagcggctggtcccagcaaaaggcgctgaagggctcctcgcgcacacccagaaagcggtcgacgtagcccaccgagaagtcggcggggtcgaggcgcgggtcccagcggatgcgctggatgacgtccgcggctgtgcgcagcggcggcttcttggccccggcctccggctgcgcctcgcggccaggcggcgccggcgccccagggtggggctggcggcagcgggcgccgaagcggcagcggccttccaggaagaagcggcaggccggcgggggcgcgggttccgtggcgggggcttcctgcggcaactccggctctctggccgctgccatgggtgcggggaactggcacgcccgccgcgcagacgaggtcgccccgcacggagggcggctccccatggatgcaccgagcctcacccgacagtggcgtcagcggcccgcgctccggcctagctctggggaccacgccgcgtgccctcgcgaggactctggcccagtccctccttggtggagagcctgacaccgctgctctgggacttccgccggcgccctcccccagcgccaggaaagcaagctgcgtaaaggc

SEQ ID NO: 327631 - DNA, 5856 bp, Homo sapiens
  misc_feature (4820)..(4820): n is a, c, g, or t
ttttttgagatggagtctttctctgttgcccactgtactctatcgtgggcgacgacagagcaagagcaagactccgtctccgagaacaacaacaacagcaacaagaaaacaacaataaaaaaaataaggctgcgtgggaggcagaaagagctaatgcggccacgcttgtcccctcggggccaccgtccccacccagacttccggtctgccttaaaatgttcatgcgtaagtgcgtgggcaggaaggcgggctcaagcgcagctcgtggcgttcattggctgtgcagggccgagggaggcggtgcaaggccgccgcgtgacgtcaggacgccgcggtcaggacgtcgaagccaaagaagaccagagccagccgggtggcacagcggtgtcgtggccgtgttgctgatcgcctgggtggttgttggcgtgtccctgcagcgaaggatcctgtgacagtgaaaaagcagtctggctcccgaggtccaccccttataccccaaggtccagatggcggccaacgtgggtgatcaacgtagcacagattggtcttctcagtacagcatggtggctggggcaggccgagagaatggcatggagacgccgatgcacgagaacccggagtgggagaaggcccgtcaggccctggccagcatcagcaagtcaggagctgccggcggctctgccaagtccagcagcaatgggcctgtggccagtgcacagtacgtgtcccaggcagaagcctcagctttgcagcagcagcagtactaccagtggtaccagcagtacaactatgcctacccctacagctactactatcccatgagcatgtaccagagctatggctccccttcccagtatgggatggccggctcctatggctcagccacaccccagcagccatccgcaccccaacaccaagggactctgaaccagcccccagtccccggcatggatgagagcatgtcctaccaggctccccctcagcagctgccgtcggctcagccccctcagccctcaaatcccccacatggggctcacacgctgaacagtggccctcagcctgggacagctccagccacacagcacagccaggcggggcccgccacgggccaggcctatgggccacacacctacaccgaacctgccaagcccaagaagggccaacagctgtggaaccgcatgaaacccgcccctgggactggaggtctcaagttcaacatccagaagcgaccctttgctgttaccacccagagctttggctccaacgcagagggccagcacagtggttttggcccccagcccaaccctgagaaagttcagaaccacagcgggtcctctgcccgggggaacctgtctgggaagccggatgactggccccaggacatgaaagagtatgtggagcgctgcttcaccgcctgtgagtcggaggaggacaaggaccgcacggaaaagctgctcaaggaggtgctgcaggcgcggctgcaggacggctcggcctataccattgactggagccgggagcccttgccggggctgacccgggagcctgtggctgagagccctaagaagaagcggtgggaggccgctagcagccttcaccctcctagaggggcaggctcggcgacaaggggcgggggtgccccgtcccagcgagggacgcccggggctgggggtgccggtcgagcccggggcaacagcttcaccaagtttggcaaccgcaacgtcttcatgaaggacaacagctcttcttccagcacagactcccgctcccgctcctcctccaggtccccgacgcgccacttccgcagaagtgactcccactcagactccgacagctcctactcagggaatgagtgtcaccctgtgggccgcaggaacccgccccctaagggccggggcggtcgaggggcccatatggatcggggccgaggcagggcgcagcgtgggaagaggcacgatctggcgcccaccaagcgcagtcgaaagaagatggcggcgctggagtgtgaggacccggagcgagagctgaagaagcagaagcgggcagcccgcttccagcacggacactcccgccgcctgcgcctcgagcccctggtgctgcagatgagcagcctggagagcagtggggctgaccctgactggcaggagctgcagatcgtgggcacctgccctgacatcaccaagcactacctgcgcctcacctgtgcccccgacccgtccaccgtgcgccctgtggcagttttgaaaaagtcgctgtgcatggtcaagtgccactggaaagagaagcaggactacgcgtttgcctgcgagcagatgaagtcgatccggcaggatctgacggtgcagggcatccgcaccgagttcacggtggaggtgtacgagacccatgcccggatcgccttggagaagggtgaccatgaagagtttaaccagtgccagacgcagctcaagtcgctgtacgccgagaacttgcctggcaatgtgggcgagtttactgcctaccgaatcctctactacatcttcaccaagaactcgggagacatcaccacggagctggcatacctcacacgagaactgaaggcagatccttgcgtggcccacgccttggcattaaggacagcctgggccctgggcaactaccaccgctttttccggctctactgccatgcaccctgcatgtctggctacctcgtggacaagtttgcagatcgggagcgcaaggtcgccctcaaggccatgatcaaaacgtatgtggtgccaagctcccttctgcctttgctcttcccatccttccgcctcgcaccgcccctcagaccagctcctggccgcaggcctcccccagcccccaacccttgtcctggtccttgcttccccatcatctttctccattcagccctcccctctccagttcctcttgctctccttgttggtcacctctgtgttccgggtcactcctctccctctccccactgttcccagctcactgcctctggggcctcttctccaccccatctgtgtgtctcttcctcctgttctctcctgcctggaccccctagttcactccttgccctgggcttcctcagaaccctgaggtctctgctttctcagcttgtcgctgtgctcccaccatagagaccatctagacagcctctggtctaccaggacaaggcccagtcccactcagctcctttgagagcaccagaaacgcttagggagacacctgtgttgaggccacactgggcgcggtgccagaggcccctggtcaggccatgcccctgcagtgtccttcgttcactagacattgcgcctggcttgctgtgggtggggatgagttgcttgactcatgtttagacgcatggttctgtctggtgattgaggtgcccaggcgacgctgggcaatgtcaagagaggttttcgcttgtcacagcaaggggatgctcttggcatctagtgagtggaggccagggatgctgccctgccactgccattgggcctcagagctcagtcttgccaaggtggagaaattctggtcgaagaggttgaccggtagactgaagaggccttgagagcctggccaggtggctgtccacgtgaggtcatagtcacagcatggaggccttgagagcctggccaggtggccctccacgtgaggtcatggtcacagcatgggggccttgagtgcctggccaggtggccctccacgtgaggtcatggtcacagcatggaggccttgagagcctggccaggtggccctccacgtgaggttgtggtcacagcatgggggccttgagagcctggccaggtggccctccacgtgaggtcatggtcacagcatggaggccttgagagcctggccaggtggccctccgtgtgaggtcatggtcacagcatagtttggagctagggagggactgtcagcctggaggtttggagactcattctggaatctagtgtgggtcaagccaacttcagggagaggctgagccagggtaggagtcacaggagcagacgaggatgtggggtgccgtgcacagagctccatgaccagcttgggaagttagaaggaaggggaggcaggaggctgcttagtctgctgccatgatgggccccatgaatggtggctctcaagcttctgtgctacacaggggtgtgtggttgggcgagtgtccttgttaattgatacctaattggccttggttgggaacatagccatgagtgcccctcgtgggtggggcgccagtctgtcattgacctcattgtgtcagcaccttccccccaaggaggctgaccctgccctgccagctgagactgggagacggagtgggctctgatcccagggcttccaggaaagctctggctttggagcagaagcgggttctaggacttagtgcccctcactcggtgcctgggttcctgtgtgtgtggaaagggtagggctgcaccctgtggaagagggttcagggagctctgaggacctggctcgtgctagatgctcagtcagtagtgtgttttagcagcagccggaagtgactgctttcagtgtgtagtggtgagtgctagctggcacccctgcgcctggcttcccagacactgtaacgcagggcaggggaggcagcgagggctgggtccccacggtggccctggcagccccgccatccccatcccctgccacgtgctgctccctccatctggtccctgcccctcagccagcggaggagcccgctgggcccttccctgcccgtccccgctcctccctggcccccgcacaggtaagtgagggtgaggggggcacaggggactggggtcactaaccccccccgngccccccccgagcccctgaggtggggaggctgggaggcgggtggggagccagcaggcactgtgctgaggaaatcctgtgggcacccgaatgggggggcctccccgctcgtggggccctcccctgccctcccgcccgcccgcctcatcaccttctcctcttgtctccatagcttccgccctgcgctgccagtctcctacctgcaggccgagctggccttcgagggcgaggccgcctgccgggccttcctagagcccctgggcctggcctacacgggcccggacaactccagcatcgactgccgcctcagcctggcgcagctgtcagccttctgagcacccagcgaggaggggcgggggcaggggctgcagcccccagcgctgcctttgcggattctgtttttgagccgtggacttgggttgtaaatttatttgtggggagtgcgctccaggaagagccaccatccctgcccccgttttcccaccggggagtctgtacagagatttttctacgtttttattttttgcctcagagggatgggattggggaggaggggatgggcagcggagggttgggggcatggtctgcaggctcatctgtgtccgcctttcactccactaatgctgtctcagtgttttctctctctctctttcgagcttgcactccggtacccgacccggcgccctggcccatcccatgccggggggccagtggaaagaagacaggccgtccagcccgtgcccgcctgcggcgggggcacccagcaagcccgcccaccgcccgctgcctcacctgcttcgccacagactcttgttcccagccccttggggcctccgtgtttggggtgggggagctgcttagagactgtgcccgtcctcggccccccaccctgaagtgccagcaccaccagcaccagatcctccgccgccacaccgcactgaggacacgccggccgggccgcctcgtctcaagttgtataaagttgtctccgtgtccggtatttaccctatagccccccctctaccccctttagagcca

SEQ ID NO: 327632 - DNA, 5411 bp, Homo sapiens
  misc_feature (4820)..(4820): n is a, c, g, or t
ttttttgagatggagtctttctctgttgcccactgtactctatcgtgggcgacgacagagcaagagcaagactccgtctccgagaacaacaacaacagcaacaagaaaacaacaataaaaaaaataaggctgcgtgggaggcagaaagagctaatgcggccacgcttgtcccctcggggccaccgtccccacccagacttccggtctgccttaaaatgttcatgcgtaagtgcgtgggcaggaaggcgggctcaagcgcagctcgtggcgttcattggctgtgcagggccgagggaggcggtgcaaggccgccgcgtgacgtcaggacgccgcggtcaggacgtcgaagccaaagaagaccagagccagccgggtggcacagcggtgtcgtggccgtgttgctgatcgcctgggtggttgttggcgtgtccctgcagcgaaggatcctgtgacagtgaaaaagcagtctggctcccgaggtccaccccttataccccaaggtccagatggcggccaacgtgggtgatcaacgtagcacagattggtcttctcagtacagcatggtggctggggcaggccgagagaatggcatggagacgccgatgcacgagaacccggagtgggagaaggcccgtcaggccctggccagcatcagcaagtcaggagctgccggcggctctgccaagtccagcagcaatgggcctgtggccagtgcacagtacgtgtcccaggcagaagcctcagctttgcagcagcagcagtactaccagtggtaccagcagtacaactatgcctacccctacagctactactatcccatgagcatgtaccagagctatggctccccttcccagtatgggatggccggctcctatggctcagccacaccccagcagccatccgcaccccaacaccaagggactctgaaccagcccccagtccccggcatggatgagagcatgtcctaccaggctccccctcagcagctgccgtcggctcagccccctcagccctcaaatcccccacatggggctcacacgctgaacagtggccctcagcctgggacagctccagccacacagcacagccaggcggggcccgccacgggccaggcctatgggccacacacctacaccgaacctgccaagcccaagaagggccaacagctgtggaaccgcatgaaacccgcccctgggactggaggtctcaagttcaacatccagaagcgaccctttgctgttaccacccagagctttggctccaacgcagagggccagcacagtggttttggcccccagcccaaccctgagaaagttcagaaccacagcgggtcctctgcccgggggaacctgtctgggaagccggatgactggccccaggacatgaaagagtatgtggagcgctgcttcaccgcctgtgagtcggaggaggacaaggaccgcacggaaaagctgctcaaggaggtgctgcaggcgcggctgcaggacggctcggcctataccattgactggagccgggagcccttgccggggctgacccgggagcctgtggctgagagccctaagaagaagcggtgggaggccgctagcagccttcaccctcctagaggggcaggctcggcgacaaggggcgggggtgccccgtcccagcgagggacgcccggggctgggggtgccggtcgagcccggggcaacagcttcaccaagtttggcaaccgcaacgtcttcatgaaggacaacagctcttcttccagcacagactcccgctcccgctcctcctccaggtccccgacgcgccacttccgcagaagtgactcccactcagactccgacagctcctactcagggaatgagtgtcaccctgtgggccgcaggaacccgccccctaagggccggggcggtcgaggggcccatatggatcggggccgaggcagggcgcagcgtgggaagaggcacgatctggcgcccaccaagcgcagtcgaaagaagatggcggcgctggagtgtgaggacccggagcgagagctgaagaagcagaagcgggcagcccgcttccagcacggacactcccgccgcctgcgcctcgagcccctggtgctgcagatgagcagcctggagagcagtggggctgaccctgactggcaggagctgcagatcgtgggcacctgccctgacatcaccaagcactacctgcgcctcacctgtgcccccgacccgtccaccgtgcgccctgtggcagttttgaaaaagtcgctgtgcatggtcaagtgccactggaaagagaagcaggactacgcgtttgcctgcgagcagatgaagtcgatccggcaggatctgacggtgcagggcatccgcaccgagttcacggtggaggtgtacgagacccatgcccggatcgccttggagaagggtgaccatgaagagtttaaccagtgccagacgcagctcaagtcgctgtacgccgagaacttgcctggcaatgtgggcgagtttactgcctaccgaatcctctactacatcttcaccaagaactcgggagacatcaccacggagctggcatacctcacacgagaactgaaggcagatccttgcgtggcccacgccttggcattaaggacagcctgggccctgggcaactaccaccgctttttccggctctactgccatgcaccctgcatgtctggctacctcgtggacaagtttgcagatcgggagcgcaaggtcgccctcaaggccatgatcaaaacgtatgtggtgccaagctcccttctgcctttgctcttcccatccttccgcctcgcaccgcccctcagaccagctcctggccgcaggcctcccccagcccccaacccttgtcctggtccttgcttccccatcatctttctccattcagccctcccctctccagttcctcttgctctccttgttggtcacctctgtgttccgggtcactcctctccctctccccactgttcccagctcactgcctctggggcctcttctccaccccatctgtgtgtctcttcctcctgttctctcctgcctggaccccctagttcactccttgccctgggcttcctcagaaccctgaggtctctgctttctcagcttgtcgctgtgctcccaccatagagaccatctagacagcctctggtctaccaggacaaggcccagtcccactcagctcctttgagagcaccagaaacgcttagggagacacctgtgttgaggccacactgggcgcggtgccagaggcccctggtcaggccatgcccctgcagtgtccttcgttcactagacattgcgcctggcttgctgtgggtggggatgagttgcttgactcatgtttagacgcatggttctgtctggtgattgaggtgcccaggcgacgctgggcaatgtcaagagaggttttcgcttgtcacagcaaggggatgctcttggcatctagtgagtggaggccagggatgctgccctgccactgccattgggcctcagagctcagtcttgccaaggtggagaaattctggtcgaagaggttgaccggtagactgaagaggccttgagagcctggccaggtggctgtccacgtgaggtcatagtcacagcatggaggccttgagagcctggccaggtggccctccacgtgaggtcatggtcacagcatgggggccttgagtgcctggccaggtggccctccacgtgaggtcatggtcacagcatggaggccttgagagcctggccaggtggccctccacgtgaggttgtggtcacagcatgggggccttgagagcctggccaggtggccctccacgtgaggtcatggtcacagcatggaggccttgagagcctggccaggtggccctccgtgtgaggtcatggtcacagcatagtttggagctagggagggactgtcagcctggaggtttggagactcattctggaatctagtgtgggtcaagccaacttcagggagaggctgagccagggtaggagtcacaggagcagacgaggatgtggggtgccgtgcacagagctccatgaccagcttgggaagttagaaggaaggggaggcaggaggctgcttagtctgctgccatgatgggccccatgaatggtggctctcaagcttctgtgctacacaggggtgtgtggttgggcgagtgtccttgttaattgatacctaattggccttggttgggaacatagccatgagtgcccctcgtgggtggggcgccagtctgtcattgacctcattgtgtcagcaccttccccccaaggaggctgaccctgccctgccagctgagactgggagacggagtgggctctgatcccagggcttccaggaaagctctggctttggagcagaagcgggttctaggacttagtgcccctcactcggtgcctgggttcctgtgtgtgtggaaagggtagggctgcaccctgtggaagagggttcagggagctctgaggacctggctcgtgctagatgctcagtcagtagtgtgttttagcagcagccggaagtgactgctttcagtgtgtagtggtgagtgctagctggcacccctgcgcctggcttcccagacactgtaacgcagggcaggggaggcagcgagggctgggtccccacggtggccctggcagccccgccatccccatcccctgccacgtgctgctccctccatctggtccctgcccctcagccagcggaggagcccgctgggcccttccctgcccgtccccgctcctccctggcccccgcacaggtaagtgagggtgaggggggcacaggggactggggtcactaaccccccccgngccccccccgagcccctgaggtggggaggctgggaggcgggtggggagccagcaggcactgtgctgaggaaatcctgtgggcacccgaatgggggggcctccccgctcgtggggccctcccctgccctcccgcccgcccgcctcatcaccttctcctcttgtctccatagcttccgccctgcgctgccagtctcctacctgcaggccgagctggccttcgagggcgaggccgcctgccgggccttcctagagcccctgggcctggcctacacgggcccggacaactccagcatcgactgccgcctcagcctggcgcagctgtcagccttctgagcacccagcgaggaggggcgggggcaggggctgcagcccccagcgctgcctttgcggattctgtttttgagccgtggacttgggttgtaaatttatttgtggggagtgcgctccaggaagagccaccatccctgcccccgttttcccaccggggagtctgtacagagatttttctacgtttttattttttgcctcagagggatgggattggggaggaggggatgggcagcgaaaaataaaaacgtagaaaaatctctg

SEQ ID NO: 327633 - DNA, 5763 bp, Homo sapiens
ttttttgagatggagtctttctctgttgcccactgtactctatcgtgggcgacgacagagcaagagcaagactccgtctccgagaacaacaacaacagcaacaagaaaacaacaataaaaaaaataaggctgcgtgggaggcagaaagagctaatgcggccacgcttgtcccctcggggccaccgtccccacccagacttccggtctgccttaaaatgttcatgcgtaagtgcgtgggcaggaaggcgggctcaagcgcagctcgtggcgttcattggctgtgcagggccgagggaggcggtgcaaggccgccgcgtgacgtcaggacgccgcggtcaggacgtcgaagccaaagaagaccagagccagccgggtggcacagcggtgtcgtggccgtgttgctgatcgcctgggtggttgttggcgtgtccctgcagcgaaggatcctgtgacagtgaaaaagcagtctggctcccgaggtccaccccttataccccaaggtccagatggcggccaacgtgggtgatcaacgtagcacagattggtcttctcagtacagcatggtggctggggcaggccgagagaatggcatggagacgccgatgcacgagaacccggagtgggagaaggcccgtcaggccctggccagcatcagcaagtcaggagctgccggcggctctgccaagtccagcagcaatgggcctgtggccagtgcacagtacgtgtcccaggcagaagcctcagctttgcagcagcagcagtactaccagtggtaccagcagtacaactatgcctacccctacagctactactatcccatgagcatgtaccagagctatggctccccttcccagtatgggatggccggctcctatggctcagccacaccccagcagccatccgcaccccaacaccaagggactctgaaccagcccccagtccccggcatggatgagagcatgtcctaccaggctccccctcagcagctgccgtcggctcagccccctcagccctcaaatcccccacatggggctcacacgctgaacagtggccctcagcctgggacagctccagccacacagcacagccaggcggggcccgccacgggccaggcctatgggccacacacctacaccgaacctgccaagcccaagaagggccaacagctgtggaaccgcatgaaacccgcccctgggactggaggtctcaagttcaacatccagaagcgaccctttgctgttaccacccagagctttggctccaacgcagagggccagcacagtggttttggcccccagcccaaccctgagaaagttcagaaccacagcgggtcctctgcccgggggaacctgtctgggaagccggatgactggccccaggacatgaaagagtatgtggagcgctgcttcaccgcctgtgagtcggaggaggacaaggaccgcacggaaaagctgctcaaggaggtgctgcaggcgcggctgcaggacggctcggcctataccattgactggagccgggagcccttgccggggctgacccgggagcctgtggctgagagccctaagaagaagcggtgggaggccgctagcagccttcaccctcctagaggggcaggctcggcgacaaggggcgggggtgccccgtcccagcgagggacgcccggggctgggggtgccggtcgagcccggggcaacagcttcaccaagtttggcaaccgcaacgtcttcatgaaggacaacagctcttcttccagcacagactcccgctcccgctcctcctccaggtccccgacgcgccacttccgcagaagtgactcccactcagactccgacagctcctactcagggaatgagtgtcaccctgtgggccgcaggaacccgccccctaagggccggggcggtcgaggggcccatatggatcggggccgaggcagggcgcagcgtgggaagaggcacgatctggcgcccaccaagcgcagtcgaaagaagatggcggcgctggagtgtgaggacccggagcgagagctgaagaagcagaagcgggcagcccgcttccagcacggacactcccgccgcctgcgcctcgagcccctggtgctgcagatgagcagcctggagagcagtggggctgaccctgactggcaggagctgcagatcgtgggcacctgccctgacatcaccaagcactacctgcgcctcacctgtgcccccgacccgtccaccgtgcgccctgtggcagttttgaaaaagtcgctgtgcatggtcaagtgccactggaaagagaagcaggactacgcgtttgcctgcgagcagatgaagtcgatccggcaggatctgacggtgcagggcatccgcaccgagttcacggtggaggtgtacgagacccatgcccggatcgccttggagaagggtgaccatgaagagtttaaccagtgccagacgcagctcaagtcgctgtacgccgagaacttgcctggcaatgtgggcgagtttactgcctaccgaatcctctactacatcttcaccaagaactcgggagacatcaccacggagctggcatacctcacacgagaactgaaggcagatccttgcgtggcccacgccttggcattaaggacagcctgggccctgggcaactaccaccgctttttccggctctactgccatgcaccctgcatgtctggctacctcgtggacaagtttgcagatcgggagcgcaaggtcgccctcaaggccatgatcaaaaccttccgccctgcgctgccagtctcctacctgcaggccgagctggccttcgagggcgaggccgcctgccgggccttcctagagcccctgggcctggcctacacgggcccggacaactccagcatcgactgccgcctcagcctggcgcagctgtcagccttctgagcacccagcgaggaggggcgggggcaggggctgcagcccccagcgctgcctttgcggattctgtttttgagccgtggacttgggttgtaaatttatttgtggggagtgcgctccaggaagagccaccatccctgcccccgttttcccaccggggagtctgtacagagatttttctacgtttttattttttgcctcagagggatgggattggggaggaggggatgggcagcggagggttgggggcatggtctgcaggctcatctgtgtccgcctttcactccactaatgctgtctcagtgttttctctctctctctttcgagcttgcactccggtacccgacccggcgccctggcccatcccatgccggggggccagtggaaagaagacaggccgtccagcccgtgcccgcctgcggcgggggcacccagcaagcccgcccaccgcccgctgcctcacctgcttcgccacagactcttgttcccagccccttggggcctccgtgtttggggtgggggagctgcttagagactgtgcccgtcctcggccccccaccctgaagtgccagcaccaccagcaccagatcctccgccgccacaccgcactgaggacacgccggccgggccgcctcgtctcaagttgtataaagttgtctccgtgtcccctcctccctctgcccccagtgtttcttctgatttttttttcccctttccctccctccctctccgcattcttcccttggttcagcacaggtaaaacggttcccctccctccctgccttcatggatcaccagctcacgtcatgttgccttctcttttctttgtgtgtgtgtttatttaagttatttttcttcctcctctcccttttctttttggccctccctccctccctcttctgccatgtaactggaggatgtgctatgagtttgcaaacagctggactgtcaggctgctttttttccagatgttcctcctctgcctccccttcccctcctctcccctccttttccttccttccttcctttccttggagcactgagcaccatttggaagcttgagagaaaccaaaattaaagagagaaagagagagcgtgcacgctcctgctttgtctttcctgtgtgggctgtttgcatccattgtctcctccagaggtctgggggtgtcactccagggggatctcagccaggggctggaaaggcccccctgtcctccctatacggcacagccagagtgtctgcaggggctggcaccccacttcctggctgagggtgaactccagcttggggaggtggacctgggaaccatggggcaccttggccacggtgaggtgggggtgcagctgccctggagactgtagtgtactcagcccctcggcttccagcctctggctcagcacttgtgccatgctttccagtgtgggagagggtggggcacacagcacatgcgggcccaggaggaccagctttctaaagctcagccgagggggtgcatttagccccggggccaagagggcccgtctcagagctccaatggcagcggcctcctccccagcgcctgccagtcgcagcagggccagggtcaggtgtaggttctgagagggcactaggaagttggcgcagtgtggggccacgtggaccaggtattcctgggccttggtcacttctgcttgtagcccaggctcggtcaccatgagggccacaaaatgtgtggggcgcggttggcaaggggctgcaacactaaggcgggcccttttgtcctcgggccaggccgcaggaccccactcggcttctgtcgtctcagcggagccccccgggactcccagggcctgtgcttccttgccccccagcaatgtggtcctggtggctgctgttggcttcagtgcctcctcagtcactccggcgaggcgtcctcttggggccagtgttcccaaatcagcagctgtgcccagcgccctctcctgggccgcctccagctctccgggttcctccacgcctggttcctggtgccctgtgcagagcggccttgtgctccctcgcttgggggcagcctgggcctcctgacctgtccccgccagtgtccactcggcaccctctgccccgtgggcgccctcggtgttcggtgcgtccaggatggtgggcccgcgtcccgccgccgagccagagccaaagacgaggtcggtgcgcgaggcgcggtcccacacaaggcggccacggaagcggaagaagcgcacgcggtgctggggcactgccagcacgcccggcccgagcgccgccagcggctggtcccagcaaaaggcgctgaagggctcctcgcgcacacccagaaagcggtcgacgtagcccaccgagaagtcggcggggtcgaggcgcgggtcccagcggatgcgctggatgacgtccgcggctgtgcgcagcggcggcttcttggccccggcctccggctgcgcctcgcggccaggcggcgccggcgccccagggtggggctggcggcagcgggcgccgaagcggcagcggccttccaggaagaagcggcaggccggcgggggcgcgggttccgtggcgggggcttcctgcggcaactccggctctctggccgctgccatgggtgcggggaactggcacgcccgccgcgcagacgaggtcgccccgcacggagggcggctccccatggatgcaccgagcctcacccgacagtggcgtcagcggcccgcgctccggcctagctctggggaccacgccgcgtgccctcgcgaggactctggcccagtccctccttggtggagagcctgacaccgctgctctgggacttccgccggcgccctcccccagcgccaggaaagcaagctgcgtaaaggc

SEQ ID NO: 327634 - DNA, 5023 bp, Homo sapiens
ttttttgagatggagtctttctctgttgcccactgtactctatcgtgggcgacgacagagcaagagcaagactccgtctccgagaacaacaacaacagcaacaagaaaacaacaataaaaaaaataaggctgcgtgggaggcagaaagagctaatgcggccacgcttgtcccctcggggccaccgtccccacccagacttccggtctgccttaaaatgttcatgcgtaagtgcgtgggcaggaaggcgggctcaagcgcagctcgtggcgttcattggctgtgcagggccgagggaggcggtgcaaggccgccgcgtgacgtcaggacgccgcggtcaggacgtcgaagccaaagaagaccagagccagccgggtggcacagcggtgtcgtggccgtgttgctgatcgcctgggtggttgttggcgtgtccctgcagcgaaggatcctgtgacagtgaaaaagcagtctggctcccgaggtccaccccttataccccaaggtccagatggcggccaacgtgggtgatcaacgtagcacagattggtcttctcagtacagcatggtggctggggcaggccgagagaatggcatggagacgccgatgcacgagaacccggagtgggagaaggcccgtcaggccctggccagcatcagcaagtcaggagctgccggcggctctgccaagtccagcagcaatgggcctgtggccagtgcacagtacgtgtcccaggcagaagcctcagctttgcagcagcagcagtactaccagtggtaccagcagtacaactatgcctacccctacagctactactatcccatgagcatgtaccagagctatggctccccttcccagtatgggatggccggctcctatggctcagccacaccccagcagccatccgcaccccaacaccaagggactctgaaccagcccccagtccccggcatggatgagagcatgtcctaccaggctccccctcagcagctgccgtcggctcagccccctcagccctcaaatcccccacatggggctcacacgctgaacagtggccctcagcctgggacagctccagccacacagcacagccaggcggggcccgccacgggccaggcctatgggccacacacctacaccgaacctgccaagcccaagaagggccaacagctgtggaaccgcatgaaacccgcccctgggactggaggtctcaagttcaacatccagaagcgaccctttgctgttaccacccagagctttggctccaacgcagagggccagcacagtggttttggcccccagcccaaccctgagaaagttcagaaccacagcgggtcctctgcccgggggaacctgtctgggaagccggatgactggccccaggacatgaaagagtatgtggagcgctgcttcaccgcctgtgagtcggaggaggacaaggaccgcacggaaaagctgctcaaggaggtgctgcaggcgcggctgcaggacggctcggcctataccattgactggagccgggagcccttgccggggctgacccgggagcctgtggctgagagccctaagaagaagcggtgggaggccgctagcagccttcaccctcctagaggggcaggctcggcgacaaggggcgggggtgccccgtcccagcgagggacgcccggggctgggggtgccggtcgagcccggggcaacagcttcaccaagtttggcaaccgcaacgtcttcatgaaggacaacagctcttcttccagcacagactcccgctcccgctcctcctccaggtccccgacgcgccacttccgcagaagtgactcccactcagactccgacagctcctactcagggaatgagtgtcaccctgtgggccgcaggaacccgccccctaagggccggggcggtcgaggggcccatatggatcggggccgaggcagggcgcagcgtgggaagaggcacgatctggcgcccaccaagcgcagtcgaaagaagatggcggcgctggagtgtgaggacccggagcgagagctgaagaagcagaagcgggcagcccgcttccagcacggacactcccgccgcctgcgcctcgagcccctggtgctgcagatgagcagcctggagagcagtggggctgaccctgactggcaggagctgcagatcgtgggcacctgccctgacatcaccaagcactacctgcgcctcacctgtgcccccgacccgtccaccgtgcgccctgtggcagttttgaaaaagtcgctgtgcatggtcaagtgccactggaaagagaagcaggactacgcgtttgcctgcgagcagatgaagtcgatccggcaggatctgacggtgcagggcatccgcaccgagttcacggtggaggtgtacgagacccatgcccggatcgccttggagaagggtgaccatgaagagtttaaccagtgccagacgcagctcaagtcgctgtacgccgagaacttgcctggcaatgtgggcgagtttactgcctaccgaatcctctactacatcttcaccaagaactcgggagacatcaccacggagctggcatacctcacacgagaactgaaggcagatccttgcgtggcccacgccttggcattaaggacagcctgggccctgggcaactaccaccgctttttccggctctactgccatgcaccctgcatgtctggctacctcgtggacaagtttgcagatcgggagcgcaaggtcgccctcaaggccatgatcaaaacgtatgtggtgccaagctcccttctgcctttgctcttcccatccttccgcctcgtctcaagttgtataaagttgtctccgtgtcccctcctccctctgcccccagtgtttcttctgatttttttttcccctttccctccctccctctccgcattcttcccttggttcagcacaggtaaaacggttcccctccctccctgccttcatggatcaccagctcacgtcatgttgccttctcttttctttgtgtgtgtgtttatttaagttatttttcttcctcctctcccttttctttttggccctccctccctccctcttctgccatgtaactggaggatgtgctatgagtttgcaaacagctggactgtcaggctgctttttttccagatgttcctcctctgcctccccttcccctcctctcccctccttttccttccttccttcctttccttggagcactgagcaccatttggaagcttgagagaaaccaaaattaaagagagaaagagagagcgtgcacgctcctgctttgtctttcctgtgtgggctgtttgcatccattgtctcctccagaggtctgggggtgtcactccagggggatctcagccaggggctggaaaggcccccctgtcctccctatacggcacagccagagtgtctgcaggggctggcaccccacttcctggctgagggtgaactccagcttggggaggtggacctgggaaccatggggcaccttggccacggtgaggtgggggtgcagctgccctggagactgtagtgtactcagcccctcggcttccagcctctggctcagcacttgtgccatgctttccagtgtgggagagggtggggcacacagcacatgcgggcccaggaggaccagctttctaaagctcagccgagggggtgcatttagccccggggccaagagggcccgtctcagagctccaatggcagcggcctcctccccagcgcctgccagtcgcagcagggccagggtcaggtgtaggttctgagagggcactaggaagttggcgcagtgtggggccacgtggaccaggtattcctgggccttggtcacttctgcttgtagcccaggctcggtcaccatgagggccacaaaatgtgtggggcgcggttggcaaggggctgcaacactaaggcgggcccttttgtcctcgggccaggccgcaggaccccactcggcttctgtcgtctcagcggagccccccgggactcccagggcctgtgcttccttgccccccagcaatgtggtcctggtggctgctgttggcttcagtgcctcctcagtcactccggcgaggcgtcctcttggggccagtgttcccaaatcagcagctgtgcccagcgccctctcctgggccgcctccagctctccgggttcctccacgcctggttcctggtgccctgtgcagagcggccttgtgctccctcgcttgggggcagcctgggcctcctgacctgtccccgccagtgtccactcggcaccctctgccccgtgggcgccctcggtgttcggtgcgtccaggatggtgggcccgcgtcccgccgccgagccagagccaaagacgaggtcggtgcgcgaggcgcggtcccacacaaggcggccacggaagcggaagaagcgcacgcggtgctggggcactgccagcacgcccggcccgagcgccgccagcggctggtcccagcaaaaggcgctgaagggctcctcgcgcacacccagaaagcggtcgacgtagcccaccgagaagtcggcggggtcgaggcgcgggtcccagcggatgcgctggatgacgtccgcggctgtgcgcagcggcggcttcttggccccggcctccggctgcgcctcgcggccaggcggcgccggcgccccagggtggggctggcggcagcgggcgccgaagcggcagcggccttccaggaagaagcggcaggccggcgggggcgcgggttccgtggcgggggcttcctgcggcaactccggctctctggccgctgccatgggtgcggggaactggcacgcccgccgcgcagacgaggtcgccccgcacggagggcggctccccatggatgcaccgagcctcacccgacagtggcgtcagcggcccgcgctccggcctagctctggggaccacgccgcgtgccctcgcgaggactctggcccagtccctccttggtggagagcctgacaccgctgctctgggacttccgccggcgccctcccccagcgccaggaaagcaagctgcgtaaaggc

SEQ ID NO: 327635 - DNA, 4385 bp, Homo sapiens
ttttttgagatggagtctttctctgttgcccactgtactctatcgtgggcgacgacagagcaagagcaagactccgtctccgagaacaacaacaacagcaacaagaaaacaacaataaaaaaaataaggctgcgtgggaggcagaaagagctaatgcggccacgcttgtcccctcggggccaccgtccccacccagacttccggtctgccttaaaatgttcatgcgtaagtgcgtgggcaggaaggcgggctcaagcgcagctcgtggcgttcattggctgtgcagggccgagggaggcggtgcaaggccgccgcgtgacgtcaggacgccgcggtcaggacgtcgaagccaaagaagaccagagccagccgggtggcacagcggtgtcgtggccgtgttgctgatcgcctgggtggttgttggcgtgtccctgcagcgaaggatcctgtgacagtgaaaaagcagtctggctcccgaggtccaccccttataccccaaggtccagatggcggccaacgtgggtgatcaacgtagcacagattggtcttctcagtacagcatggtggctggggcaggccgagagaatggcatggagacgccgatgcacgagaacccggagtgggagaaggcccgtcaggccctggccagcatcagcaagtcaggagctgccggcggctctgccaagtccagcagcaatgggcctgtggccagtgcacagtacgtgtcccaggcagaagcctcagctttgcagcagcagcagtactaccagtggtaccagcagtacaactatgcctacccctacagctactactatcccatgagcatgtaccagagctatggctccccttcccagtatgggatggccggctcctatggctcagccacaccccagcagccatccgcaccccaacaccaagggactctgaaccagcccccagtccccggcatggatgagagcatgtcctaccaggctccccctcagcagctgccgtcggctcagccccctcagccctcaaatcccccacatggggctcacacgctgaacagtggccctcagcctgggacagctccagccacacagcacagccaggcggggcccgccacgggccaggcctatgggccacacacctacaccgaacctgccaagcccaagaagggccaacagctgtggaaccgcatgaaacccgcccctgggactggaggtctcaagttcaacatccagaagcgaccctttgctgttaccacccagagctttggctccaacgcagagggccagcacagtggttttggcccccagcccaaccctgagaaagttcagaaccacagcgggtcctctgcccgggggaacctgtctgggaagccggatgactggccccaggacatgaaagagtatgtggagcgctgcttcaccgcctgtgagtcggaggaggacaaggaccgcacggaaaagctgctcaaggaggtgctgcaggcgcggctgcaggacggctcggcctataccattgactggagccgggagcccttgccggggctgacccgggagcctgtggctgagagccctaagaagaagcggtgggaggccgctagcagccttcaccctcctagaggggcaggctcggcgacaaggggcgggggtgccccgtcccagcgagggacgcccggggctgggggtgccggtcgagcccggggcaacagcttcaccaagtttggcaaccgcaacgtcttcatgaaggacaacagctcttcttccagcacagactcccgctcccgctcctcctccaggtccccgacgcgccacttccgcagaagtgactcccactcagactccgacagctcctactcagggaatgagtgtcaccctgtgggccgcaggaacccgccccctaagggccggggcggtcgaggggcccatatggatcggggccgaggcagggcgcagcgtgggaagaggcacgatctggcgcccaccaagcgcagtcgaaagaagatggcggcgctggagtgtgaggacccggagcgagagctgaagaagcagaagcgggcagcccgcttccagcacggacactcccgccgcctgcgcctcgagcccctggtgctgcagatgagcagcctggagagcagtggggctgaccctgactggcaggagctgcagatcgtgggcacctgccctgacatcaccaagcactacctgcgcctcacctgtgcccccgacccgtccaccgtgcgccctgtggcagttttgaaaaagtcgctgtgcatggtcaagtgccactggaaagagaagcaggactacgcgtttgcctgcgagcagatgaagtcgatccggcaggatctgacggtgcagggcatccgcaccgagttcacggtggaggtgtacgagacccatgcccggatcgccttggagaagggtgaccatgaagagtttaaccagtgccagacgcagctcaagtcgctgtacgccgagaacttgcctggcaatgtgggcgagtttactgcctaccgaatcctctactacatcttcaccaagaactcgggagacatcaccacggagctggcatacctcacacgagaactgaaggcagatccttgcgtggcccacgccttggcattaaggacagcctgggccctgggcaactaccaccgctttttccggctctactgccatgcaccctgcatgtctggctacctcgtggacaagtttgcagatcgggagcgcaaggtcgccctcaaggccatgatcaaaacgtatgtggtgccaagctcccttctgcctttgctcttcccatccttccgcctcgcaccgcccctcagaccagctcctggccgcaggcctcccccagcccccaacccttgtcctggtccttgcttccccatcatctttctccattcagccctcccctctccagttcctcttgctctccttgttggtcacctctgtgttccgggtcactcctctccctctccccactgttcccagctcactgcctctggggcctcttctccaccccatctgtgtgtctcttcctcctgttctctcctgcctggaccccctagttcactccttgccctgggcttcctcagaaccctgaggtctctgctttctcagcttgtcgctgtgctcccaccatagagaccatctagacagcctctggtctaccaggacaaggcccagtcccactcagctcctttgagagcaccagaaacgcttagggagacacctgtgttgaggccacactgggcgcggtgccagaggcccctggtcaggccatgcccctgcagtgtccttcgttcactagacattgcgcctggcttgctgtgggtggggatgagttgcttgactcatgtttagacgcatggttctgtctggtgattgaggtgcccaggcgacgctgggcaatgtcaagagaggttttcgcttgtcacagcaaggggatgctcttggcatctagtgagtggaggccagggatgctgccctgccactgccattgggcctcagagctcagtcttgccaaggtggagaaattctggtcgaagaggttgaccggtagactgaagaggccttgagagcctggccaggtggctgtccacgtgaggtcatagtcacagcatggaggccttgagagcctggccaggtggccctccacgtgaggtcatggtcacagcatgggggccttgagtgcctggccaggtggccctccacgtgaggtcatggtcacagcatggaggccttgagagcctggccaggtggccctccacgtgaggttgtggtcacagcatgggggccttgagagcctggccaggtggccctccacgtgaggtcatggtcacagcatggaggccttgagagcctggccaggtggccctccgtgtgaggtcatggtcacagcatagtttggagctagggagggactgtcagcctggaggtttggagactcattctggaatctagtgtgggtcaagccaacttcagggagaggctgagccagggtaggagtcacaggagcagacgaggatgtggggtgccgtgcacagagctccatgaccagcttgggaagttagaaggaaggggaggcaggaggctgcttagtctgctgccatgatgggccccatgaatggtggctctcaagcttctgtgctacacaggggtgtgtggttgggcgagtgtccttgttaattgatacctaattggccttggttgggaacatagccatgagtgcccctcgtgggtggggcgccagtctgtcattgacctcattgtgtcagcaccttccccccaaggaggctgaccctgccctgccagctgagactgggagacggagtgggcttcctcagaaccctgaggtctctgctttctcagcttgtcgctgtgctccccgggatacag

SEQ ID NO: 327636 - DNA, 4412 bp, Homo sapiens
ttttttgagatggagtctttctctgttgcccactgtactctatcgtgggcgacgacagagcaagagcaagactccgtctccgagaacaacaacaacagcaacaagaaaacaacaataaaaaaaataaggctgcgtgggaggcagaaagagctaatgcggccacgcttgtcccctcggggccaccgtccccacccagacttccggtctgccttaaaatgttcatgcgtaagtgcgtgggcaggaaggcgggctcaagcgcagctcgtggcgttcattggctgtgcagggccgagggaggcggtgcaaggccgccgcgtgacgtcaggacgccgcggtcaggacgtcgaagccaaagaagaccagagccagccgggtggcacagcggtgtcgtggccgtgttgctgatcgcctgggtggttgttggcgtgtccctgcagcgaaggatcctgtgacagtgaaaaagcagtctggctcccgaggtccaccccttataccccaaggtccagatggcggccaacgtgggtgatcaacgtagcacagattggtcttctcagtacagcatggtggctggggcaggccgagagaatggcatggagacgccgatgcacgagaacccggagtgggagaaggcccgtcaggccctggccagcatcagcaagtcaggagctgccggcggctctgccaagtccagcagcaatgggcctgtggccagtgcacagtacgtgtcccaggcagaagcctcagctttgcagcagcagcagtactaccagtggtaccagcagtacaactatgcctacccctacagctactactatcccatgagcatgtaccagagctatggctccccttcccagtatgggatggccggctcctatggctcagccacaccccagcagccatccgcaccccaacaccaagggactctgaaccagcccccagtccccggcatggatgagagcatgtcctaccaggctccccctcagcagctgccgtcggctcagccccctcagccctcaaatcccccacatggggctcacacgctgaacagtggccctcagcctgggacagctccagccacacagcacagccaggcggggcccgccacgggccaggcctatgggccacacacctacaccgaacctgccaagcccaagaagggccaacagctgtggaaccgcatgaaacccgcccctgggactggaggtctcaagttcaacatccagaagcgaccctttgctgttaccacccagagctttggctccaacgcagagggccagcacagtggttttggcccccagcccaaccctgagaaagttcagaaccacagcgggtcctctgcccgggggaacctgtctgggaagccggatgactggccccaggacatgaaagagtatgtggagcgctgcttcaccgcctgtgagtcggaggaggacaaggaccgcacggaaaagctgctcaaggaggtgctgcaggcgcggctgcaggacggctcggcctataccattgactggagccgggagcccttgccggggctgacccgggagcctgtggctgagagccctaagaagaagcggtgggaggccgctagcagccttcaccctcctagaggggcaggctcggcgacaaggggcgggggtgccccgtcccagcgagggacgcccggggctgggggtgccggtcgagcccggggcaacagcttcaccaagtttggcaaccgcaacgtcttcatgaaggacaacagctcttcttccagcacagactcccgctcccgctcctcctccaggtccccgacgcgccacttccgcagaagtgactcccactcagactccgacagctcctactcagggaatgagtgtcaccctgtgggccgcaggaacccgccccctaagggccggggcggtcgaggggcccatatggatcggggccgaggcagggcgcagcgtgggaagaggcacgatctggcgcccaccaagcgcagtcgaaagaagatggcggcgctggagtgtgaggacccggagcgagagctgaagaagcagaagcgggcagcccgcttccagcacggacactcccgccgcctgcgcctcgagcccctggtgctgcagatgagcagcctggagagcagtggggctgaccctgactggcaggagctgcagatcgtgggcacctgccctgacatcaccaagcactacctgcgcctcacctgtgcccccgacccgtccaccgtgcgccctgtggcagttttgaaaaagtcgctgtgcatggtcaagtgccactggaaagagaagcaggactacgcgtttgcctgcgagcagatgaagtcgatccggcaggatctgacggtgcagggcatccgcaccgagttcacggtggaggtgtacgagacccatgcccggatcgccttggagaagggtgaccatgaagagtttaaccagtgccagacgcagctcaagtcgctgtacgccgagaacttgcctggcaatgtgggcgagtttactgcctaccgaatcctctactacatcttcaccaagaactcgggagacatcaccacggagctggcatacctcacacgagaactgaaggcagatccttgcgtggcccacgccttggcattaaggacagcctgggccctgggcaactaccaccgctttttccggctctactgccatgcaccctgcatgtctggctacctcgtggacaagtttgcagatcgggagcgcaaggtcgccctcaaggccatgatcaaaacgtatgtggtgccaagctcccttctgcctttgctcttcccatccttccgcctcgcaccgcccctcagaccagctcctggccgcaggcctcccccagcccccaacccttgtcctggtccttgcttccccatcatctttctccattcagccctcccctctccagttcctcttgctctccttgttggtcacctctgtgttccgggtcactcctctccctctccccactgttcccagctcactgcctctggggcctcttctccaccccatctgtgtgtctcttcctcctgttctctcctgcctggaccccctagttcactccttgccctgggcttcctcagaaccctgaggtctctgctttctcagcttgtcgctgtgctcccaccatagagaccatctagacagcctctggtctaccaggacaaggcccagtcccactcagctcctttgagagcaccagaaacgcttagggagacacctgtgttgaggccacactgggcgcggtgccagaggcccctggtcaggccatgcccctgcagtgtccttcgttcactagacattgcgcctggcttgctgtgggtggggatgagttgcttgactcatgtttagacgcatggttctgtctggtgattgaggtgcccaggcgacgctgggcaatgtcaagagaggttttcgcttgtcacagcaaggggatgctcttggcatctagtgagtggaggccagggatgctgccctgccactgccattgggcctcagagctcagtcttgccaaggtggagaaattctggtcgaagaggttgaccggtagactgaagaggccttgagagcctggccaggtggctgtccacgtgaggtcatagtcacagcatggaggccttgagagcctggccaggtggccctccacgtgaggtcatggtcacagcatgggggccttgagtgcctggccaggtggccctccacgtgaggtcatggtcacagcatggaggccttgagagcctggccaggtggccctccacgtgaggttgtggtcacagcatgggggccttgagagcctggccaggtggccctccacgtgaggtcatggtcacagcatggaggccttgagagcctggccaggtggccctccgtgtgaggtcatggtcacagcatagtttggagctagggagggactgtcagcctggaggtttggagactcattctggaatctagtgtgggtcaagccaacttcagggagaggctgagccagggtaggagtcacaggagcagacgaggatgtggggtgccgtgcacagagctccatgagggttgggggcatggtctgcaggctcatctgtgtccgcctttcactccactaatgctgtctcagtgttttcctcctccctctgcccccagtgtttcttctgatttttttttcccctttccctccctccctctccgcattcttcccttggttcagcacaggtaaaacggttcccctccctccctgccttcatggatcaccagctcacgtcatgttgccttctcttttctttgtgtgtgtgtttatttaagttatttttcttcccctcctctcccctccttttccttccttccttcctttccttggagcactgagcaccatttggaagcttgagagaaaccaaaattaaagagagaaagagagagcgtgca

SEQ ID NO: 327637 - DNA, 3547 bp, Homo sapiens
ttttttgagatggagtctttctctgttgcccactgtactctatcgtgggcgacgacagagcaagagcaagactccgtctccgagaacaacaacaacagcaacaagaaaacaacaataaaaaaaataaggctgcgtgggaggcagaaagagctaatgcggccacgcttgtcccctcggggccaccgtccccacccagacttccggtctgccttaaaatgttcatgcgtaagtgcgtgggcaggaaggcgggctcaagcgcagctcgtggcgttcattggctgtgcagggccgagggaggcggtgcaaggccgccgcgtgacgtcaggacgccgcggtcaggacgtcgaagccaaagaagaccagagccagccgggtggcacagcggtgtcgtggccgtgttgctgatcgcctgggtggttgttggcgtgtccctgcagcgaaggatcctgtgacagtgaaaaagcagtctggctcccgaggtccaccccttataccccaaggtccagatggcggccaacgtgggtgatcaacgtagcacagattggtcttctcagtacagcatggtggctggggcaggccgagagaatggcatggagacgccgatgcacgagaacccggagtgggagaaggcccgtcaggccctggccagcatcagcaagtcaggagctgccggcggctctgccaagtccagcagcaatgggcctgtggccagtgcacagtacgtgtcccaggcagaagcctcagctttgcagcagcagcagtactaccagtggtaccagcagtacaactatgcctacccctacagctactactatcccatgagcatgtaccagagctatggctccccttcccagtatgggatggccggctcctatggctcagccacaccccagcagccatccgcaccccaacaccaagggactctgaaccagcccccagtccccggcatggatgagagcatgtcctaccaggctccccctcagcagctgccgtcggctcagccccctcagccctcaaatcccccacatggggctcacacgctgaacagtggccctcagcctgggacagctccagccacacagcacagccaggcggggcccgccacgggccaggcctatgggccacacacctacaccgaacctgccaagcccaagaagggccaacagctgtggaaccgcatgaaacccgcccctgggactggaggtctcaagttcaacatccagaagcgaccctttgctgttaccaccctgaagtgccagcaccaccagcaccagatcctccgccgccacaccgcactgaggacacgccggccgggccgcctcgtctcaagttgtataaagttgtctccgtgtcccctcctccctctgcccccagtgtttcttctgatttttttttcccctttccctccctccctctccgcattcttcccttggttcagcacaggtaaaacggttcccctccctccctgccttcatggatcaccagctcacgtcatgttgccttctcttttctttgtgtgtgtgtttatttaagttatttttcttcctcctctcccttttctttttggccctccctccctccctcttctgccatgtaactggaggatgtgctatgagtttgcaaacagctggactgtcaggctgctttttttccagatgttcctcctctgcctccccttcccctcctctcccctccttttccttccttccttcctttccttggagcactgagcaccatttggaagcttgagagaaaccaaaattaaagagagaaagagagagcgtgcacgctcctgctttgtctttcctgtgtgggctgtttgcatccattgtctcctccagaggtctgggggtgtcactccagggggatctcagccaggggctggaaaggcccccctgtcctccctatacggcacagccagagtgtctgcaggggctggcaccccacttcctggctgagggtgaactccagcttggggaggtggacctgggaaccatggggcaccttggccacggtgaggtgggggtgcagctgccctggagactgtagtgtactcagcccctcggcttccagcctctggctcagcacttgtgccatgctttccagtgtgggagagggtggggcacacagcacatgcgggcccaggaggaccagctttctaaagctcagccgagggggtgcatttagccccggggccaagagggcccgtctcagagctccaatggcagcggcctcctccccagcgcctgccagtcgcagcagggccagggtcaggtgtaggttctgagagggcactaggaagttggcgcagtgtggggccacgtggaccaggtattcctgggccttggtcacttctgcttgtagcccaggctcggtcaccatgagggccacaaaatgtgtggggcgcggttggcaaggggctgcaacactaaggcgggcccttttgtcctcgggccaggccgcaggaccccactcggcttctgtcgtctcagcggagccccccgggactcccagggcctgtgcttccttgccccccagcaatgtggtcctggtggctgctgttggcttcagtgcctcctcagtcactccggcgaggcgtcctcttggggccagtgttcccaaatcagcagctgtgcccagcgccctctcctgggccgcctccagctctccgggttcctccacgcctggttcctggtgccctgtgcagagcggccttgtgctccctcgcttgggggcagcctgggcctcctgacctgtccccgccagtgtccactcggcaccctctgccccgtgggcgccctcggtgttcggtgcgtccaggatggtgggcccgcgtcccgccgccgagccagagccaaagacgaggtcggtgcgcgaggcgcggtcccacacaaggcggccacggaagcggaagaagcgcacgcggtgctggggcactgccagcacgcccggcccgagcgccgccagcggctggtcccagcaaaaggcgctgaagggctcctcgcgcacacccagaaagcggtcgacgtagcccaccgagaagtcggcggggtcgaggcgcgggtcccagcggatgcgctggatgacgtccgcggctgtgcgcagcggcggcttcttggccccggcctccggctgcgcctcgcggccaggcggcgccggcgccccagggtggggctggcggcagcgggcgccgaagcggcagcggccttccaggaagaagcggcaggccggcgggggcgcgggttccgtggcgggggcttcctgcggcaactccggctctctggccgctgccatgggtgcggggaactggcacgcccgccgcgcagacgaggtcgccccgcacggagggcggctccccatggatgcaccgagcctcacccgacagtggcgtcagcggcccgcgctccggcctagctctggggaccacgccgcgtgccctcgcgaggactctggcccagtccctccttggtggagagcctgacaccgctgctctgggacttccgccggcgccctcccccagcgccaggaaagcaagctgcgtaaaggc

SEQ ID NO: 327638 - DNA, 1045 bp, Homo sapiens
ttttttgagatggagtctttctctgttgcccactgtactctatcgtgggcgacgacagagcaagagcaagactccgtctccgagaacaacaacaacagcaacaagaaaacaacaataaaaaaaataaggctgcgtgggaggcagaaagagctaatgcggccacgcttgtcccctcggggccaccgtccccacccagacttccggtctgccttaaaatgttcatgcgtaagtgcgtgggcaggaaggcgggctcaagcgcagctcgtggcgttcattggctgtgcagggccgagggaggcggtgcaaggccgccgcgtgacgtcaggacgccgcggtcaggacgtcgaagccaaagaagaccagagccagccgggtggcacagcggtgtcgtggccgtgttgctgatcgcctgggtggttgttggcgtgtccctgcagcgaaggatcctgtgacagtgaaaaagcagtctggctcccgaggtccaccccttataccccaaggtccagatggcggccaacgtgggtgatcaacgtagcacagattggtcttctcagtacagcatggtggctggggcaggccgagagaatggcatggagacgccgatgcacgagaacccggagtgggagaaggcccgtcaggccctggccagcatcagcaagtcaggagctgccggcggctctgccaagtccagcagcaatgggcctgtggccagtgcacagtacgtgtcccaggcagaagcctcagctttgcagcagcagcagtactaccagtggtaccagcagtacaactatgcctacccctacagctactactatcccatgagcatgtaccagagctatggctccccttcccagtatgggatggccggctcctatggctcagccacaccccagcagccatccgcaccccaacaccaagggactctgaaccagcccccagtccccggcatggatgagagcatgtcctaccaggctccccctcagcagctgccgtcggctcagccccctcagccctggtctccatgggatcctctagatcactcaga

SEQ ID NO: 327639 - DNA, 949 bp, Homo sapiens
ttttttgagatggagtctttctctgttgcccactgtactctatcgtgggcgacgacagagcaagagcaagactccgtctccgagaacaacaacaacagcaacaagaaaacaacaataaaaaaaataaggctgcgtgggaggcagaaagagctaatgcggccacgcttgtcccctcggggccaccgtccccacccagacttccggtctgccttaaaatgttcatgcgtaagtgcgtgggcaggaaggcgggctcaagcgcagctcgtggcgttcattggctgtgcagggccgagggaggcggtgcaaggccgccgcgtgacgtcaggacgccgcggtcaggacgtcgaagccaaagaagaccagagccagccgggtggcacagcggtgtcgtggccgtgttgctgatcgcctgggtggttgttggcgtgtccctgcagcgaaggatcctgtgacagtgaaaaagcagtctggctcccgaggtccaccccttataccccaaggtccagatggcggccaacgtgggtgatcaacgtagcacagattggtcttctcagtacagcatggtggctggggcaggccgagagaatggcatggagacgccgatgcacgagaacccggagtgggagaaggcccgtcaggccctggccagcatcagcaagtcaggagctgccggcggctctgccaagtccagcagcaatgggcctgtggccagtgcacagtacgtgtcccaggcagaagcctcagctttgcagcagcagcagtactaccagtggtaccagcagtacaactatgcctacccctacagctactactatcccatggtgagtgcccagccagtgggccctcctctcccctccttttccttccttccttcctttccttggagcactgagcaccatttggaagcttgagagaaaccaaaattaaagagagaaagagagagcgtgca

SEQ ID NO: 327640 - DNA, 682 bp, Homo sapiens
accccgtctttactaaaaacacaaaaattagccgggcatagtggcgcgcgcctgtaatcccagctactccggaggctgaggcagaattgtttgaacccaggaggcggaggttgcagtgagcagagatcacgcccactgtactctatcgtgggcgacgacagagcaagagcaagactccgtctccgagaacaacaacaacagcaacaagaaaacaacaataaaaaaaataaggctgcgtgggaggcagaaagagctaatgcggccacgcttgtcccctcggggccaccgtccccacccagacttccggtctgccttaaaatgttcatgcgtaagtgcgtgggcaggaaggcgggctcaagcgcagctcgtggcgttcattggctgtgcagggccgagggaggcggtgcaaggccgccgcgtgacgtcaggacgccgcggtcaggacgtcgaagccaaagaagaccagagccagccgggtggcacagcggtgtcgtggccgtgttgctgatcgcctgggtggttgttggcgtgtccctgcagcgaaggatcctgtgttggtaaggggagcggcgggcgagcaggcgggcggggatagcatctccttttggtcttgcgccccgcgagccccgaggccttctcggccgtcgcagcagcagacgccgcgcgcgagcgtcgacagggt

SEQ ID NO: 327641 - DNA, 8944 bp, Homo sapiens
  misc_feature (5757)..(5757): n is a, c, g, or t
cagaaccacagcgggtcctctgcccgggggaacctgtctgggaagccggatgactggccccaggacatgaaagagtatgtggagcgctgcttcaccgcctgtgagtcggaggaggacaaggaccgcacggaaaagctgctcaaggaggtgctgcaggcgcggctgcaggacggctcggcctataccattgactggagccgggagcccttgccggggctgacccgggagcctgtggctgagagccctaagaagaagcggtgggaggccgctagcagccttcaccctcctagaggggcaggctcggcgacaaggggcgggggtgccccgtcccagcgagggacgcccggggctgggggtgccggtcgagcccggggcaacagcttcaccaagtttggcaaccgcaacgtcttcatgaaggacaacagctcttcttccagcacagactcccgctcccgctcctcctccaggtccccgacgcgccacttccgcagaagtgactcccactcagactccgacagctcctactcagggaatgagtgtcaccctgtgggccgcaggaacccgccccctaagggccggggcggtcgaggggcccatatggatcggggccgaggcagggcgcagcgtgggaagaggcacgatctggcgcccaccaagcgcagtcgaaagaagatggcggcgctggagtgtgaggacccggagcgagagctgaagaagcagaagcgggcagcccgcttccagcacggacactcccgccgcctgcgcctcgagcccctggtgctgcagatgagcagcctggagagcagtggggctgaccctgactggcaggagctgcagatcgtgggcacctgccctgacatcaccaagcactacctgcgcctcacctgtgcccccgacccgtccaccgtgcgccctgtggcagttttgaaaaagtcgctgtgcatggtcaagtgccactggaaagagaagcaggactacgcgtttgcctgcgagcagatgaagtcgatccggcaggatctgacggtgcagggcatccgcaccgagttcacggtggaggtgtacgagacccatgcccggatcgccttggagaagggtgaccatgaagagtttaaccagtgccagacgcagctcaagtcgctgtacgccgagaacttgcctggcaatgtgggcgagtttactgcctaccgaatcctctactacatcttcaccaagaactcgggagacatcaccacggagctggcatacctcacacgagaactgaaggcagatccttgcgtggcccacgccttggcattaagggagccagccgggtggcacagcggtgtcgtggccgtgttgctgatcgcctgggtggttgttggcgtgtccctgcagcgaaggatcctgtgacagtgaaaaagcagtctggctcccgaggtccaccccttataccccaaggtccagatggcggccaacgtgggtgatcaacgtagcacagattggtcttctcagtacagcatggtggctggggcaggccgagagaatggcatggagacgccgatgcacgagaacccggagtgggagaaggcccgtcaggccctggccagcatcagcaagtcaggagctgccggcggctctgccaagtccagcagcaatgggcctgtggccagtgcacagtacgtgtcccaggcagaagcctcagctttgcagcagcagcagtactaccagtggtaccagcagtacaactatgcctacccctacagctactactatcccatgagcatgtaccagagctatggctccccttcccagtatgggatggccggctcctatggctcagccacaccccagcagccatccgcaccccaacaccaagggactctgaaccagcccccagtccccggcatggatgagagcatgtcctaccaggctccccctcagcagctgccgtcggctcagccccctcagccctcaaatcccccacatggggctcacacgctgaacagtggccctcagcctgggacagctccagccacacagcacagccaggcggggcccgccacgggccaggcctatgggccacacacctacaccgaacctgccaagcccaagaagggccaacagctgtggaaccgcatgaaacccgcccctgggactggaggtctcaagttcaacatccagaagcgaccctttgctgttaccacccagagctttggctccaacgcagagggccagcacagtggttttggcccccagcccaaccctgagaaagttcagaaccacagcgggtcctctgcccgggggaacctgtctgggaagccggatgactggccccaggacatgaaagagtatgtggagcgctgcttcaccgcctgtgagtcggaggaggacaaggaccgcacggaaaagctgctcaaggaggtgctgcaggcgcggctgcaggacggctcggcctataccattgactggagccgggagcccttgccggggctgacccgggagcctgtggctgagagccctaagaagaagcggtgggaggccgctagcagccttcaccctcctagaggggcaggctcggcgacaaggggcgggggtgccccgtcccagcgagggacgcccggggctgggggtgccggtcgagcccggggcaacagcttcaccaagtttggcaaccgcaacgtcttcatgaaggacaacagctcttcttccagcacagactcccgctcccgctcctcctccaggtccccgacgcgccacttccgcagaagtgactcccactcagactccgacagctcctactcagggaatgagtgtcaccctgtgggccgcaggaacccgccccctaagggccggggcggtcgaggggcccatatggatcggggccgaggcagggcgcagcgtgggaagaggcacgatctggcgcccaccaagcgcagtcgaaagaagatggcggcgctggagtgtgaggacccggagcgagagctgaagaagcagaagcgggcagcccgcttccagcacggacactcccgccgcctgcgcctcgagcccctggtgctgcagatgagcagcctggagagcagtggggctgaccctgactggcaggagctgcagatcgtgggcacctgccctgacatcaccaagcactacctgcgcctcacctgtgcccccgacccgtccaccgtgcgccctgtggcagttttgaaaaagtcgctgtgcatggtcaagtgccactggaaagagaagcaggactacgcgtttgcctgcgagcagatgaagtcgatccggcaggatctgacggtgcagggcatccgcaccgagttcacggtggaggtgtacgagacccatgcccggatcgccttggagaagggtgaccatgaagagtttaaccagtgccagacgcagctcaagtcgctgtacgccgagaacttgcctggcaatgtgggcgagtttactgcctaccgaatcctctactacatcttcaccaagaactcgggagacatcaccacggagctggcatacctcacacgagaactgaaggcagatccttgcgtggcccacgccttggcattaaggacagcctgggccctgggcaactaccaccgctttttccggctctactgccatgcaccctgcatgtctggctacctcgtggacaagtttgcagatcgggagcgcaaggtcgccctcaaggccatgatcaaaacgtatgtggtgccaagctcccttctgcctttgctcttcccatccttccgcctcgcaccgcccctcagaccagctcctggccgcaggcctcccccagcccccaacccttgtcctggtccttgcttccccatcatctttctccattcagccctcccctctccagttcctcttgctctccttgttggtcacctctgtgttccgggtcactcctctccctctccccactgttcccagctcactgcctctggggcctcttctccaccccatctgtgtgtctcttcctcctgttctctcctgcctggaccccctagttcactccttgccctgggcttcctcagaaccctgaggtctctgctttctcagcttgtcgctgtgctcccaccatagagaccatctagacagcctctggtctaccaggacaaggcccagtcccactcagctcctttgagagcaccagaaacgcttagggagacacctgtgttgaggccacactgggcgcggtgccagaggcccctggtcaggccatgcccctgcagtgtccttcgttcactagacattgcgcctggcttgctgtgggtggggatgagttgcttgactcatgtttagacgcatggttctgtctggtgattgaggtgcccaggcgacgctgggcaatgtcaagagaggttttcgcttgtcacagcaaggggatgctcttggcatctagtgagtggaggccagggatgctgccctgccactgccattgggcctcagagctcagtcttgccaaggtggagaaattctggtcgaagaggttgaccggtagactgaagaggccttgagagcctggccaggtggctgtccacgtgaggtcatagtcacagcatggaggccttgagagcctggccaggtggccctccacgtgaggtcatggtcacagcatgggggccttgagtgcctggccaggtggccctccacgtgaggtcatggtcacagcatggaggccttgagagcctggccaggtggccctccacgtgaggttgtggtcacagcatgggggccttgagagcctggccaggtggccctccacgtgaggtcatggtcacagcatggaggccttgagagcctggccaggtggccctccgtgtgaggtcatggtcacagcatagtttggagctagggagggactgtcagcctggaggtttggagactcattctggaatctagtgtgggtcaagccaacttcagggagaggctgagccagggtaggagtcacaggagcagacgaggatgtggggtgccgtgcacagagctccatgaccagcttgggaagttagaaggaaggggaggcaggaggctgcttagtctgctgccatgatgggccccatgaatggtggctctcaagcttctgtgctacacaggggtgtgtggttgggcgagtgtccttgttaattgatacctaattggccttggttgggaacatagccatgagtgcccctcgtgggtggggcgccagtctgtcattgacctcattgtgtcagcaccttccccccaaggaggctgaccctgccctgccagctgagactgggagacggagtgggctctgatcccagggcttccaggaaagctctggctttggagcagaagcgggttctaggacttagtgcccctcactcggtgcctgggttcctgtgtgtgtggaaagggtagggctgcaccctgtggaagagggttcagggagctctgaggacctggctcgtgctagatgctcagtcagtagtgtgttttagcagcagccggaagtgactgctttcagtgtgtagtggtgagtgctagctggcacccctgcgcctggcttcccagacactgtaacgcagggcaggggaggcagcgagggctgggtccccacggtggccctggcagccccgccatccccatcccctgccacgtgctgctccctccatctggtccctgcccctcagccagcggaggagcccgctgggcccttccctgcccgtccccgctcctccctggcccccgcacaggtaagtgagggtgaggggggcacaggggactggggtcactaaccccccccgngccccccccgagcccctgaggtggggaggctgggaggcgggtggggagccagcaggcactgtgctgaggaaatcctgtgggcacccgaatgggggggcctccccgctcgtggggccctcccctgccctcccgcccgcccgcctcatcaccttctcctcttgtctccatagcttccgccctgcgctgccagtctcctacctgcaggccgagctggccttcgagggcgaggccgcctgccgggccttcctagagcccctgggcctggcctacacgggcccggacaactccagcatcgactgccgcctcagcctggcgcagctgtcagccttctgagcacccagcgaggaggggcgggggcaggggctgcagcccccagcgctgcctttgcggattctgtttttgagccgtggacttgggttgtaaatttatttgtggggagtgcgctccaggaagagccaccatccctgcccccgttttcccaccggggagtctgtacagagatttttctacgtttttattttttgcctcagagggatgggattggggaggaggggatgggcagcggagggttgggggcatggtctgcaggctcatctgtgtccgcctttcactccactaatgctgtctcagtgttttctctctctctctttcgagcttgcactccggtacccgacccggcgccctggcccatcccatgccggggggccagtggaaagaagacaggccgtccagcccgtgcccgcctgcggcgggggcacccagcaagcccgcccaccgcccgctgcctcacctgcttcgccacagactcttgttcccagccccttggggcctccgtgtttggggtgggggagctgcttagagactgtgcccgtcctcggccccccaccctgaagtgccagcaccaccagcaccagatcctccgccgccacaccgcactgaggacacgccggccgggccgcctcgtctcaagttgtataaagttgtctccgtgtcccctcctccctctgcccccagtgtttcttctgatttttttttcccctttccctccctccctctccgcattcttcccttggttcagcacaggtaaaacggttcccctccctccctgccttcatggatcaccagctcacgtcatgttgccttctcttttctttgtgtgtgtgtttatttaagttatttttcttcctcctctcccttttctttttggccctccctccctccctcttctgccatgtaactggaggatgtgctatgagtttgcaaacagctggactgtcaggctgctttttttccagatgttcctcctctgcctccccttcccctcctctcccctccttttccttccttccttcctttccttggagcactgagcaccatttggaagcttgagagaaaccaaaattaaagagagaaagagagagcgtgcacgctcctgctttgtctttcctgtgtgggctgtttgcatccattgtctcctccagaggtctgggggtgtcactccagggggatctcagccaggggctggaaaggcccccctgtcctccctatacggcacagccagagtgtctgcaggggctggcaccccacttcctggctgagggtgaactccagcttggggaggtggacctgggaaccatggggcaccttggccacggtgaggtgggggtgcagctgccctggagactgtagtgtactcagcccctcggcttccagcctctggctcagcacttgtgccatgctttccagtgtgggagagggtggggcacacagcacatgcgggcccaggaggaccagctttctaaagctcagccgagggggtgcatttagccccggggccaagagggcccgtctcagagctccaatggcagcggcctcctccccagcgcctgccagtcgcagcagggccagggtcaggtgtaggttctgagagggcactaggaagttggcgcagtgtggggccacgtggaccaggtattcctgggccttggtcacttctgcttgtagcccaggctcggtcaccatgagggccacaaaatgtgtggggcgcggttggcaaggggctgcaacactaaggcgggcccttttgtcctcgggccaggccgcaggaccccactcggcttctgtcgtctcagcggagccccccgggactcccagggcctgtgcttccttgccccccagcaatgtggtcctggtggctgctgttggcttcagtgcctcctcagtcactccggcgaggcgtcctcttggggccagtgttcccaaatcagcagctgtgcccagcgccctctcctgggccgcctccagctctccgggttcctccacgcctggttcctggtgccctgtgcagagcggccttgtgctccctcgcttgggggcagcctgggcctcctgacctgtccccgccagtgtccactcggcaccctctgccccgtgggcgccctcggtgttcggtgcgtccaggatggtgggcccgcgtcccgccgccgagccagagccaaagacgaggtcggtgcgcgaggcgcggtcccacacaaggcggccacggaagcggaagaagcgcacgcggtgctggggcactgccagcacgcccggcccgagcgccgccagcggctggtcccagcaaaaggcgctgaagggctcctcgcgcacacccagaaagcggtcgacgtagcccaccgagaagtcggcggggtcgaggcgcgggtcccagcggatgcgctggatgacgtccgcggctgtgcgcagcggcggcttcttggccccggcctccggctgcgcctcgcggccaggcggcgccggcgccccagggtggggctggcggcagcgggcgccgaagcggcagcggccttccaggaagaagcggcaggccggcgggggcgcgggttccgtggcgggggcttcctgcggcaactccggctctctggccgctgccatgggtgcggggaactggcacgcccgccgcgcagacgaggtcgccccgcacggagggcggctccccatggatgcaccgagcctcacccgacagtggcgtcagcggcccgcgctccggcctagctctggggaccacgccgcgtgccctcgcgaggactctggcccagtccctccttggtggagagcctgacaccgctgctctgggacttccgccggcgccctcccccagcgccaggaaagcaagctgcgtaaaggc

SEQ ID NO: 327642 - DNA, 7573 bp, Homo sapiens
  misc_feature (4386)..(4386): n is a, c, g, or t
tggtagtaacagttagatatgggatccaggggctggaatttgcctcccaacttgcccacctgtgtacagtggggagaacaggtgtgacttgatgtcctctctctctgcaggtcttctcagtacagcatggtggctggggcaggccgagagaatggcatggagacgccgatgcacgagaacccggagtgggagaaggcccgtcaggccctggccagcatcagcaagtcaggagctgccggcggctctgccaagtccagcagcaatgggcctgtggccagtgcacagtacgtgtcccaggcagaagcctcagctttgcagcagcagcagtactaccagtggtaccagcagtacaactatgcctacccctacagctactactatcccatgagcatgtaccagagctatggctccccttcccagtatgggatggccggctcctatggctcagccacaccccagcagccatccgcaccccaacaccaagggactctgaaccagcccccagtccccggcatggatgagagcatgtcctaccaggctccccctcagcagctgccgtcggctcagccccctcagccctcaaatcccccacatggggctcacacgctgaacagtggccctcagcctgggacagctccagccacacagcacagccaggcggggcccgccacgggccaggcctatgggccacacacctacaccgaacctgccaagcccaagaagggccaacagctgtggaaccgcatgaaacccgcccctgggactggaggtctcaagttcaacatccagaagcgaccctttgctgttaccacccagagctttggctccaacgcagagggccagcacagtggttttggcccccagcccaaccctgagaaagttcagaaccacagcgggtcctctgcccgggggaacctgtctgggaagccggatgactggccccaggacatgaaagagtatgtggagcgctgcttcaccgcctgtgagtcggaggaggacaaggaccgcacggaaaagctgctcaaggaggtgctgcaggcgcggctgcaggacggctcggcctataccattgactggagccgggagcccttgccggggctgacccgggagcctgtggctgagagccctaagaagaagcggtgggaggccgctagcagccttcaccctcctagaggggcaggctcggcgacaaggggcgggggtgccccgtcccagcgagggacgcccggggctgggggtgccggtcgagcccggggcaacagcttcaccaagtttggcaaccgcaacgtcttcatgaaggacaacagctcttcttccagcacagactcccgctcccgctcctcctccaggtccccgacgcgccacttccgcagaagtgactcccactcagactccgacagctcctactcagggaatgagtgtcaccctgtgggccgcaggaacccgccccctaagggccggggcggtcgaggggcccatatggatcggggccgaggcagggcgcagcgtgggaagaggcacgatctggcgcccaccaagcgcagtcgaaagaagatggcggcgctggagtgtgaggacccggagcgagagctgaagaagcagaagcgggcagcccgcttccagcacggacactcccgccgcctgcgcctcgagcccctggtgctgcagatgagcagcctggagagcagtggggctgaccctgactggcaggagctgcagatcgtgggcacctgccctgacatcaccaagcactacctgcgcctcacctgtgcccccgacccgtccaccgtgcgccctgtggcagttttgaaaaagtcgctgtgcatggtcaagtgccactggaaagagaagcaggactacgcgtttgcctgcgagcagatgaagtcgatccggcaggatctgacggtgcagggcatccgcaccgagttcacggtggaggtgtacgagacccatgcccggatcgccttggagaagggtgaccatgaagagtttaaccagtgccagacgcagctcaagtcgctgtacgccgagaacttgcctggcaatgtgggcgagtttactgcctaccgaatcctctactacatcttcaccaagaactcgggagacatcaccacggagctggcatacctcacacgagaactgaaggcagatccttgcgtggcccacgccttggcattaaggacagcctgggccctgggcaactaccaccgctttttccggctctactgccatgcaccctgcatgtctggctacctcgtggacaagtttgcagatcgggagcgcaaggtcgccctcaaggccatgatcaaaacgtatgtggtgccaagctcccttctgcctttgctcttcccatccttccgcctcgcaccgcccctcagaccagctcctggccgcaggcctcccccagcccccaacccttgtcctggtccttgcttccccatcatctttctccattcagccctcccctctccagttcctcttgctctccttgttggtcacctctgtgttccgggtcactcctctccctctccccactgttcccagctcactgcctctggggcctcttctccaccccatctgtgtgtctcttcctcctgttctctcctgcctggaccccctagttcactccttgccctgggcttcctcagaaccctgaggtctctgctttctcagcttgtcgctgtgctcccaccatagagaccatctagacagcctctggtctaccaggacaaggcccagtcccactcagctcctttgagagcaccagaaacgcttagggagacacctgtgttgaggccacactgggcgcggtgccagaggcccctggtcaggccatgcccctgcagtgtccttcgttcactagacattgcgcctggcttgctgtgggtggggatgagttgcttgactcatgtttagacgcatggttctgtctggtgattgaggtgcccaggcgacgctgggcaatgtcaagagaggttttcgcttgtcacagcaaggggatgctcttggcatctagtgagtggaggccagggatgctgccctgccactgccattgggcctcagagctcagtcttgccaaggtggagaaattctggtcgaagaggttgaccggtagactgaagaggccttgagagcctggccaggtggctgtccacgtgaggtcatagtcacagcatggaggccttgagagcctggccaggtggccctccacgtgaggtcatggtcacagcatgggggccttgagtgcctggccaggtggccctccacgtgaggtcatggtcacagcatggaggccttgagagcctggccaggtggccctccacgtgaggttgtggtcacagcatgggggccttgagagcctggccaggtggccctccacgtgaggtcatggtcacagcatggaggccttgagagcctggccaggtggccctccgtgtgaggtcatggtcacagcatagtttggagctagggagggactgtcagcctggaggtttggagactcattctggaatctagtgtgggtcaagccaacttcagggagaggctgagccagggtaggagtcacaggagcagacgaggatgtggggtgccgtgcacagagctccatgaccagcttgggaagttagaaggaaggggaggcaggaggctgcttagtctgctgccatgatgggccccatgaatggtggctctcaagcttctgtgctacacaggggtgtgtggttgggcgagtgtccttgttaattgatacctaattggccttggttgggaacatagccatgagtgcccctcgtgggtggggcgccagtctgtcattgacctcattgtgtcagcaccttccccccaaggaggctgaccctgccctgccagctgagactgggagacggagtgggctctgatcccagggcttccaggaaagctctggctttggagcagaagcgggttctaggacttagtgcccctcactcggtgcctgggttcctgtgtgtgtggaaagggtagggctgcaccctgtggaagagggttcagggagctctgaggacctggctcgtgctagatgctcagtcagtagtgtgttttagcagcagccggaagtgactgctttcagtgtgtagtggtgagtgctagctggcacccctgcgcctggcttcccagacactgtaacgcagggcaggggaggcagcgagggctgggtccccacggtggccctggcagccccgccatccccatcccctgccacgtgctgctccctccatctggtccctgcccctcagccagcggaggagcccgctgggcccttccctgcccgtccccgctcctccctggcccccgcacaggtaagtgagggtgaggggggcacaggggactggggtcactaaccccccccgngccccccccgagcccctgaggtggggaggctgggaggcgggtggggagccagcaggcactgtgctgaggaaatcctgtgggcacccgaatgggggggcctccccgctcgtggggccctcccctgccctcccgcccgcccgcctcatcaccttctcctcttgtctccatagcttccgccctgcgctgccagtctcctacctgcaggccgagctggccttcgagggcgaggccgcctgccgggccttcctagagcccctgggcctggcctacacgggcccggacaactccagcatcgactgccgcctcagcctggcgcagctgtcagccttctgagcacccagcgaggaggggcgggggcaggggctgcagcccccagcgctgcctttgcggattctgtttttgagccgtggacttgggttgtaaatttatttgtggggagtgcgctccaggaagagccaccatccctgcccccgttttcccaccggggagtctgtacagagatttttctacgtttttattttttgcctcagagggatgggattggggaggaggggatgggcagcggagggttgggggcatggtctgcaggctcatctgtgtccgcctttcactccactaatgctgtctcagtgttttctctctctctctttcgagcttgcactccggtacccgacccggcgccctggcccatcccatgccggggggccagtggaaagaagacaggccgtccagcccgtgcccgcctgcggcgggggcacccagcaagcccgcccaccgcccgctgcctcacctgcttcgccacagactcttgttcccagccccttggggcctccgtgtttggggtgggggagctgcttagagactgtgcccgtcctcggccccccaccctgaagtgccagcaccaccagcaccagatcctccgccgccacaccgcactgaggacacgccggccgggccgcctcgtctcaagttgtataaagttgtctccgtgtcccctcctccctctgcccccagtgtttcttctgatttttttttcccctttccctccctccctctccgcattcttcccttggttcagcacaggtaaaacggttcccctccctccctgccttcatggatcaccagctcacgtcatgttgccttctcttttctttgtgtgtgtgtttatttaagttatttttcttcctcctctcccttttctttttggccctccctccctccctcttctgccatgtaactggaggatgtgctatgagtttgcaaacagctggactgtcaggctgctttttttccagatgttcctcctctgcctccccttcccctcctctcccctccttttccttccttccttcctttccttggagcactgagcaccatttggaagcttgagagaaaccaaaattaaagagagaaagagagagcgtgcacgctcctgctttgtctttcctgtgtgggctgtttgcatccattgtctcctccagaggtctgggggtgtcactccagggggatctcagccaggggctggaaaggcccccctgtcctccctatacggcacagccagagtgtctgcaggggctggcaccccacttcctggctgagggtgaactccagcttggggaggtggacctgggaaccatggggcaccttggccacggtgaggtgggggtgcagctgccctggagactgtagtgtactcagcccctcggcttccagcctctggctcagcacttgtgccatgctttccagtgtgggagagggtggggcacacagcacatgcgggcccaggaggaccagctttctaaagctcagccgagggggtgcatttagccccggggccaagagggcccgtctcagagctccaatggcagcggcctcctccccagcgcctgccagtcgcagcagggccagggtcaggtgtaggttctgagagggcactaggaagttggcgcagtgtggggccacgtggaccaggtattcctgggccttggtcacttctgcttgtagcccaggctcggtcaccatgagggccacaaaatgtgtggggcgcggttggcaaggggctgcaacactaaggcgggcccttttgtcctcgggccaggccgcaggaccccactcggcttctgtcgtctcagcggagccccccgggactcccagggcctgtgcttccttgccccccagcaatgtggtcctggtggctgctgttggcttcagtgcctcctcagtcactccggcgaggcgtcctcttggggccagtgttcccaaatcagcagctgtgcccagcgccctctcctgggccgcctccagctctccgggttcctccacgcctggttcctggtgccctgtgcagagcggccttgtgctccctcgcttgggggcagcctgggcctcctgacctgtccccgccagtgtccactcggcaccctctgccccgtgggcgccctcggtgttcggtgcgtccaggatggtgggcccgcgtcccgccgccgagccagagccaaagacgaggtcggtgcgcgaggcgcggtcccacacaaggcggccacggaagcggaagaagcgcacgcggtgctggggcactgccagcacgcccggcccgagcgccgccagcggctggtcccagcaaaaggcgctgaagggctcctcgcgcacacccagaaagcggtcgacgtagcccaccgagaagtcggcggggtcgaggcgcgggtcccagcggatgcgctggatgacgtccgcggctgtgcgcagcggcggcttcttggccccggcctccggctgcgcctcgcggccaggcggcgccggcgccccagggtggggctggcggcagcgggcgccgaagcggcagcggccttccaggaagaagcggcaggccggcgggggcgcgggttccgtggcgggggcttcctgcggcaactccggctctctggccgctgccatgggtgcggggaactggcacgcccgccgcgcagacgaggtcgccccgcacggagggcggctccccatggatgcaccgagcctcacccgacagtggcgtcagcggcccgcgctccggcctagctctggggaccacgccgcgtgccctcgcgaggactctggcccagtccctccttggtggagagcctgacaccgctgctctgggacttccgccggcgccctcccccagcgccaggaaagcaagctgcgtaaaggc

SEQ ID NO: 327643 - DNA, 7785 bp, Homo sapiens
ttttttgagatggagtctttctctgttgcccactgtactctatcgtgggcgacgacagagcaagagcaagactccgtctccgagaacaacaacaacagcaacaagaaaacaacaataaaaaaaataaggctgcgtgggaggcagaaagagctaatgcggccacgcttgtcccctcggggccaccgtccccacccagacttccggtctgccttaaaatgttcatgcgtaagtgcgtgggcaggaaggcgggctcaagcgcagctcgtggcgttcattggctgtgcagggccgagggaggcggtgcaaggccgccgcgtgacgtcaggacgccgcggtcaggacgtcgaagccaaagaagaccagagccagccgggtggcacagcggtgtcgtggccgtgttgctgatcgcctgggtggttgttggcgtgtccctgcagcgaaggatcctgtgacagtgaaaaagcagtctggctcccgaggtccaccccttataccccaaggtccagatggcggccaacgtgggtgatcaacgtagcacagattggtcttctcagtacagcatggtggctggggcaggccgagagaatggcatggagacgccgatgcacgagaacccggagtgggagaaggcccgtcaggccctggccagcatcagcaagtcaggagctgccggcggctctgccaagtccagcagcaatgggcctgtggccagtgcacagtacgtgtcccaggcagaagcctcagctttgcagcagcagcagtactaccagtggtaccagcagtacaactatgcctacccctacagctactactatcccatgagcatgtaccagagctatggctccccttcccagtatgggatggccggctcctatggctcagccacaccccagcagccatccgcaccccaacaccaagggactctgaaccagcccccagtccccggcatggatgagagcatgtcctaccaggctccccctcagcagctgccgtcggctcagccccctcagccctcaaatcccccacatggggctcacacgctgaacagtggccctcagcctgggacagctccagccacacagcacagccaggcggggcccgccacgggccaggcctatgggccacacacctacaccgaacctgccaagcccaagaagggccaacagctgtggaaccgcatgaaacccgcccctgggactggaggtctcaagttcaacatccagaagcgaccctttgctgttaccacccagagctttggctccaacgcagagggccagcacagtggttttggcccccagcccaaccctgagaaagttcagaaccacagcgggtcctctgcccgggggaacctgtctgggaagccggatgactggccccaggacatgaaagagtatgtggagcgctgcttcaccgcctgtgagtcggaggaggacaaggaccgcacggaaaagctgctcaaggaggtgctgcaggcgcggctgcaggacggctcggcctataccattgactggagccgggagcccttgccggggctgacccgggagcctgtggctgagagccctaagaagaagcggtgggaggccgctagcagccttcaccctcctagaggggcaggctcggcgacaaggggcgggggtgccccgtcccagcgagggacgcccggggctgggggtgccggtcgagcccggggcaacagcttcaccaagtttggcaaccgcaacgtcttcatgaaggacaacagctcttcttccagcacagactcccgctcccgctcctcctccaggtccccgacgcgccacttccgcagaagtgactcccactcagactccgacagctcctactcagggaatgagtgtcaccctgtgggccgcaggaacccgccccctaagggccggggcggtcgaggggcccatatggatcggggccgaggcagggcgcagcgtgggaagaggcacgatctggcgcccaccaagcgcagtcgaaagaagatggcggcgctggagtgtgaggacccggagcgagagctgaagaagcagaagcgggcagcccgcttccagcacggacactcccgccgcctgcgcctcgagcccctggtgctgcagatgagcagcctggagagcagtggggctgaccctgactggcaggagctgcagatcgtgggcacctgccctgacatcaccaagcactacctgcgcctcacctgtgcccccgacccgtccaccgtgcgccctgtggcagttttgaaaaagtcgctgtgcatggtcaagtgccactggaaagagaagcaggactacgcgtttgcctgcgagcagatgaagtcgatccggcaggatctgacggtgcagggcatccgcaccgagttcacggtggaggtgtacgagacccatgcccggatcgccttggagaagggtgaccatgaagagtttaaccagtgccagacgcagctcaagtcgctgtacgccgagaacttgcctggcaatgtgggcgagtttactgcctaccgaatcctctactacatcttcaccaagaactcgggagacatcaccacggagctggcatacctcacacgagaactgaaggcagatccttgcgtggcccacgccttggcattaaggacagcctgggccctgggcaactaccaccgctttttccggctctactgccatgcaccctgcatgtctggctacctcgtggacaagtttgcagatcgggagcgcaaggtcgccctcaaggccatgatcaaaacgtatgtggtgccaagctcccttctgcctttgctcttcccatccttccgcctcgcaccgcccctcagaccagctcctggccgcaggcctcccccagcccccaacccttgtcctggtccttgcttccccatcatctttctccattcagccctcccctctccagttcctcttgctctccttgttggtcacctctgtgttccgggtcactcctctccctctccccactgttcccagctcactgcctctggggcctcttctccaccccatctgtgtgtctcttcctcctgttctctcctgcctggaccccctagttcactccttgccctgggcttcctcagaaccctgaggtctctgctttctcagcttgtcgctgtgctcccaccatagagaccatctagacagcctctggtctaccaggacaaggcccagtcccactcagctcctttgagagcaccagaaacgcttagggagacacctgtgttgaggccacactgggcgcggtgccagaggcccctggtcaggccatgcccctgcagtgtccttcgttcactagacattgcgcctggcttgctgtgggtggggatgagttgcttgactcatgtttagacgcatggttctgtctggtgattgaggtgcccaggcgacgctgggcaatgtcaagagaggttttcgcttgtcacagcaaggggatgctcttggcatctagtgagtggaggccagggatgctgccctgccactgccattgggcctcagagctcagtcttgccaaggtggagaaattctggtcgaagaggttgaccggtagactgaagaggccttgagagcctggccaggtggctgtccacgtgaggtcatagtcacagcatggaggccttgagagcctggccaggtggccctccacgtgaggtcatggtcacagcatgggggccttgagtgcctggccaggtggccctccacgtgaggtcatggtcacagcatggaggccttgagagcctggccaggtggccctccacgtgaggttgtggtcacagcatgggggccttgagagcctggccaggtggccctccacgtgaggtcatggtcacagcatggaggccttgagagcctggccaggtggccctccgtgtgaggtcatggtcacagcatagtttggagctagggagggactgtcagcctggaggtttggagactcattctggaatctagtgtgggtcaagccaacttcagggagaggctgagccagggtaggagtcacaggagcagacgaggatgtggggtgccgtgcacagagctccatgaccagcttgggaagttagaaggaaggggaggcaggaggctgcttagtctgctgccatgatgggccccatgaatggtggctctcaagcttctgtgctacacaggggtgtgtggttgggcgagtgtccttgttaattgatacctaattggccttggttgggaacatagccatgagtgcccctcgtgggtggggcgccagtctgtcattgacctcattgtgtcagcaccttccccccaaggaggctgaccctgccctgccagctgagactgggagacggagtgggctctgatcccagggcttccaggaaagctctggctttggagcagaagcgggttctaggacttagtgcccctcactcggtgcctgggttcctgtgtgtgtggaaagggtagggctgcaccctgtggaagagggttcagggagctctgaggacctggctcgtgctagatgctcagtcagtagtgtgttttagcagcagccggaagtgactgctttcagtgtgtagtggtgagtgctagctggcacccctgcgcctggcttcccagacactgtaacgcagggcaggggaggcagcgagggctgggtccccacggtggccctggcagccccgccatccccatcccctgccacgtgctgctccctccatctggtccctgcccctcagccagcggaggagcccgctgggcccttccctgcccgtccccgctcctccctggcccccgcacagcttccgccctgcgctgccagtctcctacctgcaggccgagctggccttcgagggcgaggccgcctgccgggccttcctagagcccctgggcctggcctacacgggcccggacaactccagcatcgactgccgcctcagcctggcgcagctgtcagccttctgagcacccagcgaggaggggcgggggcaggggctgcagcccccagcgctgcctttgcggattctgtttttgagccgtggacttgggttgtaaatttatttgtggggagtgcgctccaggaagagccaccatccctgcccccgttttcccaccggggagtctgtacagagatttttctacgtttttattttttgcctcagagggatgggattggggaggaggggatgggcagcggagggttgggggcatggtctgcaggctcatctgtgtccgcctttcactccactaatgctgtctcagtgttttctctctctctctttcgagcttgcactccggtacccgacccggcgccctggcccatcccatgccggggggccagtggaaagaagacaggccgtccagcccgtgcccgcctgcggcgggggcacccagcaagcccgcccaccgcccgctgcctcacctgcttcgccacagactcttgttcccagccccttggggcctccgtgtttggggtgggggagctgcttagagactgtgcccgtcctcggccccccaccctgaagtgccagcaccaccagcaccagatcctccgccgccacaccgcactgaggacacgccggccgggccgcctcgtctcaagttgtataaagttgtctccgtgtcccctcctccctctgcccccagtgtttcttctgatttttttttcccctttccctccctccctctccgcattcttcccttggttcagcacaggtaaaacggttcccctccctccctgccttcatggatcaccagctcacgtcatgttgccttctcttttctttgtgtgtgtgtttatttaagttatttttcttcctcctctcccttttctttttggccctccctccctccctcttctgccatgtaactggaggatgtgctatgagtttgcaaacagctggactgtcaggctgctttttttccagatgttcctcctctgcctccccttcccctcctctcccctccttttccttccttccttcctttccttggagcactgagcaccatttggaagcttgagagaaaccaaaattaaagagagaaagagagagcgtgcacgctcctgctttgtctttcctgtgtgggctgtttgcatccattgtctcctccagaggtctgggggtgtcactccagggggatctcagccaggggctggaaaggcccccctgtcctccctatacggcacagccagagtgtctgcaggggctggcaccccacttcctggctgagggtgaactccagcttggggaggtggacctgggaaccatggggcaccttggccacggtgaggtgggggtgcagctgccctggagactgtagtgtactcagcccctcggcttccagcctctggctcagcacttgtgccatgctttccagtgtgggagagggtggggcacacagcacatgcgggcccaggaggaccagctttctaaagctcagccgagggggtgcatttagccccggggccaagagggcccgtctcagagctccaatggcagcggcctcctccccagcgcctgccagtcgcagcagggccagggtcaggtgtaggttctgagagggcactaggaagttggcgcagtgtggggccacgtggaccaggtattcctgggccttggtcacttctgcttgtagcccaggctcggtcaccatgagggccacaaaatgtgtggggcgcggttggcaaggggctgcaacactaaggcgggcccttttgtcctcgggccaggccgcaggaccccactcggcttctgtcgtctcagcggagccccccgggactcccagggcctgtgcttccttgccccccagcaatgtggtcctggtggctgctgttggcttcagtgcctcctcagtcactccggcgaggcgtcctcttggggccagtgttcccaaatcagcagctgtgcccagcgccctctcctgggccgcctccagctctccgggttcctccacgcctggttcctggtgccctgtgcagagcggccttgtgctccctcgcttgggggcagcctgggcctcctgacctgtccccgccagtgtccactcggcaccctctgccccgtgggcgccctcggtgttcggtgcgtccaggatggtgggcccgcgtcccgccgccgagccagagccaaagacgaggtcggtgcgcgaggcgcggtcccacacaaggcggccacggaagcggaagaagcgcacgcggtgctggggcactgccagcacgcccggcccgagcgccgccagcggctggtcccagcaaaaggcgctgaagggctcctcgcgcacacccagaaagcggtcgacgtagcccaccgagaagtcggcggggtcgaggcgcgggtcccagcggatgcgctggatgacgtccgcggctgtgcgcagcggcggcttcttggccccggcctccggctgcgcctcgcggccaggcggcgccggcgccccagggtggggctggcggcagcgggcgccgaagcggcagcggccttccaggaagaagcggcaggccggcgggggcgcgggttccgtggcgggggcttcctgcggcaactccggctctctggccgctgccatgggtgcggggaactggcacgcccgccgcgcagacgaggtcgccccgcacggagggcggctccccatggatgcaccgagcctcacccgacagtggcgtcagcggcccgcgctccggcctagctctggggaccacgccgcgtgccctcgcgaggactctggcccagtccctccttggtggagagcctgacaccgctgctctgggacttccgccggcgccctcccccagcgccaggaaagcaagctgcgtaaaggc

SEQ ID NO: 327644 - DNA, 7559 bp, Homo sapiens
  misc_feature (4372)..(4372): n is a, c, g, or t
catggtccccggatcctgatgtcactctcctcgctgaagccctggtgactgtcacaaacatcgaggttattaattgcagcatcacagaaatagaaacaacgacttccagcatccctggggcctcagacacaggtctcatccccatggaaggggtgaaggcctcgtccacctccgatccaccagctctgcctgactccactaacacaaaaccacacatcactgaggtcacagcctctgccgagaccctgtccacagccggcaccacagagtcagctgcacctcatgccacggttgggaccccactccccacagagagagcgtgacgctctctctgtggggctatgcctacccctacagctactactatcccatgagcatgtaccagagctatggctccccttcccagtatgggatggccggctcctatggctcagccacaccccagcagccatccgcaccccaacaccaagggactctgaaccagcccccagtccccggcatggatgagagcatgtcctaccaggctccccctcagcagctgccgtcggctcagccccctcagccctcaaatcccccacatggggctcacacgctgaacagtggccctcagcctgggacagctccagccacacagcacagccaggcggggcccgccacgggccaggcctatgggccacacacctacaccgaacctgccaagcccaagaagggccaacagctgtggaaccgcatgaaacccgcccctgggactggaggtctcaagttcaacatccagaagcgaccctttgctgttaccacccagagctttggctccaacgcagagggccagcacagtggttttggcccccagcccaaccctgagaaagttcagaaccacagcgggtcctctgcccgggggaacctgtctgggaagccggatgactggccccaggacatgaaagagtatgtggagcgctgcttcaccgcctgtgagtcggaggaggacaaggaccgcacggaaaagctgctcaaggaggtgctgcaggcgcggctgcaggacggctcggcctataccattgactggagccgggagcccttgccggggctgacccgggagcctgtggctgagagccctaagaagaagcggtgggaggccgctagcagccttcaccctcctagaggggcaggctcggcgacaaggggcgggggtgccccgtcccagcgagggacgcccggggctgggggtgccggtcgagcccggggcaacagcttcaccaagtttggcaaccgcaacgtcttcatgaaggacaacagctcttcttccagcacagactcccgctcccgctcctcctccaggtccccgacgcgccacttccgcagaagtgactcccactcagactccgacagctcctactcagggaatgagtgtcaccctgtgggccgcaggaacccgccccctaagggccggggcggtcgaggggcccatatggatcggggccgaggcagggcgcagcgtgggaagaggcacgatctggcgcccaccaagcgcagtcgaaagaagatggcggcgctggagtgtgaggacccggagcgagagctgaagaagcagaagcgggcagcccgcttccagcacggacactcccgccgcctgcgcctcgagcccctggtgctgcagatgagcagcctggagagcagtggggctgaccctgactggcaggagctgcagatcgtgggcacctgccctgacatcaccaagcactacctgcgcctcacctgtgcccccgacccgtccaccgtgcgccctgtggcagttttgaaaaagtcgctgtgcatggtcaagtgccactggaaagagaagcaggactacgcgtttgcctgcgagcagatgaagtcgatccggcaggatctgacggtgcagggcatccgcaccgagttcacggtggaggtgtacgagacccatgcccggatcgccttggagaagggtgaccatgaagagtttaaccagtgccagacgcagctcaagtcgctgtacgccgagaacttgcctggcaatgtgggcgagtttactgcctaccgaatcctctactacatcttcaccaagaactcgggagacatcaccacggagctggcatacctcacacgagaactgaaggcagatccttgcgtggcccacgccttggcattaaggacagcctgggccctgggcaactaccaccgctttttccggctctactgccatgcaccctgcatgtctggctacctcgtggacaagtttgcagatcgggagcgcaaggtcgccctcaaggccatgatcaaaacgtatgtggtgccaagctcccttctgcctttgctcttcccatccttccgcctcgcaccgcccctcagaccagctcctggccgcaggcctcccccagcccccaacccttgtcctggtccttgcttccccatcatctttctccattcagccctcccctctccagttcctcttgctctccttgttggtcacctctgtgttccgggtcactcctctccctctccccactgttcccagctcactgcctctggggcctcttctccaccccatctgtgtgtctcttcctcctgttctctcctgcctggaccccctagttcactccttgccctgggcttcctcagaaccctgaggtctctgctttctcagcttgtcgctgtgctcccaccatagagaccatctagacagcctctggtctaccaggacaaggcccagtcccactcagctcctttgagagcaccagaaacgcttagggagacacctgtgttgaggccacactgggcgcggtgccagaggcccctggtcaggccatgcccctgcagtgtccttcgttcactagacattgcgcctggcttgctgtgggtggggatgagttgcttgactcatgtttagacgcatggttctgtctggtgattgaggtgcccaggcgacgctgggcaatgtcaagagaggttttcgcttgtcacagcaaggggatgctcttggcatctagtgagtggaggccagggatgctgccctgccactgccattgggcctcagagctcagtcttgccaaggtggagaaattctggtcgaagaggttgaccggtagactgaagaggccttgagagcctggccaggtggctgtccacgtgaggtcatagtcacagcatggaggccttgagagcctggccaggtggccctccacgtgaggtcatggtcacagcatgggggccttgagtgcctggccaggtggccctccacgtgaggtcatggtcacagcatggaggccttgagagcctggccaggtggccctccacgtgaggttgtggtcacagcatgggggccttgagagcctggccaggtggccctccacgtgaggtcatggtcacagcatggaggccttgagagcctggccaggtggccctccgtgtgaggtcatggtcacagcatagtttggagctagggagggactgtcagcctggaggtttggagactcattctggaatctagtgtgggtcaagccaacttcagggagaggctgagccagggtaggagtcacaggagcagacgaggatgtggggtgccgtgcacagagctccatgaccagcttgggaagttagaaggaaggggaggcaggaggctgcttagtctgctgccatgatgggccccatgaatggtggctctcaagcttctgtgctacacaggggtgtgtggttgggcgagtgtccttgttaattgatacctaattggccttggttgggaacatagccatgagtgcccctcgtgggtggggcgccagtctgtcattgacctcattgtgtcagcaccttccccccaaggaggctgaccctgccctgccagctgagactgggagacggagtgggctctgatcccagggcttccaggaaagctctggctttggagcagaagcgggttctaggacttagtgcccctcactcggtgcctgggttcctgtgtgtgtggaaagggtagggctgcaccctgtggaagagggttcagggagctctgaggacctggctcgtgctagatgctcagtcagtagtgtgttttagcagcagccggaagtgactgctttcagtgtgtagtggtgagtgctagctggcacccctgcgcctggcttcccagacactgtaacgcagggcaggggaggcagcgagggctgggtccccacggtggccctggcagccccgccatccccatcccctgccacgtgctgctccctccatctggtccctgcccctcagccagcggaggagcccgctgggcccttccctgcccgtccccgctcctccctggcccccgcacaggtaagtgagggtgaggggggcacaggggactggggtcactaaccccccccgngccccccccgagcccctgaggtggggaggctgggaggcgggtggggagccagcaggcactgtgctgaggaaatcctgtgggcacccgaatgggggggcctccccgctcgtggggccctcccctgccctcccgcccgcccgcctcatcaccttctcctcttgtctccatagcttccgccctgcgctgccagtctcctacctgcaggccgagctggccttcgagggcgaggccgcctgccgggccttcctagagcccctgggcctggcctacacgggcccggacaactccagcatcgactgccgcctcagcctggcgcagctgtcagccttctgagcacccagcgaggaggggcgggggcaggggctgcagcccccagcgctgcctttgcggattctgtttttgagccgtggacttgggttgtaaatttatttgtggggagtgcgctccaggaagagccaccatccctgcccccgttttcccaccggggagtctgtacagagatttttctacgtttttattttttgcctcagagggatgggattggggaggaggggatgggcagcggagggttgggggcatggtctgcaggctcatctgtgtccgcctttcactccactaatgctgtctcagtgttttctctctctctctttcgagcttgcactccggtacccgacccggcgccctggcccatcccatgccggggggccagtggaaagaagacaggccgtccagcccgtgcccgcctgcggcgggggcacccagcaagcccgcccaccgcccgctgcctcacctgcttcgccacagactcttgttcccagccccttggggcctccgtgtttggggtgggggagctgcttagagactgtgcccgtcctcggccccccaccctgaagtgccagcaccaccagcaccagatcctccgccgccacaccgcactgaggacacgccggccgggccgcctcgtctcaagttgtataaagttgtctccgtgtcccctcctccctctgcccccagtgtttcttctgatttttttttcccctttccctccctccctctccgcattcttcccttggttcagcacaggtaaaacggttcccctccctccctgccttcatggatcaccagctcacgtcatgttgccttctcttttctttgtgtgtgtgtttatttaagttatttttcttcctcctctcccttttctttttggccctccctccctccctcttctgccatgtaactggaggatgtgctatgagtttgcaaacagctggactgtcaggctgctttttttccagatgttcctcctctgcctccccttcccctcctctcccctccttttccttccttccttcctttccttggagcactgagcaccatttggaagcttgagagaaaccaaaattaaagagagaaagagagagcgtgcacgctcctgctttgtctttcctgtgtgggctgtttgcatccattgtctcctccagaggtctgggggtgtcactccagggggatctcagccaggggctggaaaggcccccctgtcctccctatacggcacagccagagtgtctgcaggggctggcaccccacttcctggctgagggtgaactccagcttggggaggtggacctgggaaccatggggcaccttggccacggtgaggtgggggtgcagctgccctggagactgtagtgtactcagcccctcggcttccagcctctggctcagcacttgtgccatgctttccagtgtgggagagggtggggcacacagcacatgcgggcccaggaggaccagctttctaaagctcagccgagggggtgcatttagccccggggccaagagggcccgtctcagagctccaatggcagcggcctcctccccagcgcctgccagtcgcagcagggccagggtcaggtgtaggttctgagagggcactaggaagttggcgcagtgtggggccacgtggaccaggtattcctgggccttggtcacttctgcttgtagcccaggctcggtcaccatgagggccacaaaatgtgtggggcgcggttggcaaggggctgcaacactaaggcgggcccttttgtcctcgggccaggccgcaggaccccactcggcttctgtcgtctcagcggagccccccgggactcccagggcctgtgcttccttgccccccagcaatgtggtcctggtggctgctgttggcttcagtgcctcctcagtcactccggcgaggcgtcctcttggggccagtgttcccaaatcagcagctgtgcccagcgccctctcctgggccgcctccagctctccgggttcctccacgcctggttcctggtgccctgtgcagagcggccttgtgctccctcgcttgggggcagcctgggcctcctgacctgtccccgccagtgtccactcggcaccctctgccccgtgggcgccctcggtgttcggtgcgtccaggatggtgggcccgcgtcccgccgccgagccagagccaaagacgaggtcggtgcgcgaggcgcggtcccacacaaggcggccacggaagcggaagaagcgcacgcggtgctggggcactgccagcacgcccggcccgagcgccgccagcggctggtcccagcaaaaggcgctgaagggctcctcgcgcacacccagaaagcggtcgacgtagcccaccgagaagtcggcggggtcgaggcgcgggtcccagcggatgcgctggatgacgtccgcggctgtgcgcagcggcggcttcttggccccggcctccggctgcgcctcgcggccaggcggcgccggcgccccagggtggggctggcggcagcgggcgccgaagcggcagcggccttccaggaagaagcggcaggccggcgggggcgcgggttccgtggcgggggcttcctgcggcaactccggctctctggccgctgccatgggtgcggggaactggcacgcccgccgcgcagacgaggtcgccccgcacggagggcggctccccatggatgcaccgagcctcacccgacagtggcgtcagcggcccgcgctccggcctagctctggggaccacgccgcgtgccctcgcgaggactctggcccagtccctccttggtggagagcctgacaccgctgctctgggacttccgccggcgccctcccccagcgccaggaaagcaagctgcgtaaaggc

SEQ ID NO: 327645 - DNA, 7538 bp, Homo sapiens
  misc_feature (4820)..(4820): n is a, c, g, or t
ttttttgagatggagtctttctctgttgcccactgtactctatcgtgggcgacgacagagcaagagcaagactccgtctccgagaacaacaacaacagcaacaagaaaacaacaataaaaaaaataaggctgcgtgggaggcagaaagagctaatgcggccacgcttgtcccctcggggccaccgtccccacccagacttccggtctgccttaaaatgttcatgcgtaagtgcgtgggcaggaaggcgggctcaagcgcagctcgtggcgttcattggctgtgcagggccgagggaggcggtgcaaggccgccgcgtgacgtcaggacgccgcggtcaggacgtcgaagccaaagaagaccagagccagccgggtggcacagcggtgtcgtggccgtgttgctgatcgcctgggtggttgttggcgtgtccctgcagcgaaggatcctgtgacagtgaaaaagcagtctggctcccgaggtccaccccttataccccaaggtccagatggcggccaacgtgggtgatcaacgtagcacagattggtcttctcagtacagcatggtggctggggcaggccgagagaatggcatggagacgccgatgcacgagaacccggagtgggagaaggcccgtcaggccctggccagcatcagcaagtcaggagctgccggcggctctgccaagtccagcagcaatgggcctgtggccagtgcacagtacgtgtcccaggcagaagcctcagctttgcagcagcagcagtactaccagtggtaccagcagtacaactatgcctacccctacagctactactatcccatgagcatgtaccagagctatggctccccttcccagtatgggatggccggctcctatggctcagccacaccccagcagccatccgcaccccaacaccaagggactctgaaccagcccccagtccccggcatggatgagagcatgtcctaccaggctccccctcagcagctgccgtcggctcagccccctcagccctcaaatcccccacatggggctcacacgctgaacagtggccctcagcctgggacagctccagccacacagcacagccaggcggggcccgccacgggccaggcctatgggccacacacctacaccgaacctgccaagcccaagaagggccaacagctgtggaaccgcatgaaacccgcccctgggactggaggtctcaagttcaacatccagaagcgaccctttgctgttaccacccagagctttggctccaacgcagagggccagcacagtggttttggcccccagcccaaccctgagaaagttcagaaccacagcgggtcctctgcccgggggaacctgtctgggaagccggatgactggccccaggacatgaaagagtatgtggagcgctgcttcaccgcctgtgagtcggaggaggacaaggaccgcacggaaaagctgctcaaggaggtgctgcaggcgcggctgcaggacggctcggcctataccattgactggagccgggagcccttgccggggctgacccgggagcctgtggctgagagccctaagaagaagcggtgggaggccgctagcagccttcaccctcctagaggggcaggctcggcgacaaggggcgggggtgccccgtcccagcgagggacgcccggggctgggggtgccggtcgagcccggggcaacagcttcaccaagtttggcaaccgcaacgtcttcatgaaggacaacagctcttcttccagcacagactcccgctcccgctcctcctccaggtccccgacgcgccacttccgcagaagtgactcccactcagactccgacagctcctactcagggaatgagtgtcaccctgtgggccgcaggaacccgccccctaagggccggggcggtcgaggggcccatatggatcggggccgaggcagggcgcagcgtgggaagaggcacgatctggcgcccaccaagcgcagtcgaaagaagatggcggcgctggagtgtgaggacccggagcgagagctgaagaagcagaagcgggcagcccgcttccagcacggacactcccgccgcctgcgcctcgagcccctggtgctgcagatgagcagcctggagagcagtggggctgaccctgactggcaggagctgcagatcgtgggcacctgccctgacatcaccaagcactacctgcgcctcacctgtgcccccgacccgtccaccgtgcgccctgtggcagttttgaaaaagtcgctgtgcatggtcaagtgccactggaaagagaagcaggactacgcgtttgcctgcgagcagatgaagtcgatccggcaggatctgacggtgcagggcatccgcaccgagttcacggtggaggtgtacgagacccatgcccggatcgccttggagaagggtgaccatgaagagtttaaccagtgccagacgcagctcaagtcgctgtacgccgagaacttgcctggcaatgtgggcgagtttactgcctaccgaatcctctactacatcttcaccaagaactcgggagacatcaccacggagctggcatacctcacacgagaactgaaggcagatccttgcgtggcccacgccttggcattaaggacagcctgggccctgggcaactaccaccgctttttccggctctactgccatgcaccctgcatgtctggctacctcgtggacaagtttgcagatcgggagcgcaaggtcgccctcaaggccatgatcaaaacgtatgtggtgccaagctcccttctgcctttgctcttcccatccttccgcctcgcaccgcccctcagaccagctcctggccgcaggcctcccccagcccccaacccttgtcctggtccttgcttccccatcatctttctccattcagccctcccctctccagttcctcttgctctccttgttggtcacctctgtgttccgggtcactcctctccctctccccactgttcccagctcactgcctctggggcctcttctccaccccatctgtgtgtctcttcctcctgttctctcctgcctggaccccctagttcactccttgccctgggcttcctcagaaccctgaggtctctgctttctcagcttgtcgctgtgctcccaccatagagaccatctagacagcctctggtctaccaggacaaggcccagtcccactcagctcctttgagagcaccagaaacgcttagggagacacctgtgttgaggccacactgggcgcggtgccagaggcccctggtcaggccatgcccctgcagtgtccttcgttcactagacattgcgcctggcttgctgtgggtggggatgagttgcttgactcatgtttagacgcatggttctgtctggtgattgaggtgcccaggcgacgctgggcaatgtcaagagaggttttcgcttgtcacagcaaggggatgctcttggcatctagtgagtggaggccagggatgctgccctgccactgccattgggcctcagagctcagtcttgccaaggtggagaaattctggtcgaagaggttgaccggtagactgaagaggccttgagagcctggccaggtggctgtccacgtgaggtcatagtcacagcatggaggccttgagagcctggccaggtggccctccacgtgaggtcatggtcacagcatgggggccttgagtgcctggccaggtggccctccacgtgaggtcatggtcacagcatggaggccttgagagcctggccaggtggccctccacgtgaggttgtggtcacagcatgggggccttgagagcctggccaggtggccctccacgtgaggtcatggtcacagcatggaggccttgagagcctggccaggtggccctccgtgtgaggtcatggtcacagcatagtttggagctagggagggactgtcagcctggaggtttggagactcattctggaatctagtgtgggtcaagccaacttcagggagaggctgagccagggtaggagtcacaggagcagacgaggatgtggggtgccgtgcacagagctccatgaccagcttgggaagttagaaggaaggggaggcaggaggctgcttagtctgctgccatgatgggccccatgaatggtggctctcaagcttctgtgctacacaggggtgtgtggttgggcgagtgtccttgttaattgatacctaattggccttggttgggaacatagccatgagtgcccctcgtgggtggggcgccagtctgtcattgacctcattgtgtcagcaccttccccccaaggaggctgaccctgccctgccagctgagactgggagacggagtgggctctgatcccagggcttccaggaaagctctggctttggagcagaagcgggttctaggacttagtgcccctcactcggtgcctgggttcctgtgtgtgtggaaagggtagggctgcaccctgtggaagagggttcagggagctctgaggacctggctcgtgctagatgctcagtcagtagtgtgttttagcagcagccggaagtgactgctttcagtgtgtagtggtgagtgctagctggcacccctgcgcctggcttcccagacactgtaacgcagggcaggggaggcagcgagggctgggtccccacggtggccctggcagccccgccatccccatcccctgccacgtgctgctccctccatctggtccctgcccctcagccagcggaggagcccgctgggcccttccctgcccgtccccgctcctccctggcccccgcacaggtaagtgagggtgaggggggcacaggggactggggtcactaaccccccccgngccccccccgagcccctgaggtggggaggctgggaggcgggtggggagccagcaggcactgtgctgaggaaatcctgtgggcacccgaatgggggggcctccccgctcgtggggccctcccctgccctcccgcccgcccgcctcatcaccttctcctcttgtctccatagcttccgccctgcgctgccagtctcctacctgcaggccgagctggccttcgagggcgaggccgcctgccgggccttcctagagcccctgggcctggcctacacgggcccggacaactccagcatcgactgccgcctcagcctggcgcagctgtcagccttctgagcacccagcgaggaggggcgggggcaggggctgcagcccccagcgctgcctttgcggattctgtttttgagccgtggacttgggttgtaaatttatttgtggggagtgcgctccaggaagagccaccatccctgcccccgttttcccaccggggagtctgtacagagatttttctacgtttttattttttgccctcctccctctgcccccagtgtttcttctgatttttttttcccctttccctccctccctctccgcattcttcccttggttcagcacaggtaaaacggttcccctccctccctgccttcatggatcaccagctcacgtcatgttgccttctcttttctttgtgtgtgtgtttatttaagttatttttcttcctcctctcccttttctttttggccctccctccctccctcttctgccatgtaactggaggatgtgctatgagtttgcaaacagctggactgtcaggctgctttttttccagatgttcctcctctgcctccccttcccctcctctcccctccttttccttccttccttcctttccttggagcactgagcaccatttggaagcttgagagaaaccaaaattaaagagagaaagagagagcgtgcacgctcctgctttgtctttcctgtgtgggctgtttgcatccattgtctcctccagaggtctgggggtgtcactccagggggatctcagccaggggctggaaaggcccccctgtcctccctatacggcacagccagagtgtctgcaggggctggcaccccacttcctggctgagggtgaactccagcttggggaggtggacctgggaaccatggggcaccttggccacggtgaggtgggggtgcagctgccctggagactgtagtgtactcagcccctcggcttccagcctctggctcagcacttgtgccatgctttccagtgtgggagagggtggggcacacagcacatgcgggcccaggaggaccagctttctaaagctcagccgagggggtgcatttagccccggggccaagagggcccgtctcagagctccaatggcagcggcctcctccccagcgcctgccagtcgcagcagggccagggtcaggtgtaggttctgagagggcactaggaagttggcgcagtgtggggccacgtggaccaggtattcctgggccttggtcacttctgcttgtagcccaggctcggtcaccatgagggccacaaaatgtgtggggcgcggttggcaaggggctgcaacactaaggcgggcccttttgtcctcgggccaggccgcaggaccccactcggcttctgtcgtctcagcggagccccccgggactcccagggcctgtgcttccttgccccccagcaatgtggtcctggtggctgctgttggcttcagtgcctcctcagtcactccggcgaggcgtcctcttggggccagtgttcccaaatcagcagctgtgcccagcgccctctcctgggccgcctccagctctccgggttcctccacgcctggttcctggtgccctgtgcagagcggccttgtgctccctcgcttgggggcagcctgggcctcctgacctgtccccgccagtgtccactcggcaccctctgccccgtgggcgccctcggtgttcggtgcgtccaggatggtgggcccgcgtcccgccgccgagccagagccaaagacgaggtcggtgcgcgaggcgcggtcccacacaaggcggccacggaagcggaagaagcgcacgcggtgctggggcactgccagcacgcccggcccgagcgccgccagcggctggtcccagcaaaaggcgctgaagggctcctcgcgcacacccagaaagcggtcgacgtagcccaccgagaagtcggcggggtcgaggcgcgggtcccagcggatgcgctggatgacgtccgcggctgtgcgcagcggcggcttcttggccccggcctccggctgcgcctcgcggccaggcggcgccggcgccccagggtggggctggcggcagcgggcgccgaagcggcagcggccttccaggaagaagcggcaggccggcgggggcgcgggttccgtggcgggggcttcctgcggcaactccggctctctggccgctgccatgggtgcggggaactggcacgcccgccgcgcagacgaggtcgccccgcacggagggcggctccccatggatgcaccgagcctcacccgacagtggcgtcagcggcccgcgctccggcctagctctggggaccacgccgcgtgccctcgcgaggactctggcccagtccctccttggtggagagcctgacaccgctgctctgggacttccgccggcgccctcccccagcgccaggaaagcaagctgcgtaaaggc

SEQ ID NO: 327646 - DNA, 6025 bp, Homo sapiens
  misc_feature (4820)..(4820): n is a, c, g, or t
ttttttgagatggagtctttctctgttgcccactgtactctatcgtgggcgacgacagagcaagagcaagactccgtctccgagaacaacaacaacagcaacaagaaaacaacaataaaaaaaataaggctgcgtgggaggcagaaagagctaatgcggccacgcttgtcccctcggggccaccgtccccacccagacttccggtctgccttaaaatgttcatgcgtaagtgcgtgggcaggaaggcgggctcaagcgcagctcgtggcgttcattggctgtgcagggccgagggaggcggtgcaaggccgccgcgtgacgtcaggacgccgcggtcaggacgtcgaagccaaagaagaccagagccagccgggtggcacagcggtgtcgtggccgtgttgctgatcgcctgggtggttgttggcgtgtccctgcagcgaaggatcctgtgacagtgaaaaagcagtctggctcccgaggtccaccccttataccccaaggtccagatggcggccaacgtgggtgatcaacgtagcacagattggtcttctcagtacagcatggtggctggggcaggccgagagaatggcatggagacgccgatgcacgagaacccggagtgggagaaggcccgtcaggccctggccagcatcagcaagtcaggagctgccggcggctctgccaagtccagcagcaatgggcctgtggccagtgcacagtacgtgtcccaggcagaagcctcagctttgcagcagcagcagtactaccagtggtaccagcagtacaactatgcctacccctacagctactactatcccatgagcatgtaccagagctatggctccccttcccagtatgggatggccggctcctatggctcagccacaccccagcagccatccgcaccccaacaccaagggactctgaaccagcccccagtccccggcatggatgagagcatgtcctaccaggctccccctcagcagctgccgtcggctcagccccctcagccctcaaatcccccacatggggctcacacgctgaacagtggccctcagcctgggacagctccagccacacagcacagccaggcggggcccgccacgggccaggcctatgggccacacacctacaccgaacctgccaagcccaagaagggccaacagctgtggaaccgcatgaaacccgcccctgggactggaggtctcaagttcaacatccagaagcgaccctttgctgttaccacccagagctttggctccaacgcagagggccagcacagtggttttggcccccagcccaaccctgagaaagttcagaaccacagcgggtcctctgcccgggggaacctgtctgggaagccggatgactggccccaggacatgaaagagtatgtggagcgctgcttcaccgcctgtgagtcggaggaggacaaggaccgcacggaaaagctgctcaaggaggtgctgcaggcgcggctgcaggacggctcggcctataccattgactggagccgggagcccttgccggggctgacccgggagcctgtggctgagagccctaagaagaagcggtgggaggccgctagcagccttcaccctcctagaggggcaggctcggcgacaaggggcgggggtgccccgtcccagcgagggacgcccggggctgggggtgccggtcgagcccggggcaacagcttcaccaagtttggcaaccgcaacgtcttcatgaaggacaacagctcttcttccagcacagactcccgctcccgctcctcctccaggtccccgacgcgccacttccgcagaagtgactcccactcagactccgacagctcctactcagggaatgagtgtcaccctgtgggccgcaggaacccgccccctaagggccggggcggtcgaggggcccatatggatcggggccgaggcagggcgcagcgtgggaagaggcacgatctggcgcccaccaagcgcagtcgaaagaagatggcggcgctggagtgtgaggacccggagcgagagctgaagaagcagaagcgggcagcccgcttccagcacggacactcccgccgcctgcgcctcgagcccctggtgctgcagatgagcagcctggagagcagtggggctgaccctgactggcaggagctgcagatcgtgggcacctgccctgacatcaccaagcactacctgcgcctcacctgtgcccccgacccgtccaccgtgcgccctgtggcagttttgaaaaagtcgctgtgcatggtcaagtgccactggaaagagaagcaggactacgcgtttgcctgcgagcagatgaagtcgatccggcaggatctgacggtgcagggcatccgcaccgagttcacggtggaggtgtacgagacccatgcccggatcgccttggagaagggtgaccatgaagagtttaaccagtgccagacgcagctcaagtcgctgtacgccgagaacttgcctggcaatgtgggcgagtttactgcctaccgaatcctctactacatcttcaccaagaactcgggagacatcaccacggagctggcatacctcacacgagaactgaaggcagatccttgcgtggcccacgccttggcattaaggacagcctgggccctgggcaactaccaccgctttttccggctctactgccatgcaccctgcatgtctggctacctcgtggacaagtttgcagatcgggagcgcaaggtcgccctcaaggccatgatcaaaacgtatgtggtgccaagctcccttctgcctttgctcttcccatccttccgcctcgcaccgcccctcagaccagctcctggccgcaggcctcccccagcccccaacccttgtcctggtccttgcttccccatcatctttctccattcagccctcccctctccagttcctcttgctctccttgttggtcacctctgtgttccgggtcactcctctccctctccccactgttcccagctcactgcctctggggcctcttctccaccccatctgtgtgtctcttcctcctgttctctcctgcctggaccccctagttcactccttgccctgggcttcctcagaaccctgaggtctctgctttctcagcttgtcgctgtgctcccaccatagagaccatctagacagcctctggtctaccaggacaaggcccagtcccactcagctcctttgagagcaccagaaacgcttagggagacacctgtgttgaggccacactgggcgcggtgccagaggcccctggtcaggccatgcccctgcagtgtccttcgttcactagacattgcgcctggcttgctgtgggtggggatgagttgcttgactcatgtttagacgcatggttctgtctggtgattgaggtgcccaggcgacgctgggcaatgtcaagagaggttttcgcttgtcacagcaaggggatgctcttggcatctagtgagtggaggccagggatgctgccctgccactgccattgggcctcagagctcagtcttgccaaggtggagaaattctggtcgaagaggttgaccggtagactgaagaggccttgagagcctggccaggtggctgtccacgtgaggtcatagtcacagcatggaggccttgagagcctggccaggtggccctccacgtgaggtcatggtcacagcatgggggccttgagtgcctggccaggtggccctccacgtgaggtcatggtcacagcatggaggccttgagagcctggccaggtggccctccacgtgaggttgtggtcacagcatgggggccttgagagcctggccaggtggccctccacgtgaggtcatggtcacagcatggaggccttgagagcctggccaggtggccctccgtgtgaggtcatggtcacagcatagtttggagctagggagggactgtcagcctggaggtttggagactcattctggaatctagtgtgggtcaagccaacttcagggagaggctgagccagggtaggagtcacaggagcagacgaggatgtggggtgccgtgcacagagctccatgaccagcttgggaagttagaaggaaggggaggcaggaggctgcttagtctgctgccatgatgggccccatgaatggtggctctcaagcttctgtgctacacaggggtgtgtggttgggcgagtgtccttgttaattgatacctaattggccttggttgggaacatagccatgagtgcccctcgtgggtggggcgccagtctgtcattgacctcattgtgtcagcaccttccccccaaggaggctgaccctgccctgccagctgagactgggagacggagtgggctctgatcccagggcttccaggaaagctctggctttggagcagaagcgggttctaggacttagtgcccctcactcggtgcctgggttcctgtgtgtgtggaaagggtagggctgcaccctgtggaagagggttcagggagctctgaggacctggctcgtgctagatgctcagtcagtagtgtgttttagcagcagccggaagtgactgctttcagtgtgtagtggtgagtgctagctggcacccctgcgcctggcttcccagacactgtaacgcagggcaggggaggcagcgagggctgggtccccacggtggccctggcagccccgccatccccatcccctgccacgtgctgctccctccatctggtccctgcccctcagccagcggaggagcccgctgggcccttccctgcccgtccccgctcctccctggcccccgcacaggtaagtgagggtgaggggggcacaggggactggggtcactaaccccccccgngccccccccgagcccctgaggtggggaggctgggaggcgggtggggagccagcaggcactgtgctgaggaaatcctgtgggcacccgaatgggggggcctccccgctcgtggggccctcccctgccctcccgcccgcccgcctcatcaccttctcctcttgtctccatagcttccgccctgcgctgccagtctcctacctgcaggccgagctggccttcgagggcgaggccgcctgccgggccttcctagagcccctgggcctggcctacacgggcccggacaactccagcatcgactgccgcctcagcctggcgcagctgtcagccttctgagcacccagcgaggaggggcgggggcaggggctgcagcccccagcgctgcctttgcggattctgtttttgagccgtggacttgggttgtaaatttatttgtggggagtgcgctccaggaagagccaccatccctgcccccgttttcccaccggggagtctgtacagagatttttctacgtttttattttttgcctcagagggatgggattggggaggaggggatgggcagcggagggttgggggcatggtctgcaggctcatctgtgtccgcctttcactccactaatgctgtctcagtgttttctctctctctctttcgagcttgcactccggtacccgacccggcgccctggcccatcccatgccggggggccagtggaaagaagacaggccgtccagcccgtgcccgcctgcggcgggggcacccagcaagcccgcccaccgcccgctgcctcacctgcttcgccacagactcttgttcccagccccttggggcctccgtgtttggggtgggggagctgcttagagactgtgcccgtcctcggccccccaccctgaagtgccagcaccaccagcaccagatcctccgccgccacaccgcactgaggacacgccggccgggccgcctcgtctcaagttgtataaagttgtctccgtgtcccctcctccctctgcccccagtgtttcttctgatttttttttcccctttccctccctccctctccgcattcttcccttggttcagcacaggtaaaacggttcccccctcctctcccctccttttccttccttccttcctttccttggagcactgagcaccatttggaagcttgagagaaaccaaaattaaagagagaaagagagagcgtgca

SEQ ID NO: 327647 - DNA, 6872 bp, Homo sapiens
ttttttgagatggagtctttctctgttgcccactgtactctatcgtgggcgacgacagagcaagagcaagactccgtctccgagaacaacaacaacagcaacaagaaaacaacaataaaaaaaataaggctgcgtgggaggcagaaagagctaatgcggccacgcttgtcccctcggggccaccgtccccacccagacttccggtctgccttaaaatgttcatgcgtaagtgcgtgggcaggaaggcgggctcaagcgcagctcgtggcgttcattggctgtgcagggccgagggaggcggtgcaaggccgccgcgtgacgtcaggacgccgcggtcaggacgtcgaagccaaagaagaccagagccagccgggtggcacagcggtgtcgtggccgtgttgctgatcgcctgggtggttgttggcgtgtccctgcagcgaaggatcctgtgacagtgaaaaagcagtctggctcccgaggtccaccccttataccccaaggtccagatggcggccaacgtgggtgatcaacgtagcacagattggtcttctcagtacagcatggtggctggggcaggccgagagaatggcatggagacgccgatgcacgagaacccggagtgggagaaggcccgtcaggccctggccagcatcagcaagtcaggagctgccggcggctctgccaagtccagcagcaatgggcctgtggccagtgcacagtacgtgtcccaggcagaagcctcagctttgcagcagcagcagtactaccagtggtaccagcagtacaactatgcctacccctacagctactactatcccatgagcatgtaccagagctatggctccccttcccagtatgggatggccggctcctatggctcagccacaccccagcagccatccgcaccccaacaccaagggactctgaaccagcccccagtccccggcatggatgagagcatgtcctaccaggctccccctcagcagctgccgtcggctcagccccctcagccctcaaatcccccacatggggctcacacgctgaacagtggccctcagcctgggacagctccagccacacagcacagccaggcggggcccgccacgggccaggcctatgggccacacacctacaccgaacctgccaagcccaagaagggccaacagctgtggaaccgcatgaaacccgcccctgggactggaggtctcaagttcaacatccagaagcgaccctttgctgttaccacccagagctttggctccaacgcagagggccagcacagtggttttggcccccagcccaaccctgagaaagttcagaaccacagcgggtcctctgcccgggggaacctgtctgggaagccggatgactggccccaggacatgaaagagtatgtggagcgctgcttcaccgcctgtgagtcggaggaggacaaggaccgcacggaaaagctgctcaaggaggtgctgcaggcgcggctgcaggacggctcggcctataccattgactggagccgggagcccttgccggggctgacccgggagcctgtggctgagagccctaagaagaagcggtgggaggccgctagcagccttcaccctcctagaggggcaggctcggcgacaaggggcgggggtgccccgtcccagcgagggacgcccggggctgggggtgccggtcgagcccggggcaacagcttcaccaagtttggcaaccgcaacgtcttcatgaaggacaacagctcttcttccagcacagactcccgctcccgctcctcctccaggtccccgacgcgccacttccgcagaagtgactcccactcagactccgacagctcctactcagggaatgagtgtcaccctgtgggccgcaggaacccgccccctaagggccggggcggtcgaggggcccatatggatcggggccgaggcagggcgcagcgtgggaagaggcacgatctggcgcccaccaagcgcagtcgaaagaagatggcggcgctggagtgtgaggacccggagcgagagctgaagaagcagaagcgggcagcccgcttccagcacggacactcccgccgcctgcgcctcgagcccctggtgctgcagatgagcagcctggagagcagtggggctgaccctgactggcaggagctgcagatcgtgggcacctgccctgacatcaccaagcactacctgcgcctcacctgtgcccccgacccgtccaccgtgcgccctgtggcagttttgaaaaagtcgctgtgcatggtcaagtgccactggaaagagaagcaggactacgcgtttgcctgcgagcagatgaagtcgatccggcaggatctgacggtgcagggcatccgcaccgagttcacggtggaggtgtacgagacccatgcccggatcgccttggagaagggtgaccatgaagagtttaaccagtgccagacgcagctcaagtcgctgtacgccgagaacttgcctggcaatgtgggcgagtttactgcctaccgaatcctctactacatcttcaccaagaactcgggagacatcaccacggagctggcatacctcacacgagaactgaaggcagatccttgcgtggcccacgccttggcattaaggacagcctgggccctgggcaactaccaccgctttttccggctctactgccatgcaccctgcatgtctggctacctcgtggacaagtttgcagatcgggagcgcaaggtcgccctcaaggccatgatcaaaacgtatgtggtgccaagctcccttctgcctttgctcttcccatccttccgcctcgcaccgcccctcagaccagctcctggccgcaggcctcccccagcccccaacccttgtcctggtccttgcttccccatcatctttctccattcagccctcccctctccagttcctcttgctctccttgttggtcacctctgtgttccgggtcactcctctccctctccccactgttcccagctcactgcctctggggcctcttctccaccccatctgtgtgtctcttcctcctgttctctcctgcctggaccccctagttcactccttgccctgggcttcctcagaaccctgaggtctctgctttctcagcttgtcgctgtgctcccaccatagagaccatctagacagcctctggtctaccaggacaaggcccagtcccactcagctcctttgagagcaccagaaacgcttagggagacacctgtgttgaggccacactgggcgcggtgccagaggcccctggtcaggccatgcccctgcagtgtccttcgttcactagacattgcgcctggcttgctgtgggtggggatgagttgcttgactcatgtttagacgcatggttctgtctggtgattgaggtgcccaggcgacgctgggcaatgtcaagagaggttttcgcttgtcacagcaaggggatgctcttggcatctagtgagtggaggccagggatgctgccctgccactgccattgggcctcagagctcagtcttgccaaggtggagaaattctggtcgaagaggttgaccggtagactgaagaggccttgagagcctggccaggtggctgtccacgtgaggtcatagtcacagcatggaggccttgagagcctggccaggtggccctccacgtgaggtcatggtcacagcatgggggccttgagtgcctggccaggtggccctccacgtgaggtcatggtcacagcatggaggccttgagagcctggccaggtggccctccacgtgaggttgtggtcacagcatgggggccttgagagcctggccaggtggccctccacgtgaggtcatggtcacagcatggaggccttgagagcctggccaggtggccctccgtgtgaggtcatggtcacagcatagtttggagctagggagggactgtcagcctggaggtttggagactcattctggaatctagtgtgggtcaagccaacttcagggagaggctgagccagggtaggagtcacaggagcagacgaggatgtggggtgccgtgcacagagctccatgaccagcttgggaagttagaaggaaggggaggcaggaggctgcttagtctgctgccatgatgggccccatgaatggtggctctcaagcttctgtgctacacaggggtgtgtggttgggcgagtgtccttgttaattgatacctaattggccttggttgggaacatagccatgagtgcccctcgtgggtggggcgccagtctgtcattgacctcattgtgtcagcaccttccccccaaggaggctgaccctgccctgccagctgagactgggagacggagtgggctctgatcccagggcttccaggaaagctctggctttggagcagaagcgggttctaggacttagtgcccctcactcggtgcctgggttcctgtgtgtgtgcccgcctgcggcgggggcacccagcaagcccgcccaccgcccgctgcctcacctgcttcgccacagactcttgttcccagccccttggggcctccgtgtttggggtgggggagctgcttagagactgtgcccgtcctcggccccccaccctgaagtgccagcaccaccagcaccagatcctccgccgccacaccgcactgaggacacgccggccgggccgcctcgtctcaagttgtataaagttgtctccgtgtcccctcctccctctgcccccagtgtttcttctgatttttttttcccctttccctccctccctctccgcattcttcccttggttcagcacaggtaaaacggttcccctccctccctgccttcatggatcaccagctcacgtcatgttgccttctcttttctttgtgtgtgtgtttatttaagttatttttcttcctcctctcccttttctttttggccctccctccctccctcttctgccatgtaactggaggatgtgctatgagtttgcaaacagctggactgtcaggctgctttttttccagatgttcctcctctgcctccccttcccctcctctcccctccttttccttccttccttcctttccttggagcactgagcaccatttggaagcttgagagaaaccaaaattaaagagagaaagagagagcgtgcacgctcctgctttgtctttcctgtgtgggctgtttgcatccattgtctcctccagaggtctgggggtgtcactccagggggatctcagccaggggctggaaaggcccccctgtcctccctatacggcacagccagagtgtctgcaggggctggcaccccacttcctggctgagggtgaactccagcttggggaggtggacctgggaaccatggggcaccttggccacggtgaggtgggggtgcagctgccctggagactgtagtgtactcagcccctcggcttccagcctctggctcagcacttgtgccatgctttccagtgtgggagagggtggggcacacagcacatgcgggcccaggaggaccagctttctaaagctcagccgagggggtgcatttagccccggggccaagagggcccgtctcagagctccaatggcagcggcctcctccccagcgcctgccagtcgcagcagggccagggtcaggtgtaggttctgagagggcactaggaagttggcgcagtgtggggccacgtggaccaggtattcctgggccttggtcacttctgcttgtagcccaggctcggtcaccatgagggccacaaaatgtgtggggcgcggttggcaaggggctgcaacactaaggcgggcccttttgtcctcgggccaggccgcaggaccccactcggcttctgtcgtctcagcggagccccccgggactcccagggcctgtgcttccttgccccccagcaatgtggtcctggtggctgctgttggcttcagtgcctcctcagtcactccggcgaggcgtcctcttggggccagtgttcccaaatcagcagctgtgcccagcgccctctcctgggccgcctccagctctccgggttcctccacgcctggttcctggtgccctgtgcagagcggccttgtgctccctcgcttgggggcagcctgggcctcctgacctgtccccgccagtgtccactcggcaccctctgccccgtgggcgccctcggtgttcggtgcgtccaggatggtgggcccgcgtcccgccgccgagccagagccaaagacgaggtcggtgcgcgaggcgcggtcccacacaaggcggccacggaagcggaagaagcgcacgcggtgctggggcactgccagcacgcccggcccgagcgccgccagcggctggtcccagcaaaaggcgctgaagggctcctcgcgcacacccagaaagcggtcgacgtagcccaccgagaagtcggcggggtcgaggcgcgggtcccagcggatgcgctggatgacgtccgcggctgtgcgcagcggcggcttcttggccccggcctccggctgcgcctcgcggccaggcggcgccggcgccccagggtggggctggcggcagcgggcgccgaagcggcagcggccttccaggaagaagcggcaggccggcgggggcgcgggttccgtggcgggggcttcctgcggcaactccggctctctggccgctgccatgggtgcggggaactggcacgcccgccgcgcagacgaggtcgccccgcacggagggcggctccccatggatgcaccgagcctcacccgacagtggcgtcagcggcccgcgctccggcctagctctggggaccacgccgcgtgccctcgcgaggactctggcccagtccctccttggtggagagcctgacaccgctgctctgggacttccgccggcgccctcccccagcgccaggaaagcaagctgcgtaaaggc

SEQ ID NO: 327648 - DNA, 4643 bp, Homo sapiens
ttttttgagatggagtctttctctgttgcccactgtactctatcgtgggcgacgacagagcaagagcaagactccgtctccgagaacaacaacaacagcaacaagaaaacaacaataaaaaaaataaggctgcgtgggaggcagaaagagctaatgcggccacgcttgtcccctcggggccaccgtccccacccagacttccggtctgccttaaaatgttcatgcgtaagtgcgtgggcaggaaggcgggctcaagcgcagctcgtggcgttcattggctgtgcagggccgagggaggcggtgcaaggccgccgcgtgacgtcaggacgccgcggtcaggacgtcgaagccaaagaagaccagagccagccgggtggcacagcggtgtcgtggccgtgttgctgatcgcctgggtggttgttggcgtgtccctgcagcgaaggatcctgtgacagtgaaaaagcagtctggctcccgaggtccaccccttataccccaaggtccagatggcggccaacgtgggtgatcaacgtagcacagattggtcttctcagtacagcatggtggctggggcaggccgagagaatggcatggagacgccgatgcacgagaacccggagtgggagaaggcccgtcaggccctggccagcatcagcaagtcaggagctgccggcggctctgccaagtccagcagcaatgggcctgtggccagtgcacagtacgtgtcccaggcagaagcctcagctttgcagcagcagcagtactaccagtggtaccagcagtacaactatgcctacccctacagctactactatcccatgagcatgtaccagagctatggctccccttcccagtatgggatggccggctcctatggctcagccacaccccagcagccatccgcaccccaacaccaagggactctgaaccagcccccagtccccggcatggatgagagcatgtcctaccaggctccccctcagcagctgccgtcggctcagccccctcagccctcaaatcccccacatggggctcacacgctgaacagtggccctcagcctgggacagctccagccacacagcacagccaggcggggcccgccacgggccaggcctatgggccacacacctacaccgaacctgccaagcccaagaagggccaacagctgtggaaccgcatgaaacccgcccctgggactggaggtctcaagttcaacatccagaagcgaccctttgctgttaccacccagagctttggctccaacgcagagggccagcacagtggttttggcccccagcccaaccctgagaaagttcagaaccacagcgggtcctctgcccgggggaacctgtctgggaagccggatgactggccccaggacatgaaagagtatgtggagcgctgcttcaccgcctgtgagtcggaggaggacaaggaccgcacggaaaagctgctcaaggaggtgctgcaggcgcggctgcaggacggctcggcctataccattgactggagccgggagcccttgccggggctgacccgggagcctgtggctgagagccctaagaagaagcggtgggaggccgctagcagccttcaccctcctagaggggcaggctcggcgacaaggggcgggggtgccccgtcccagcgagggacgcccggggctgggggtgccggtcgagcccggggcaacagcttcaccaagtttggcaaccgcaacgtcttcatgaaggacaacagctcttcttccagcacagactcccgctcccgctcctcctccaggtccccgacgcgccacttccgcagaagtgactcccactcagactccgacagctcctactcagggaatgagtgtcaccctgtgggccgcaggaacccgccccctaagggccggggcggtcgaggggcccatatggatcggggccgaggcagggcgcagcgtgggaagaggcacgatctggcgcccaccaagcgcagtcgaaagaagatggcggcgctggagtgtgaggacccggagcgagagctgaagaagcagaagcgggcagcccgcttccagcacggacactcccgccgcctgcgcctcgagcccctggtgctgcagatgagcagcctggagagcagtggggctgaccctgactggcaggagctgcagatcgtgggcacctgccctgacatcaccaagcactacctgcgcctcacctgtgcccccgacccgtccaccgtgcgccctgtggcagttttgaaaaagtcgctgtgcatggtcaagtgccactggaaagagaagcaggactacgcgtttgcctgcgagcagatgaagtcgatccggcaggatctgacggtgcagggcatccgcaccgagttcacggtggaggtgtacgagacccatgcccggatcgccttggagaagggtgaccatgaagagtttaaccagtgccagacgcagctcaagtcgctgtacgccgagaacttgcctggcaatgtgggcgagtttactgcctaccgaatcctctactacatcttcaccaagaactcgggagacatcaccacggagctggcatacctcacacgagaactgaaggcagatccttgcgtggcccacgccttggcattaaggacagcctgggccctgggcaactaccaccgctttttccggctctactgccatgcaccctgcatgtctggctacctcgtggacaagtttgcagatcgggagcgcaaggtcgccctcaaggccatgatcaaaacgtatgtggtgccaagctcccttctgcctttgctcttcccatccttccgcctcgcaccgcccctcagaccagctcctggccgcaggcctcccccagcccccaacccttgtcctggtccttgcttccccatcatctttctccattcagccctcccctctccagttcctcttgctctccttgttggtcacctctgtgttccgggtcactcctctccctctccccactgttcccagctcactgcctctggggcctcttctccaccccatctgtgtgtctcttcctcctgttctctcctgcctggaccccctagttcactccttgccctgggcttcctcagaaccctgaggtctctgctttctcagcttgtcgctgtgctcccaccatagagaccatctagacagcctctggtctaccaggacaaggcccagtcccactcagctcctttgagagcaccagaaacgcttagggagacacctgtgttgaggccacactgggcgcggtgccagaggcccctggtcaggccatgcccctgcagtgtccttcgttcactagacattgcgcctggcttgctgtgggtggggatgagttgcttgactcatgtttagacgcatggttctgtctggtgattgaggtgcccaggcgacgctgggcaatgtcaagagaggttttcgcttgtcacagcaaggggatgctcttggcatctagtgagtggaggccagggatgctgccctgccactgccattgggcctcagagctcagtcttgccaaggtggagaaattctggtcgaagaggttgaccggtagactgaagaggccttgagagcctggccaggtggctgtccacgtgaggtcatagtcacagcatggaggccttgagagcctggccaggtggccctccacgtgaggtcatggtcacagcatgggggccttgagtgcctggccaggtggccctccacgtgaggtcatggtcacagcatggaggccttgagagcctggccaggtggccctccacgtgaggttgtggtcacagcatgggggccttgagagcctggccaggtggccctccacgtgaggtcatggtcacagcatggaggccttgagagcctggccaggtggccctccgtgtgaggtcatggtcacagcatagtttggagctagggagggactgtcagcctggaggtttggagactcattctggaatctagtgtgggtcaagccaacttcagggagaggctgagccagggtaggagtcacaggagcagacgaggatgtggggtgccgtgcacagagctccatgaccagcttgggaagttagaaggaaggggaggcaggaggctgcttagtctgctgccatgatgggccccatgaatggtggctctcaagcttctgtgctacacaggggtgtgtggttgggcgagtgtccttgttaattgatacctaattggccttggttgggaacatagccatgagtgcccctcgtgggtggggcgccagtctgtcattgacctcattgtgtcagcaccttccccccaaggaggctgaccctgccctgccagctgagactgggagacggagtgggctctgatcccagggcttccaggaaagctctggctttggagcagaagcgggttctaggacttagtgcccctcactcggtgcctgggttcctgtgtgtgtggaaagggtagggctgcaccctgtggaagagggttcagggagctctgaggacctggctcgtgctagatgctcagtcagtagtgtgttttagcagcagccggaagtgactgctttcagtgtgtagtggtgagtgctagctggcacccctgcgcctggcttcccagacactgtaacgcagggcaggggagcacccgcgagtaggggatcctctaaccagccag

SEQ ID NO: 327649 - DNA, 4453 bp, Homo sapiens
ttttttgagatggagtctttctctgttgcccactgtactctatcgtgggcgacgacagagcaagagcaagactccgtctccgagaacaacaacaacagcaacaagaaaacaacaataaaaaaaataaggctgcgtgggaggcagaaagagctaatgcggccacgcttgtcccctcggggccaccgtccccacccagacttccggtctgccttaaaatgttcatgcgtaagtgcgtgggcaggaaggcgggctcaagcgcagctcgtggcgttcattggctgtgcagggccgagggaggcggtgcaaggccgccgcgtgacgtcaggacgccgcggtcaggacgtcgaagccaaagaagaccagagccagccgggtggcacagcggtgtcgtggccgtgttgctgatcgcctgggtggttgttggcgtgtccctgcagcgaaggatcctgtgacagtgaaaaagcagtctggctcccgaggtccaccccttataccccaaggtccagatggcggccaacgtgggtgatcaacgtagcacagattggtcttctcagtacagcatggtggctggggcaggccgagagaatggcatggagacgccgatgcacgagaacccggagtgggagaaggcccgtcaggccctggccagcatcagcaagtcaggagctgccggcggctctgccaagtccagcagcaatgggcctgtggccagtgcacagtacgtgtcccaggcagaagcctcagctttgcagcagcagcagtactaccagtggtaccagcagtacaactatgcctacccctacagctactactatcccatgagcatgtaccagagctatggctccccttcccagtatgggatggccggctcctatggctcagccacaccccagcagccatccgcaccccaacaccaagggactctgaaccagcccccagtccccggcatggatgagagcatgtcctaccaggctccccctcagcagctgccgtcggctcagccccctcagccctcaaatcccccacatggggctcacacgctgaacagtggccctcagcctgggacagctccagccacacagcacagccaggcggggcccgccacgggccaggcctatgggccacacacctacaccgaacctgccaagcccaagaagggccaacagctgtggaaccgcatgaaacccgcccctgggactggaggtctcaagttcaacatccagaagcgaccctttgctgttaccacccagagctttggctccaacgcagagggccagcacagtggttttggcccccagcccaaccctgagaaagttcagaaccacagcgggtcctctgcccgggggaacctgtctgggaagccggatgactggccccaggacatgaaagagtatgtggagcgctgcttcaccgcctgtgagtcggaggaggacaaggaccgcacggaaaagctgctcaaggaggtgctgcaggcgcggctgcaggacggctcggcctataccattgactggagccgggagcccttgccggggctgacccgggagcctgtggctgagagccctaagaagaagcggtgggaggccgctagcagccttcaccctcctagaggggcaggctcggcgacaaggggcgggggtgccccgtcccagcgagggacgcccggggctgggggtgccggtcgagcccggggcaacagcttcaccaagtttggcaaccgcaacgtcttcatgaaggacaacagctcttcttccagcacagactcccgctcccgctcctcctccaggtccccgacgcgccacttccgcagaagtgactcccactcagactccgacagctcctactcagggaatgagtgtcaccctgtgggccgcaggaacccgccccctaagggccggggcggtcgaggggcccatatggatcggggccgaggcagggcgcagcgtgggaagaggcacgatctggcgcccaccaagcgcagtcgaaagaagatggcggcgctggagtgtgaggacccggagcgagagctgaagaagcagaagcgggcagcccgcttccagcacggacactcccgccgcctgcgcctcgagcccctggtgctgcagatgagcagcctggagagcagtggggctgaccctgactggcaggagctgcagatcgtgggcacctgccctgacatcaccaagcactacctgcgcctcacctgtgcccccgacccgtccaccgtgcgccctgtggcagttttgaaaaagtcgctgtgcatggtcaagtgccactggaaagagaagcaggactacgcgtttgcctgcgagcagatgaagtcgatccggcaggatctgacggtgcagggcatccgcaccgagttcacggtggaggtgtacgagacccatgcccggatcgccttggagaagggtgaccatgaagagtttaaccagtgccagacgcagctcaagtcgctgtacgccgagaacttgcctggcaatgtgggcgagtttactgcctaccgaatcctctactacatcttcaccaagaactcgggagacatcaccacggagctggcatacctcacacgagaactgaaggcagatccttgcgtggcccacgccttggcattaaggacagcctgggccctgggcaactaccaccgctttttccggctctactgccatgcaccctgcatgtctggctacctcgtggacaagtttgcagatcgggagcgcaaggtcgccctcaaggccatgatcaaaacgtatgtggtgccaagctcccttctgcctttgctcttcccatccttccgcctcgcaccgcccctcagaccagctcctggccgcaggcctcccccagcccccaacccttgtcctggtccttgcttccccatcatctttctccattcagccctcccctctccagttcctcttgctctccttgttggtcacctctgtgttccgggtcactcctctccctctccccactgttcccagctcactgcctctggggcctcttctccaccccatctgtgtgtctcttcctcctgttctctcctgcctggaccccctagttcactccttgccctgggcttcctcagaaccctgaggtctctgctttctcagcttgtcgctgtgctcccaccatagagaccatctagacagcctctggtctaccaggacaaggcccagtcccactcagctcctttgagagcaccagaaacgcttagggagacacctgtgttgaggccacactgggcgcggtgccagaggcccctggtcaggccatgcccctgcagtgtccttcgttcactagacattgcgcctggcttgctgtgggtggggatgagttgcttgactcatgtttagacgcatggttctgtctggtgattgaggtgcccaggcgacgctgggcaatgtcaagagaggttttcgcttgtcacagcaaggggatgctcttggcatctagtgagtggaggccagggatgctgccctgccactgccattgggcctcagagctcagtcttgccaaggtggagaaattctggtcgaagaggttgaccggtagactgaagaggccttgagagcctggccaggtggctgtccacgtgaggtcatagtcacagcatggaggccttgagagcctggccaggtggccctccacgtgaggtcatggtcacagcatgggggccttgagtgcctggccaggtggccctccacgtgaggtcatggtcacagcatggaggccttgagagcctggccaggtggccctccacgtgaggttgtggtcacagcatgggggccttgagagcctggccaggtggccctccacgtgaggtcatggtcacagcatggaggccttgagagcctggccaggtggccctccgtgtgaggtcatggtcacagcatagtttggagctagggagggactgtcagcctggaggtttggagactcattctggaatctagtgtgggtcaagccaacttcagggagaggctgagccagggtaggagtcacaggagcagacgaggatgtggggtgccgtgcacagagctccatgaccagcttgggaagttagaaggaaggggaggcaggaggctgcttagtctgctgccatgatgggccccatgaatggtggctctcaagcttctgtgctacacaggggtgtgtggttgggcgagtgtccttgttaattgatacctaattggccttggttgggaacatagccatgagtgcccctcgtgggtggggcgccagtctgtcattgacctcattgtgtcagcaccttccccccaaggaggctgaccctgccctgccagctgagactgggagacggagtgggctctgatcccagggcttccaggaaagctctggctttggagcagaagcgggttctaggacttagtgcccctcactcggtgcctgggttcctgtgtgtgtgaaaggcaccgcaaaagaatcctctaagtca

SEQ ID NO: 327650 - DNA, 4193 bp, Homo sapiens
ttttttgagatggagtctttctctgttgcccactgtactctatcgtgggcgacgacagagcaagagcaagactccgtctccgagaacaacaacaacagcaacaagaaaacaacaataaaaaaaataaggctgcgtgggaggcagaaagagctaatgcggccacgcttgtcccctcggggccaccgtccccacccagacttccggtctgccttaaaatgttcatgcgtaagtgcgtgggcaggaaggcgggctcaagcgcagctcgtggcgttcattggctgtgcagggccgagggaggcggtgcaaggccgccgcgtgacgtcaggacgccgcggtcaggacgtcgaagccaaagaagaccagagccagccgggtggcacagcggtgtcgtggccgtgttgctgatcgcctgggtggttgttggcgtgtccctgcagcgaaggatcctgtgacagtgaaaaagcagtctggctcccgaggtccaccccttataccccaaggtccagatggcggccaacgtgggtgatcaacgtagcacagattggtcttctcagtacagcatggtggctggggcaggccgagagaatggcatggagacgccgatgcacgagaacccggagtgggagaaggcccgtcaggccctggccagcatcagcaagtcaggagctgccggcggctctgccaagtccagcagcaatgggcctgtggccagtgcacagtacgtgtcccaggcagaagcctcagctttgcagcagcagcagtactaccagtggtaccagcagtacaactatgcctacccctacagctactactatcccatgagcatgtaccagagctatggctccccttcccagtatgggatggccggctcctatggctcagccacaccccagcagccatccgcaccccaacaccaagggactctgaaccagcccccagtccccggcatggatgagagcatgtcctaccaggctccccctcagcagctgccgtcggctcagccccctcagccctcaaatcccccacatggggctcacacgctgaacagtggccctcagcctgggacagctccagccacacagcacagccaggcggggcccgccacgggccaggcctatgggccacacacctacaccgaacctgccaagcccaagaagggccaacagctgtggaaccgcatgaaacccgcccctgggactggaggtctcaagttcaacatccagaagcgaccctttgctgttaccacccagagctttggctccaacgcagagggccagcacagtggttttggcccccagcccaaccctgagaaagttcagaaccacagcgggtcctctgcccgggggaacctgtctgggaagccggatgactggccccaggacatgaaagagtatgtggagcgctgcttcaccgcctgtgagtcggaggaggacaaggaccgcacggaaaagctgctcaaggaggtgctgcaggcgcggctgcaggacggctcggcctataccattgactggagccgggagcccttgccggggctgacccgggagcctgtggctgagagccctaagaagaagcggtgggaggccgctagcagccttcaccctcctagaggggcaggctcggcgacaaggggcgggggtgccccgtcccagcgagggacgcccggggctgggggtgccggtcgagcccggggcaacagcttcaccaagtttggcaaccgcaacgtcttcatgaaggacaacagctcttcttccagcacagactcccgctcccgctcctcctccaggtccccgacgcgccacttccgcagaagtgactcccactcagactccgacagctcctactcagggaatgagtgtcaccctgtgggccgcaggaacccgccccctaagggccggggcggtcgaggggcccatatggatcggggccgaggcagggcgcagcgtgggaagaggcacgatctggcgcccaccaagcgcagtcgaaagaagatggcggcgctggagtgtgaggacccggagcgagagctgaagaagcagaagcgggcagcccgcttccagcacggacactcccgccgcctgcgcctcgagcccctggtgctgcagatgagcagcctggagagcagtggggctgaccctgactggcaggagctgcagatcgtgggcacctgccctgacatcaccaagcactacctgcgcctcacctgtgcccccgacccgtccaccgtgcgccctgtggcagttttgaaaaagtcgctgtgcatggtcaagtgccactggaaagagaagcaggactacgcgtttgcctgcgagcagatgaagtcgatccggcaggatctgacggtgcagggcatccgcaccgagttcacggtggaggtgtacgagacccatgcccggatcgccttggagaagggtgaccatgaagagtttaaccagtgccagacgcagctcaagtcgctgtacgccgagaacttgcctggcaatgtgggcgagtttactgcctaccgaatcctctactacatcttcaccaagaactcgggagacatcaccacggagctggcatacctcacacgagaactgaaggcagatccttgcgtggcccacgccttggcattaaggacagcctgggccctgggcaactaccaccgctttttccggctctactgccatgcaccctgcatgtctggctacctcgtggacaagtttgcagatcgggagcgcaaggtcgccctcaaggccatgatcaaaacgtatgtggtgccaagctcccttctgcctttgctcttcccatccttccgcctcgcaccgcccctcagaccagctcctggccgcaggcctcccccagcccccaacccttgtcctggtccttgcttccccatcatctttctccattcagccctcccctctccagttcctcttgctctccttgttggtcacctctgtgttccgggtcactcctctccctctccccactgttcccagctcactgcctctggggcctcttctccaccccatctgtgtgtctcttcctcctgttctctcctgcctggaccccctagttcactccttgccctgggcttcctcagaaccctgaggtctctgctttctcagcttgtcgctgtgctcccaccatagagaccatctagacagcctctggtctaccaggacaaggcccagtcccactcagctcctttgagagcaccagaaacgcttagggagacacctgtgttgaggccacactgggcgcggtgccagaggcccctggtcaggccatgcccctgcagtgtccttcgttcactagacattgcgcctggcttgctgtgggtggggatgagttgcttgactcatgtttagacgcatggttctgtctggtgattgaggtgcccaggcgacgctgggcaatgtcaagagaggttttcgcttgtcacagcaaggggatgctcttggcatctagtgagtggaggccagggatgctgccctgccactgccattgggcctcagagctcagtcttgccaaggtggagaaattctggtcgaagaggttgaccggtagactgaagaggccttgagagcctggccaggtggctgtccacgtgaggtcatagtcacagcatggaggccttgagagcctggccaggtggccctccacgtgaggtcatggtcacagcatgggggccttgagtgcctggccaggtggccctccacgtgaggtcatggtcacagcatggaggccttgagagcctggccaggtggccctccacgtgaggttgtggtcacagcatgggggccttgagagcctggccaggtggccctccacgtgaggtcatggtcacagcatggaggccttgagagcctggccaggtggccctccgtgtgaggtcatggtcacagcatagtttggagctagggagggactgtcagcctggaggtttggagactcattctggaatctagtgtgggtcaagccaacttcagggagaggctgagccagggtaggagtcacaggagcagacgaggatgtggggtgccgtgcacagagctccatgaccagcttgggaagttagaaggaaggggaggcaggaggctgcttagtctgctgccatgatgggccttccttccttcctttccttggagcactgagcaccatttggaagcttgagagaaaccaaaattaaagagagaaagagagagcgtgca

SEQ ID NO: 327651 - DNA, 2522 bp, Homo sapiens
ttttttgagatggagtctttctctgttgcccactgtactctatcgtgggcgacgacagagcaagagcaagactccgtctccgagaacaacaacaacagcaacaagaaaacaacaataaaaaaaataaggctgcgtgggaggcagaaagagctaatgcggccacgcttgtcccctcggggccaccgtccccacccagacttccggtctgccttaaaatgttcatgcgtaagtgcgtgggcaggaaggcgggctcaagcgcagctcgtggcgttcattggctgtgcagggccgagggaggcggtgcaaggccgccgcgtgacgtcaggacgccgcggtcaggacgtcgaagccaaagaagaccagagccagccgggtggcacagcggtgtcgtggccgtgttgctgatcgcctgggtggttgttggcgtgtccctgcagcgaaggatcctgtgacagtgaaaaagcagtctggctcccgaggtccaccccttataccccaaggtccagatggcggccaacgtgggtgatcaacgtagcacagattggtcttctcagtacagcatggtggctggggcaggccgagagaatggcatggagacgccgatgcacgagaacccggagtgggagaaggcccgtcaggccctggccagcatcagcaagtcaggagctgccggcggctctgccaagtccagcagcaatgggcctgtggccagtgcacagtacgtgtcccaggcagaagcctcagctttgcagcagcagcagtactaccagtggtaccagcagtacaactatgcctacccctacagctactactatcccatgagcatgtaccagagctatggctccccttcccagtatgggatggccggctcctatggctcagccacaccccagcagccatccgcaccccaacaccaagggactctgaaccagcccccagtccccggcatggatgagagcatgtcctaccaggctccccctcagcagctgccgtcggctcagccccctcagccctcaaatcccccacatggggctcacacgctgaacagtggccctcagcctgggacagctccagccacacagcacagccaggcggggcccgccacgggccaggcctatgggccacacacctacaccgaacctgccaagcccaagaagggccaacagctgtggaaccgcatgaaacccgcccctgggactggaggtctcaagttcaacatccagaagcgaccctttgctgttaccacccagagctttggctccaacgcagagggccagcacagtggttttggcccccagcccaaccctgagaaagttcagaaccacagcgggtcctctgcccgggggaacctgtctgggaagccggatgactggccccaggacatgaaagagtatgtggagcgctgcttcaccgcctgtgagtcggaggaggacaaggaccgcacggaaaagctgctcaaggaggtgctgcaggcgcggctgcaggacggctcggcctataccattgactggagccgggagcccttgccggggctgacccgggagcctgtggctgagagccctaagaagaagcggtgggaggccgctagcagccttcaccctcctagaggggcaggctcggcgacaaggggcgggggtgccccgtcccagcgagggacgcccggggctgggggtgccggtcgagcccggggcaacagcttcaccaagtttggcaaccgcaacgtcttcatgaaggacaacagctcttcttccagcacagactcccgctcccgctcctcctccaggtccccgacgcgccacttccgcagaagtgactcccactcagactccgacagctcctactcagggaatgagtgtcaccctgtgggccgcaggaacccgccccctaagggccggggcggtcgaggggcccatatggatcggggccgaggcagggcgcagcgtgggaagaggcacgatctggcgcccaccaagcgcagtcgaaagaagatggcggcgctggagtgtgaggacccggagcgagagctgaagaagcagaagcgggcagcccgcttccagcacggacactcccgccgcctgcgcctcgagcccctggtgctgcagatgagcagcctggagagcagtggggctgaccctgactggcaggagctgcagatcgtgggcacctgccctgacatcaccaagcactacctgcgcctcacctgtgcccccgacccgtccaccgtgcgccctgtggcagttttgaaaaagtcgctgtgcatggtcaagtgccactggaaagagaagcaggactacgcgtttgcctgcgagcagatgaagtcgatccggcaggatctgacggtgcagggcatccgcaccgagttcttggtgaagatgtagtagaggattcggtaggcagtaaactcgcccacattgccaggcaagttctcggcgtacagcgacttgagctgcgtctggcactggttaaactcttcatggtcacccttctccaaggcgatccgggcatgggtctcgtacacctcc

SEQ ID NO: 327652 - DNA, 1232 bp, Homo sapiens
ttttttgagatggagtctttctctgttgcccactgtactctatcgtgggcgacgacagagcaagagcaagactccgtctccgagaacaacaacaacagcaacaagaaaacaacaataaaaaaaataaggctgcgtgggaggcagaaagagctaatgcggccacgcttgtcccctcggggccaccgtccccacccagacttccggtctgccttaaaatgttcatgcgtaagtgcgtgggcaggaaggcgggctcaagcgcagctcgtggcgttcattggctgtgcagggccgagggaggcggtgcaaggccgccgcgtgacgtcaggacgccgcggtcaggacgtcgaagccaaagaagaccagagccagccgggtggcacagcggtgtcgtggccgtgttgctgatcgcctgggtggttgttggcgtgtccctgcagcgaaggatcctgtgacagtgaaaaagcagtctggctcccgaggtccaccccttataccccaaggtccagatggcggccaacgtgggtgatcaacgtagcacagattggtcttctcagtacagcatggtggctggggcaggccgagagaatggcatggagacgccgatgcacgagaacccggagtgggagaaggcccgtcaggccctggccagcatcagcaagtcaggagctgccggcggctctgccaagtccagcagcaatgggcctgtggccagtgcacagtacgtgtcccaggcagaagcctcagctttgcagcagcagcagtactaccagtggtaccagcagtacaactatgcctacccctacagctactactatcccatgagcatgtaccagagctatggctccccttcccagtatgggatggccggctcctatggctcagccacaccccagcagccatccgcaccccaacaccaagggactctgaaccagcccccagtccccggcatggatgagagcatgtcctaccaggctccccctcagcagctgccgtcggctcagccccctcagcccctgaagtcacttgccttcaaatgtacccacactcccagagaacttctcacagccaataaatgactgataaaggctttcacaggttccttctgagagcacccccaacaataaaccaagtgcattcagatccctgtctcgagctctgctgcagacctgacctgagagaactctccactttgatttgcagccagaacctcccattccaacgcatcacccgtt

SEQ ID NO: 327653 - DNA, 952 bp, Homo sapiens
ttttttgagatggagtctttctctgttgcccactgtactctatcgtgggcgacgacagagcaagagcaagactccgtctccgagaacaacaacaacagcaacaagaaaacaacaataaaaaaaataaggctgcgtgggaggcagaaagagctaatgcggccacgcttgtcccctcggggccaccgtccccacccagacttccggtctgccttaaaatgttcatgcgtaagtgcgtgggcaggaaggcgggctcaagcgcagctcgtggcgttcattggctgtgcagggccgagggaggcggtgcaaggccgccgcgtgacgtcaggacgccgcggtcaggacgtcgaagccaaagaagaccagagccagccgggtggcacagcggtgtcgtggccgtgttgctgatcgcctgggtggttgttggcgtgtccctgcagcgaaggatcctgtgacagtgaaaaagcagtctggctcccgaggtccaccccttataccccaaggtccagatggcggccaacgtgggtgatcaacgtagcacagattggtcttctcagtacagcatggtggctggggcaggccgagagaatggcatggagacgccgatgcacgagaacccggagtgggagaaggcccgtcaggccctggccagcatcagcaagtcaggagctgccggcggctctgccaagtccagcagcaatgggcctgtggccagtgcacagtacgtgtcccaggcagaagcctcagctttgcagcagcagcagtactaccagtggtaccagcagtacaactatgcctacccgctcgcgatcgggtgggtgtggccagaacgtgaaccactggacaggatatagctgttccagcttagggagcccactcgggcagagtgactggtcatatttcgaagccgtttctgctgctgcacatcccatagctgcacctcagcactgctggt

SEQ ID NO: 327654 - DNA, 555 bp, Homo sapiens
ttttttttttttgaagctttcacttaatttttatttttaaaaccacagtcattacttacaatgcgcataacagatttatcatctttttctttgttaggatttgacaggtctggaacacatgctaataaattgctcaaaaatgcttcctgctgatatcacgcagctaaataatattccaccaactcaggaatcctactatgatcccaacctggtaagtggaatgggttacttttatgtacaacagaaagtacatccttatcaagtgttacttacagcatttctgtatagcacttcagaactagcagcaggctctatggttttatatgtctttgttgcaaaacagtagcacaggtaatccgaatcattcatagcttgctttggaatcttactgttcaccccatagatgcgtaatttggatttgttgcttatattccataagcggatgtcctgtttactaagggtgacagaaaatagccccagagtattctcattggccagagagaacaatcctgaggtttaaccatcaaggaaatattcatcacatggaatatcatc

SEQ ID NO: 327655 - DNA, 710 bp, Homo sapiens
gatggggttttaccatgttggccaggctggtctcaaactcctgacctcaggtgatccagcctcctctgcctcccaaagtgttgagattacaggcgtcagccaccacacccagtccagaactgtctttcaaaattgtaattacagcaagaatccctcttcttcctccgatctacaggaaacagtggagggagtcgctatattgcaggaggtggaggtactgggagtattggagttggacagccctggcagtttggtggaggaataaacagtgtctcttactgtaatcagggatgtgcgaattcctggctcgctgataagttctgtgaccaagcatgcaatgtcttgtcctgtgggtttgatgctggcgactgtgggcaaggtatgtttactgccaaacaaataagaatgggagcataaaacatccttgacaggtagagagagttttgaatggcttttgttatttaaaataatgattctctgtgtatccctttaccagccttgcattcaaactagttatgaaagtaagagaacaacataaatcactgaagaggatcttttcctgttattgttgcagtctggtgttttgttttgttttgttttgtttggaccaagcagatttaccttagctgaaaatatgtggtgaagttttaatttggaaacaaaaaaggatatcaataattcattaaataaagatggttcaaacactggaa

SEQ ID NO: 327656 - DNA, 7028 bp, Homo sapiens
  misc_feature (2302)..(2302): n is a, c, g, or t
gaaaactcagactcaaagaattaaaggaaaacagaggaaaaatgcccagttaaaaaaaaaatcatgtttctgttttttcctctagatcattttcatgaattgtataaagtgatccttctcccaaaccagactcactatattattccaaaaggtgaatgcctgccttatttcagctttgcagaagtagccaaaagaggagttgaaggtgcctatagtgacaatccaataattcgacatgcttctattgccaacaagtggaaaaccatccacctcataatgcacagtggaatgaatgccaccacaatacattttaatctcacgtttcaaaatacaaacgatgaagagttcaaaatgcagataacagtggaggtggacacaagggagggaccaaaactgaattctacagcccagaagggttacgaaaatttagttagtcccataacacttcttccagaggcggaaatcctttttgaggatattcccaaagaaaaacgcttcccgaagtttaagagacatgatgttaactcaacaaggagagcccaggaagaggtgaaaattcccctggtaaatatttcactccttccaaaagacgcccagttgagtctcaataccttggatttgcaactggaacatggagacatcactttgaaaggatacaatttgtccaagtcagccttgctgagatcatttctgatgaactcacagcatgctaaaataaaaaatcaagctataataacagatgaaacaaatgacagtttggtggctccacaggaaaaacaggttcataaaagcatcttgccaaacagcttaggagtgtctgaaagattgcagaggttgacttttcctgcagtgagtgtaaaagtgaatggtcatgaccagggtcagaatccacccctggacttggagaccacagcaagatttagagtggaaactcacacccaaaaaaccataggcggaaatgtgacaaaagaaaagcccccatctctgattgttccactggaaagccagatgacaaaagaaaagaaaatcacagggaaagaaaaagagaacagtagaatggaggaaaatgctgaaaatcacataggcgttactgaagtgttacttggaagaaagctgcagcattacacagatagttacttgggctttttgccatgggagaaaaaaaagtatttccaagatcttctcgacgaagaagagtcattgaagacacaattggcatacttcactgatagcaaaaatactgggaggcaactaaaagatacatttgcagattccctcagatatgtaaataaaattctaaatagcaagtttggattcacatcgcggaaagtccctgctcacatgcctcacatgattgaccggattgttatgcaagaactgcaagatatgttccctgaagaatttgacaagacgtcatttcacaaagtgcgccattctgaggatatgcagtttgccttctcttatttttattatctcatgagtgcagtgcagccactgaatatatctcaagtctttgatgaagttgatacagatcaatctggtgtcttgtctgacagagaaatccgaacactggctaccagaattcacgaactgccgttaagtttgcaggatttgacaggtctggaacacatgctaataaattgctcaaaaatgcttcctgctgatatcacgcagctaaataatattccaccaactcaggaatcctactatgatcccaacctgccaccggtcactaaaagtctagtaacaaactgtaaaccagtaactgacaaaatccacaaagcatataaggacaaaaacaaatataggtttgaaatcatgggagaagaagaaatcgcttttaaaatgattcgtaccaacgtttctcatgtggttggccagttggatgacataagaaaaaaccctaggatctcactctgttgtccaagctggaatgcagtaatgcaaacatggctcactgtagcctcgacctcgtgggctcaagcaatcctcccacctcagcctcctgactagtggaaccacagacatgagctgctgcacccagctaaaatggagtatttttaatttctgggtcttttaaatgcatttggaggtctttagttttacctcactgaaattaggattttaattataaataatcaaagatgtgaaccttacagacattttaaagccattatattttttctataaaccctgttctcgtttggaggagaaagaaattggaattttcaaaaaaaataaaaatacctttaacacctatttagtgtctttagtaatccagtaaaatacttgattttttacnaaatgtttcccacaagccaagcaaaccataagctacaataataattacctagcgtacagccctctttgcatatgctgttccctccacttgaagtgtactgtttaatttcttaaaataactttagcttttaagaaccaattttgatgggagtacagacttcccccattttcttgatgagttctctccgtcatgtgtagtaataatgtgagaatttgcagtttttagttgtagcctatacttttaggtctttgtgccaatttgaaagttattgggttagagtattcatagacattttcatggtacttaaagggacaggggtttagtaaaaagacacatggcaagccaggctttttccacagtttgccaggcccagctgcctcttgtgtacctgaacagattttatcattaacccttgtttatgttgttttgttttatttcgacgaaggcttattttaagtcaggcatggaaaactagacttcagactgacttcagctttaaggacatgtttatcccgttaacagggagtctgggatagacaatctccaggctttgtttttctctgaatttcttagctctgcttgtgatggcttcatcatcaggccacagaccattaacacattctagaactttaacattggttaaataataccatctaatagcctgtcttcagcatttccccagttgcctccaaatgcccttcatagctgttctctgcctctgtttgtttttaatccaagatacactcaaggctcatatattaggttgacatagctctttagtatcctttaatttaaagcagtctccaggtttagagaaagatgaatgagctttcacatacccctcacttgtcttcttcagaagtgtaggctacaactaaaacttccttcttcagaaggaagacaagtgatttatatttatttacttccatttctatttgaccttgtttcatctaaacacacccactccaccactgctacctgattaatattaagtgaatctcaaacattgtatcattttagctccacgttttttgtatgtatctccaaaatataaagattcttaaaaatataaccacaataccattatcaccctaaaaaaatcaataatgattccttaatatgaccaactactttgtcaatgtacacctttcactcctcttaactttcataaagacttatgtgtttttttggtttttaagtttgttggtttgaagttaaatctatgggttttccctccatctctctttttttaaccgtataattttttgcatgtgtatatgaataaatctgattatagattctatagctatcttacactttgtccctctctgattgaatcctagttaacaagtttctatgtctcttgtatttcccataaattggtagttggatctgaaggctttatcaggtttgtttgattttttttttttttaattttggcgaatctacttcaaaagtattggcctacctacaagccactttaatgggcccttagtttagtgacctttgccttgaaaggaacttgaaacaagcaaggaagcaccactgtaatctgcttttttgccagaactgtagcatcttacagcttggttagagacatagtaagcagaaattatcaaattcatataatctgtagctataaggcactgtctctctctctcaattatttacatgatttttctttgtaatataactatcatttcagagaacttggttttgattttttttttttaatctttttgagacagagtctcgctttatcacccaggctggagtgcagtggtgcaatctaaagattgctgactgcaacctctgcctcccgagttcagcaattctagtgcctcagcctctcgagtagctgggattacaggcatgccaccacacccggctaatttttttgtatttttagtaaagacagggtttcaccatgttggctaggctggtctcaaatttttgacctcaagtaatcagcctaccttgatctcccaaagtgctgggattacaggcatgagccaccatgcatggccttcagagaacttggttttaggtacttacggattgtctttcttttttttcctcactgcagcctctccctcccaggttcaagcgattctcctacctcagcttcctgaagagctgggaccacaggaagtttgtttgcctgaatgacaacattgaccacaatcataaagatgctcagacagtgaaggctgttctcagggacttctatgaatccatgttccccataccttcccaatttgaactgccaagagagtatcgaaaccgtttccttcatatgcatgagctgcaggaatggagggcttatcgagacaaattgaagttttggacccattgtgtactagcaacattgattatgtttactatattctcattttttgctgagcagttaattgcacttaagcggaagatatttcccagaaggaggatacacaaagaagctagtcccaatcgaatcagagtatagaagatcttcatttgaaaaccatctacctcagcatttactgagcattttaaaactcagcttcacagagatgtctttgtgatgtgatgcttagcagtttggcccgaagaaggaaaatatccagtaccatgctgttttgtggcatgaatatagcccactgaccaggaattatttaaccaacccactgaaaacttgtgtgttgagcagctctgaactgattttacttttaaagaatttgctcatggacctgtcatcctttttataaaaaggctcactgacaagagacagctgttaatttcccacagcaatcattgcagactaactttattaggagaagcctatgccagctgggagtgattgctaagaggctccagtctttgcattccaaagccttttgctaaagttttgcactttttttttttcatttcccatttttaagtagttactaagttaactagttattcttgcttctgagtataacgaattgggatgtctaaacctatttttatagatgttatttaaataatgcagcaatatcacctcttattgacaatacctaaattatgagttttattaatatttaagactgtaaatggtcttaaaccactaactactgaagagctcaatgattgacatctgaaatgctttgtaattattgacttcagcccctaagaatgctatgatttcacgtgcaggtctaatttcaaagggctagagttagtactacttaccagatgtaattatgttttggaaatgtacatattcaaacagaagtgcctcattttagaaatgagtagtgctgatggcactggcacattacagtggtgtcttgtttaatactcattggtatattccagtagctatctctctcagttggtttttgatagaacagaggccagcaaactttctttgtaaaaggctggttagtaaattattgcaggccacctgtgtctttgtcatacattcttcttgctgttgtttagtttgttttttttcaaacaaccctctaaaaatgtaaaaaccatgtttagcttgcagctgtacaaaaactgcccaccagccagatgtgaccctcaggccatcatttgccaatcactgagaattagtttttgttgttgttgttgttgttgtttttgagacagagtctctctctgttgcccaggctggagtgcagtggcgcaatctcagctcactgcaacctccgcctcccgggttcaagcagttctgtctcagccttctgagtagctgggactacaggtgcatgccaccacaccctgctaatttttgtatttttagtagagacgggggttccaccatattggtcaggcttatcttgaactcctgacctcaggtgatccacctgcctctgcctcccaaagtgctgagattacaggcataagccagtgcacccagccgagaattagtatttttatgtatggttaaaccttggcgtctagccatattttatgtcataatacaatggatttgtgaagagcagattccatgagtaactctgacaggtattttagatcatgatctcaacaatattcttccaaaatggcatacatcttttgtacaaagaacttgaaatgtaaatactgtgtttgtgctgtaagagttgtgtatttcaaaaactgaaatctcataaaaagttaaatttttgtctgacactttgatttttaaatctttgaggattgagtttactgttactcagattcagcagtcacttgagtgcctttactgtgtatcaggttctgtgctgaacattactaaaattaagtggaaagtaaggaaagattagtattatacagaagaatgttgctttatggggggaaaatagtttctaaatggaatttatcatatggtaaaatttaggatatctgggtatcattataaaagctgagatttattctagaaaagttagagaaatgaacatttgtctgtaatgacgatttctgtggttagatgaatatagtccatacctaattaggagcttgataatgggatggataatacaatcataggctattcatagactcattctaatgattctgtgattcagtagaatcattagaacagaggaacctcagaagttgatgagcagtcagatggtcagaaccatttgttcaaatcctatagaaaaggtcactctgtgttttagtttttttgtgctgctgtaacaaaatacctcagactgggtaatttacaaagaacagaaattcattttcttacagttctggaggc

SEQ ID NO: 327657 - DNA, 4965 bp, Homo sapiens
ctcaaatttcgaaaaacatcctggtgtgttactattgtcactcgaggattgtcaaggttcagccaggatggaatctgcccgttggtgacaatgaaaatattccgaacccatggtgcatgcctctcgattcatcgcatcgaagggctgtcccagaagtttatttacctaaatgatgatgtcatgtttgggaaggatgtctggccagatgatttttacagtcactccaaaggccagaaggtttatttgacatggcctgtgccaaactgtgccgagggctgcccaggttcctggattaaggatggctattgtgacaaggcttgtaataattcagcctgcgattgggatggtggggattgctctggaaacagtggagggagtcgctatattgcaggaggtggaggtactgggagtattggagttggacagccctggcagtttggtggaggaataaacagtgtctcttactgtaatcagggatgtgcgaattcctggctcgctgataagttctgtgaccaagcatgcaatgtcttgtcctgtgggtttgatgctggcgactgtgggcaagatcattttcatgaattgtataaagtgatccttctcccaaaccagactcactatattattccaaaaggtgaatgcctgccttatttcagctttgcagaagtagccaaaagaggagttgaaggtgcctatagtgacaatccaataattcgacatgcttctattgccaacaagtggaaaaccatccacctcataatgcacagtggaatgaatgccaccacaatacattttaatctcacgtttcaaaatacaaacgatgaagagttcaaaatgcagataacagtggaggtggacacaagggagggaccaaaactgaattctacagcccagaagggttacgaaaatttagttagtcccataacacttcttccagaggcggaaatcctttttgaggatattcccaaagaaaaacgcttcccgaagtttaagagacatgatgttaactcaacaaggagagcccaggaagaggtgaaaattcccctggtaaatatttcactccttccaaaagacgcccagttgagtctcaataccttggatttgcaactggaacatggagacatcactttgaaaggatacaatttgtccaagtcagccttgctgagatcatttctgatgaactcacagcatgctaaaataaaaaatcaagctataataacagatgaaacaaatgacagtttggtggctccacaggaaaaacaggttcataaaagcatcttgccaaacagcttaggagtgtctgaaagattgcagaggttgacttttcctgcagtgagtgtaaaagtgaatggtcatgaccagggtcagaatccacccctggacttggagaccacagcaagatttagagtggaaactcacacccaaaaaaccataggcggaaatgtgacaaaagaaaagcccccatctctgattgttccactggaaagccagatgacaaaagaaaagaaaatcacagggaaagaaaaagagaacagtagaatggaggaaaatgctgaaaatcacataggcgttactgaagtgttacttggaagaaagctgcagcattacacagatagttacttgggctttttgccatgggagaaaaaaaagtatttccaagatcttctcgacgaagaagagtcattgaagacacaattggcatacttcactgatagcaaaaatactgggaggcaactaaaagatacatttgcagattccctcagatatgtaaataaaattctaaatagcaagtttggattcacatcgcggaaagtccctgctcacatgcctcacatgattgaccggattgttatgcaagaactgcaagatatgttccctgaagaatttgacaagacgtcatttcacaaagtgcgccattctgaggatatgcagtttgccttctcttatttttattatctcatgagtgcagtgcagccactgaatatatctcaagtctttgatgaagttgatacagatcaatctggtgtcttgtctgacagagaaatccgaacactggctaccagaattcacgaactgccgttaagtttgcaggatttgacaggtctggaacacatgctaataaattgctcaaaaatgcttcctgctgatatcacgcagctaaataatattccaccaactcaggaatcctactatgatcccaacctgccaccggtcactaaaagtctagtaacaaactgtaaaccagtaactgacaaaatccacaaagcatataaggacaaaaacaaatataggtttgaaatcatgggagaagaagaaatcgcttttaaaatgattcgtaccaacgtttctcatgtggttggccagttggatgacataagaaaaaaccctaggaagtttgtttgcctgaatgacaacattgaccacaatcataaagatgctcagacagtgaaggctgttctcagggacttctatgaatccatgttccccataccttcccaatttgaactgccaagagagtatcgaaaccgtttccttcatatgcatgagctgcaggaatggagggcttatcgagacaaattgaagttttggacccattgtgtactagcaacattgattatgtttactatattctcattttttgctgagcagttaattgcacttaagcggaagatatttcccagaaggaggatacacaaagaagctagtcccaatcgaatcagagtatagaagatcttcatttgaaaaccatctacctcagcatttactgagcattttaaaactcagcttcacagagatgtctttgtgatgtgatgcttagcagtttggcccgaagaaggaaaatatccagtaccatgctgttttgtggcatgaatatagcccactgaccaggaattatttaaccaacccactgaaaacttgtgtgttgagcagctctgaactgattttacttttaaagaatttgctcatggacctgtcatcctttttataaaaaggctcactgacaagagacagctgttaatttcccacagcaatcattgcagactaactttattaggagaagcctatgccagctgggagtgattgctaagaggctccagtctttgcattccaaagccttttgctaaagttttgcactttttttttttcatttcccatttttaagtagttactaagttaactagttattcttgcttctgagtataacgaattgggatgtctaaacctatttttatagatgttatttaaataatgcagcaatatcacctcttattgacaatacctaaattatgagttttattaatatttaagactgtaaatggtcttaaaccactaactactgaagagctcaatgattgacatctgaaatgctttgtaattattgacttcagcccctaagaatgctatgatttcacgtgcaggtctaatttcaaagggctagagttagtactacttaccagatgtaattatgttttggaaatgtacatattcaaacagaagtgcctcattttagaaatgagtagtgctgatggcactggcacattacagtggtgtcttgtttaatactcattggtatattccagtagctatctctctcagttggtttttgatagaacagaggccagcaaactttctttgtaaaaggctggttagtaaattattgcaggccacctgtgtctttgtcatacattcttcttgctgttgtttagtttgttttttttcaaacaaccctctaaaaatgtaaaaaccatgtttagcttgcagctgtacaaaaactgcccaccagccagatgtgaccctcaggccatcatttgccaatcactgagaattagtttttgttgttgttgttgttgttgtttttgagacagagtctctctctgttgcccaggctggagtgcagtggcgcaatctcagctcactgcaacctccgcctcccgggttcaagcagttctgtctcagccttctgagtagctgggactacaggtgcatgccaccacaccctgctaatttttgtatttttagtagagacgggggttccaccatattggtcaggcttatcttgaactcctgacctcaggtgatccacctgcctctgcctcccaaagtgctgagattacaggcataagccagtgcacccagccgagaattagtatttttatgtatggttaaaccttggcgtctagccatattttatgtcataatacaatggatttgtgaagagcagattccatgagtaactctgacaggtattttagatcatgatctcaacaatattcttccaaaatggcatacatcttttgtacaaagaacttgaaatgtaaatactgtgtttgtgctgtaagagttgtgtatttcaaaaactgaaatctcataaaaagttaaatttttgtctgacactttgatttttaaatctttgaggattgagtttactgttactcagattcagcagtcacttgagtgcctttactgtgtatcaggttctgtgctgaacattactaaaattaagtggaaagtaaggaaagattagtattatacagaagaatgttgctttatggggggaaaatagtttctaaatggaatttatcatatggtaaaatttaggatatctgggtatcattataaaagctgagatttattctagaaaagttagagaaatgaacatttgtctgtaatgacgatttctgtggttagatgaatatagtccatacctaattaggagcttgataatgggatggataatacaatcataggctattcatagactcattctaatgattctgtgattcagtagaatcattagaacagaggaacctcagaagttgatgagcagtcagatggtcagaaccatttgttcaaatcctatagaaaaggtcactctgtgttttagtttttttgtgctgctgtaacaaaatacctcagactgggtaatttacaaagaacagaaattcattttcttacagttctggaggc

SEQ ID NO: 327658 - DNA, 4441 bp, Homo sapiens
attcgagctcggaccctccttgtaatccaagcagtcgcaagatcattttcatgaattgtataaagtgatccttctcccaaaccagactcactatattattccaaaaggtgaatgcctgccttatttcagctttgcagaagtagccaaaagaggagttgaaggtgcctatagtgacaatccaataattcgacatgcttctattgccaacaagtggaaaaccatccacctcataatgcacagtggaatgaatgccaccacaatacattttaatctcacgtttcaaaatacaaacgatgaagagttcaaaatgcagataacagtggaggtggacacaagggagggaccaaaactgaattctacagcccagaagggttacgaaaatttagttagtcccataacacttcttccagaggcggaaatcctttttgaggatattcccaaagaaaaacgcttcccgaagtttaagagacatgatgttaactcaacaaggagagcccaggaagaggtgaaaattcccctggtaaatatttcactccttccaaaagacgcccagttgagtctcaataccttggatttgcaactggaacatggagacatcactttgaaaggatacaatttgtccaagtcagccttgctgagatcatttctgatgaactcacagcatgctaaaataaaaaatcaagctataataacagatgaaacaaatgacagtttggtggctccacaggaaaaacaggttcataaaagcatcttgccaaacagcttaggagtgtctgaaagattgcagaggttgacttttcctgcagtgagtgtaaaagtgaatggtcatgaccagggtcagaatccacccctggacttggagaccacagcaagatttagagtggaaactcacacccaaaaaaccataggcggaaatgtgacaaaagaaaagcccccatctctgattgttccactggaaagccagatgacaaaagaaaagaaaatcacagggaaagaaaaagagaacagtagaatggaggaaaatgctgaaaatcacataggcgttactgaagtgttacttggaagaaagctgcagcattacacagatagttacttgggctttttgccatgggagaaaaaaaagtatttccaagatcttctcgacgaagaagagtcattgaagacacaattggcatacttcactgatagcaaaaatactgggaggcaactaaaagatacatttgcagattccctcagatatgtaaataaaattctaaatagcaagtttggattcacatcgcggaaagtccctgctcacatgcctcacatgattgaccggattgttatgcaagaactgcaagatatgttccctgaagaatttgacaagacgtcatttcacaaagtgcgccattctgaggatatgcagtttgccttctcttatttttattatctcatgagtgcagtgcagccactgaatatatctcaagtctttgatgaagttgatacagatcaatctggtgtcttgtctgacagagaaatccgaacactggctaccagaattcacgaactgccgttaagtttgcaggatttgacaggtctggaacacatgctaataaattgctcaaaaatgcttcctgctgatatcacgcagctaaataatattccaccaactcaggaatcctactatgatcccaacctgccaccggtcactaaaagtctagtaacaaactgtaaaccagtaactgacaaaatccacaaagcatataaggacaaaaacaaatataggtttgaaatcatgggagaagaagaaatcgcttttaaaatgattcgtaccaacgtttctcatgtggttggccagttggatgacataagaaaaaaccctaggaagtttgtttgcctgaatgacaacattgaccacaatcataaagatgctcagacagtgaaggctgttctcagggacttctatgaatccatgttccccataccttcccaatttgaactgccaagagagtatcgaaaccgtttccttcatatgcatgagctgcaggaatggagggcttatcgagacaaattgaagttttggacccattgtgtactagcaacattgattatgtttactatattctcattttttgctgagcagttaattgcacttaagcggaagatatttcccagaaggaggatacacaaagaagctagtcccaatcgaatcagagtatagaagatcttcatttgaaaaccatctacctcagcatttactgagcattttaaaactcagcttcacagagatgtctttgtgatgtgatgcttagcagtttggcccgaagaaggaaaatatccagtaccatgctgttttgtggcatgaatatagcccactgaccaggaattatttaaccaacccactgaaaacttgtgtgttgagcagctctgaactgattttacttttaaagaatttgctcatggacctgtcatcctttttataaaaaggctcactgacaagagacagctgttaatttcccacagcaatcattgcagactaactttattaggagaagcctatgccagctgggagtgattgctaagaggctccagtctttgcattccaaagccttttgctaaagttttgcactttttttttttcatttcccatttttaagtagttactaagttaactagttattcttgcttctgagtataacgaattgggatgtctaaacctatttttatagatgttatttaaataatgcagcaatatcacctcttattgacaatacctaaattatgagttttattaatatttaagactgtaaatggtcttaaaccactaactactgaagagctcaatgattgacatctgaaatgctttgtaattattgacttcagcccctaagaatgctatgatttcacgtgcaggtctaatttcaaagggctagagttagtactacttaccagatgtaattatgttttggaaatgtacatattcaaacagaagtgcctcattttagaaatgagtagtgctgatggcactggcacattacagtggtgtcttgtttaatactcattggtatattccagtagctatctctctcagttggtttttgatagaacagaggccagcaaactttctttgtaaaaggctggttagtaaattattgcaggccacctgtgtctttgtcatacattcttcttgctgttgtttagtttgttttttttcaaacaaccctctaaaaatgtaaaaaccatgtttagcttgcagctgtacaaaaactgcccaccagccagatgtgaccctcaggccatcatttgccaatcactgagaattagtttttgttgttgttgttgttgttgtttttgagacagagtctctctctgttgcccaggctggagtgcagtggcgcaatctcagctcactgcaacctccgcctcccgggttcaagcagttctgtctcagccttctgagtagctgggactacaggtgcatgccaccacaccctgctaatttttgtatttttagtagagacgggggttccaccatattggtcaggcttatcttgaactcctgacctcaggtgatccacctgcctctgcctcccaaagtgctgagattacaggcataagccagtgcacccagccgagaattagtatttttatgtatggttaaaccttggcgtctagccatattttatgtcataatacaatggatttgtgaagagcagattccatgagtaactctgacaggtattttagatcatgatctcaacaatattcttccaaaatggcatacatcttttgtacaaagaacttgaaatgtaaatactgtgtttgtgctgtaagagttgtgtatttcaaaaactgaaatctcataaaaagttaaatttttgtctgacactttgatttttaaatctttgaggattgagtttactgttactcagattcagcagtcacttgagtgcctttactgtgtatcaggttctgtgctgaacattactaaaattaagtggaaagtaaggaaagattagtattatacagaagaatgttgctttatggggggaaaatagtttctaaatggaatttatcatatggtaaaatttaggatatctgggtatcattataaaagctgagatttattctagaaaagttagagaaatgaacatttgtctgtaatgacgatttctgtggttagatgaatatagtccatacctaattaggagcttgataatgggatggataatacaatcataggctattcatagactcattctaatgattctgtgattcagtagaatcattagaacagaggaacctcagaagttgatgagcagtcagatggtcagaaccatttgttcaaatcctatagaaaaggtcactctgtgttttagtttttttgtgctgctgtaacaaaatacctcagactgggtaatttacaaagaacagaaattcattttcttacagttctggaggc

SEQ ID NO: 327659 - DNA, 3286 bp, Homo sapiens
ccgatctagaggatcccatttctggactgatagcaaaaatactgggaggcaactaaaagatacatttgcagattccctcagatatgtaaataaaattctaaatagcaagtttggattcacatcgcggaaagtccctgctcacatgcctcacatgattgaccggattgttatgcaagaactgcaagatatgttccctgaagaatttgacaagacgtcatttcacaaagtgcgccattctgaggatatgcagtttgccttctcttatttttattatctcatgagtgcagtgcagccactgaatatatctcaagtctttgatgaagttgatacagatcaatctggtgtcttgtctgacagagaaatccgaacactggctaccagaattcacgaactgccgttaagtttgcaggatttgacaggtctggaacacatgctaataaattgctcaaaaatgcttcctgctgatatcacgcagctaaataatattccaccaactcaggaatcctactatgatcccaacctgccaccggtcactaaaagtctagtaacaaactgtaaaccagtaactgacaaaatccacaaagcatataaggacaaaaacaaatataggtttgaaatcatgggagaagaagaaatcgcttttaaaatgattcgtaccaacgtttctcatgtggttggccagttggatgacataagaaaaaaccctaggaagtttgtttgcctgaatgacaacattgaccacaatcataaagatgctcagacagtgaaggctgttctcagggacttctatgaatccatgttccccataccttcccaatttgaactgccaagagagtatcgaaaccgtttccttcatatgcatgagctgcaggaatggagggcttatcgagacaaattgaagttttggacccattgtgtactagcaacattgattatgtttactatattctcattttttgctgagcagttaattgcacttaagcggaagatatttcccagaaggaggatacacaaagaagctagtcccaatcgaatcagagtatagaagatcttcatttgaaaaccatctacctcagcatttactgagcattttaaaactcagcttcacagagatgtctttgtgatgtgatgcttagcagtttggcccgaagaaggaaaatatccagtaccatgctgttttgtggcatgaatatagcccactgaccaggaattatttaaccaacccactgaaaacttgtgtgttgagcagctctgaactgattttacttttaaagaatttgctcatggacctgtcatcctttttataaaaaggctcactgacaagagacagctgttaatttcccacagcaatcattgcagactaactttattaggagaagcctatgccagctgggagtgattgctaagaggctccagtctttgcattccaaagccttttgctaaagttttgcactttttttttttcatttcccatttttaagtagttactaagttaactagttattcttgcttctgagtataacgaattgggatgtctaaacctatttttatagatgttatttaaataatgcagcaatatcacctcttattgacaatacctaaattatgagttttattaatatttaagactgtaaatggtcttaaaccactaactactgaagagctcaatgattgacatctgaaatgctttgtaattattgacttcagcccctaagaatgctatgatttcacgtgcaggtctaatttcaaagggctagagttagtactacttaccagatgtaattatgttttggaaatgtacatattcaaacagaagtgcctcattttagaaatgagtagtgctgatggcactggcacattacagtggtgtcttgtttaatactcattggtatattccagtagctatctctctcagttggtttttgatagaacagaggccagcaaactttctttgtaaaaggctggttagtaaattattgcaggccacctgtgtctttgtcatacattcttcttgctgttgtttagtttgttttttttcaaacaaccctctaaaaatgtaaaaaccatgtttagcttgcagctgtacaaaaactgcccaccagccagatgtgaccctcaggccatcatttgccaatcactgagaattagtttttgttgttgttgttgttgttgtttttgagacagagtctctctctgttgcccaggctggagtgcagtggcgcaatctcagctcactgcaacctccgcctcccgggttcaagcagttctgtctcagccttctgagtagctgggactacaggtgcatgccaccacaccctgctaatttttgtatttttagtagagacgggggttccaccatattggtcaggcttatcttgaactcctgacctcaggtgatccacctgcctctgcctcccaaagtgctgagattacaggcataagccagtgcacccagccgagaattagtatttttatgtatggttaaaccttggcgtctagccatattttatgtcataatacaatggatttgtgaagagcagattccatgagtaactctgacaggtattttagatcatgatctcaacaatattcttccaaaatggcatacatcttttgtacaaagaacttgaaatgtaaatactgtgtttgtgctgtaagagttgtgtatttcaaaaactgaaatctcataaaaagttaaatttttgtctgacactttgatttttaaatctttgaggattgagtttactgttactcagattcagcagtcacttgagtgcctttactgtgtatcaggttctgtgctgaacattactaaaattaagtggaaagtaaggaaagattagtattatacagaagaatgttgctttatggggggaaaatagtttctaaatggaatttatcatatggtaaaatttaggatatctgggtatcattataaaagctgagatttattctagaaaagttagagaaatgaacatttgtctgtaatgacgatttctgtggttagatgaatatagtccatacctaattaggagcttgataatgggatggataatacaatcataggctattcatagactcattctaatgattctgtgattcagtagaatcattagaacagaggaacctcagaagttgatgagcagtcagatggtcagaaccatttgttcaaatcctatagaaaaggtcactctgtgttttagtttttttgtgctgctgtaacaaaatacctcagactgggtaatttacaaagaacagaaattcattttcttacagttctggaggc
